United States Patent Application Publication US 2008/0050393 A1 - sequence listing, part 39

SEQ ID NO: 133024 - DNA, 6135 bp, Homo sapiens
ctgccagatcagtttgtcaccacccaggctcccttgcctttggctgggtgcaacttccattttaggtgttggatctgagggggaaaaaaaagagagagggagagagagagaaagaagagcaggaaagatcccgaaaggaggaagaggtggcgaaaaatcaactgccctgctggatttgtctttctcagcaccttggcgaagccttgggtttctttcttaaaggactgatttttagaactccacatttgagctctctccttcctgcttcctccttgctgtggtggctgggatgctccttccatgattttttgaatctagactgggctgttctctgtgttaaaccaatcagttgcgaccttctcttaacagtgtgaagtgagggggtctctctccctccttctccttcctctgtgattcaccttcctttttaccctgccctgcggcggctccgccccttaccttcatggacgactcagaggtggagtcgaccgccagcatcttggcctctgtgaaggaacaagaggcccagtttgagaagctgacccgggcgctggaggaggaacggcgccacgtctcggcgcagctggaacgcgtccgggtctcaccacaagatgccaacccactcatggccaacggcacactcacccgccggcatcagaacggccggtttgtgggcgatgctgaccttgaaagacagaaattttcagatttgaaactcaacggaccccaggatcacagtcaccttctatatagcaccatccccaggatgcaggagccggggcagattgtggagacctacacggaggaggatcctgagggagccatgtctgtagtctctgtggagacctcagatgatgggaccactcggcgcacagagaccacggtcaagaaagtagtgaagactgtgacaacacggacagtacagccagtcgctatgggaccagacgggttgcctgtggatgcttcatcagtttctaacaactatatccagactttgggtcgtgatttccgcaagaatggcaatgggggacctggtccctatgtggggcaagctggcactgctacccttcctaggaacttccactaccctcctgatggttatagtcgccactatgaagatggttatccaggtggcagtgataactatggcagtctgtcccgggtgacccgcattgaggagcggtataggcccagcatggaaggctaccgggcacctagtagacaggatgtgtatgggccccaaccccaggttcgggtaggtgggagcagcgtggatctgcatcgctttcatccagagccttatgggctagaggatgaccagcgtagtatgggctatgatgacctggattatggtatgatgtctgattatggcactgcccgtcggactgggacaccctctgaccctcgtcggcgcctcaggagctatgaagacatgattggtgaggaggtgccatcggatcaatactactgggctcctttggcccagcatgagcgaggaagtttagcaagcttggatagcctgcgcaaaggagggcctccacctcctaattggagacagccagagctgccagaggtgatcgccatgcttggattccgcttggatgctgtcaagtccaatgcagctgcatacctgcaacacttatgctaccgcaatgacaaggtgaagactgacgtgcggaagctcaagggcatcccagtactggtgggattgttagaccatcccaaaaaggaagtgcaccttggagcctgtggagctctcaagaatatctcttttggacgtgaccaggataacaagattgccataaaaaactgtgatggtgtgcctgcccttgtgcgattgcttcgaaaggctcgtgatatggaccttactgaagttattaccggaaccctgtggaatctttcatcccatgactcaatcaaaatggagattgtggaccatgcactgcatgccttgacagatgaagtgatcattcctcattctggttgggagcgggaacctaatgaagactgtaagccacgccatattgagtgggaatcggtgctcaccaacacagctggctgccttaggaatgtaagctcagagaggagtgaagctcgccggaaacttcgggaatgtgatggtttagttgatgccctcattttcattgttcaggctgagattgggcagaaggattcagacagcaagcttgtagagaactgtgtttgccttcttcggaacttatcatatcaagttcaccgggagatcccacaggcagagcgttaccaagaggcagctcccaatgttgccaacaatactgggccacatgctgccagttgctttggggccaagaagggcaaagggaaaaaacctatagaggatccagcaaacgatacagtggatttccctaaaagaacgagtccagctcgaggctatgagctcttatttcagccagaggtggttcggatatacatctcacttcttaaggagagcaagactcctgccatcctagaagcctcagctggagctatccagaacttgtgtgctgggcgctggacgtatggtcgatacatccgctctgctctgcgtcaagagaaggctctttctgccatagctgacctcctgactaatgaacatgaacgggtggtgaaagctgcatctggagcactgagaaacctggctgtggatgctcgcaacaaagaattaattggtaaacatgctattcctaacttggtaaagaatctgccaggaggacagcagaactcctcttggaatttctctgaggacactgtcatctctattttgaacactatcaacgaggttatcgctgagaacttggaggctgccaaaaagcttcgagagacacagggtattgagaagctggtgttgatcaacaaatcagggaaccgctcagaaaaagaagttcgagcagcagcacttgtattacagacaatctggggatataaggaactgcggaagccactggaaaaagaaggatggaagaaatcagactttcaggtgaatctaaacaatgcttcccgaagccagagcagtcattcatatgatgatagtactctccctctcattgaccggaaccaaaaatcagataagaaacctgatcgggaagaaattcagatgagcaatatgggatcaaacacaaaatcactagataacaactattccacaccaaatgagagaggagaccacaatagaacactggatcgatcgggggatctaggcgacatggagccattgaagggaacaacacccttgatgcagaagatttagcaccactatctccgttccatctgggcttatatgtacttttattttttggtggtgaaattgactgatgattttcctttttcttcgctggactattgtgccaactgccaggctgcctcctgcccttacagccctaagtggctgccttctttccatcaactcccaacttcttcctgtgaagtttaattgtctcaacgcctccccctcccccattccctccatttttctcccaagaaacctgactcaattatttgcatattttgagaaactgctgcagattagttctttttgccagttttccctggaactcctggccttttgtggaggggagggatggagagaataggaatcttcactagaagccgtgggaagaattggaagttacatgctgtatatgcaatgtccagcagtctgataaactgacgattcttaatcaagatttttttcctgatggggaagggacttttattttcttttagagaggggaaagtgtgagctcttcccttattcctaatggctatttttgaagcaaagaaggccagcaacattggcacatgccacctggcaaaggacccttgagtaagtgaaggtctcctaaaactgggattaagaaaccttgctctcctcatctccaaggcagggaccatcaagaacctacagactccatctcttctgcaagcctcatgccaaccctgggctattgctgctgccccttaaacacaggctgtccttaacccacctctcctgccctgtgatatgtctgctgagttggcctggccatttccaagaggctgtagaaaggggagaatgtcaaggaagacttttggtagagaaggagcagaaagatgtgtttttgggaagaagaagacctctaggaggagctagtaggaatgtacatgaagcaattagtctgaaactggcttccccactcccccgtttctccttttcctatccttataggcctgtcccttgcctctgccctggattggttggcaaactataggacttgatgtacataactcctgtcccttttcccttacaaggtggggattgcccctggctttgcctcttctttgtgcctttggcctggggtgcatctcctcccgcccttccatgtgcctttctttgcctctgcagtctcatttctcataattttgcaaattatattttgttgctttcttacctactattggccctaaatagcagaaagaagagaagtgaccgagagaacctcagattcttcattgaggattggtatagccatgatttcagtcatagcaagcttttgctcaacagcatatgggtgggatttggcaaaaatcctattctgatgaatctcaaagtaaggctggtaagagaagtgagtggtgtgactcttactccttaggtgcccagaatttaccatcatctctgaaggagttacagggaagtggtctccccaattctcccctccctccagtattgccccctctcactttagcatatattaattagcaggttgggctagagaaatcagctgctatgcgggttgattattattattatttctaatccttttccttatttgccttctactccccttaatctaatctaaaagctctgttccatgcaactggagttccttatccctctcttccccttcccttatatattgaggctatggggtaggagaaaagtgcacaacccaccaccccctctactcgtgcattaaaatttcttatttacccttttcccccttcccatttcttcccactttcatctaccttttctggcaaaaaggagccttttgctctctgtgaccctaagagcacactgcacagggaaaattgccccatccagacctggctccactcttgatctctcttgtcctcttctgctcttttcctggtgctcttttttctcggtggggtgtgggtaatagaacagccgtgggcttttggggacctttaacttttttttctctcttttgtttataaaaaacactaaacattcaattccagagaacccaaaatcccaccttcccaccgaacactactaaggggcttgtgttctgctccataccttttctcttttctttctgtcttgttaatgcttttaaaaacaaatgagttttttatataaataaagtttttaaagtgtgtatgtggggggtctgtgtcatttcttcacttcaagctgttatttcttccctgctttgcatctttgttacttccttatgtatcagtgtcctttccagagcaaccagaaggaggttataccaggatttattttgagctcagccccaactctttatcaagcaacattcttgttaactatatgtgaaacattttttcttctgaagattcttaaaaattgaatgtggctgaagttgaacatgggagcttattgctaatttagagataggaaactgaagcataaagaattaatgacttactttaattactggaattcttctgcaacatttgacaaaactaaccttgaataaggcccactgtaatacgtagctctcttaaatataacacttaggactagaagattagaaactaccaatcccaactacgtaataggaaaatgtaggatcaaaaggcccatgtatataagtactgaccactgggccataatgttgcttctcaggctatatgcagtcctttagtcagaagtcaataggcctatttattaatattttacagaccatattacctggattaccagggactatctttgctgcagagatcaagggttaagatctatgggaagatacttatttttctgaggtccttatgtcctgtcatataattaaagactcaagagaatttatgtgaaatgctttctgtatgccccaatctttagattaaaattatatacctgctcct

SEQ ID NO: 133025 - DNA, 6099 bp, Homo sapiens
ctgccagatcagtttgtcaccacccaggctcccttgcctttggctgggtgcaacttccattttaggtgttggatctgagggggaaaaaaaagagagagggagagagagagaaagaagagcaggaaagatcccgaaaggaggaagaggtggcgaaaaatcaactgccctgctggatttgtctttctcagcaccttggcgaagccttgggtttctttcttaaaggactgatttttagaactccacatttgaggtgtgtggcttttgaagaaaatgtatgtactgacgggaaaaggaagataagcaagtcgaatttttgtcttacgctctctccttcctgcttcctccttgctgtggtggctgggatgctccttccatgattttttgaatctagactgggctgttctctgtgttaaaccaatcagttgcgaccttctcttaacaggtggagtcgaccgccagcatcttggcctctgtgaaggaacaagaggcccagtttgagaagctgacccgggcgctggaggaggaacggcgccacgtctcggcgcagctggaacgcgtccgggtctcaccacaagatgccaacccactcatggccaacggcacactcacccgccggcatcagaacggccggtttgtgggcgatgctgaccttgaaagacagaaattttcagatttgaaactcaacggaccccaggatcacagtcaccttctatatagcaccatccccaggatgcaggagccggggcagattgtggagacctacacggaggaggatcctgagggagccatgtctgtagtctctgtggagacctcagatgatgggaccactcggcgcacagagaccacggtcaagaaagtagtgaagactgtgacaacacggacagtacagccagtcgctatgggaccagacgggttgcctgtggatgcttcatcagtttctaacaactatatccagactttgggtcgtgatttccgcaagaatggcaatgggggacctggtccctatgtggggcaagctggcactgctacccttcctaggaacttccactaccctcctgatggttatagtcgccactatgaagatggttatccaggtggcagtgataactatggcagtctgtcccgggtgacccgcattgaggagcggtataggcccagcatggaaggctaccgggcacctagtagacaggatgtgtatgggccccaaccccaggttcgggtaggtgggagcagcgtggatctgcatcgctttcatccagagccttatgggctagaggatgaccagcgtagtatgggctatgatgacctggattatggtatgatgtctgattatggcactgcccgtcggactgggacaccctctgaccctcgtcggcgcctcaggagctatgaagacatgattggtgaggaggtgccatcggatcaatactactgggctcctttggcccagcatgagcgaggaagtttagcaagcttggatagcctgcgcaaaggagggcctccacctcctaattggagacagccagagctgccagaggtgatcgccatgcttggattccgcttggatgctgtcaagtccaatgcagctgcatacctgcaacacttatgctaccgcaatgacaaggtgaagactgacgtgcggaagctcaagggcatcccagtactggtgggattgttagaccatcccaaaaaggaagtgcaccttggagcctgtggagctctcaagaatatctcttttggacgtgaccaggataacaagattgccataaaaaactgtgatggtgtgcctgcccttgtgcgattgcttcgaaaggctcgtgatatggaccttactgaagttattaccggaaccctgtggaatctttcatcccatgactcaatcaaaatggagattgtggaccatgcactgcatgccttgacagatgaagtgatcattcctcattctggttgggagcgggaacctaatgaagactgtaagccacgccatattgagtgggaatcggtgctcaccaacacagctggctgccttaggaatgtaagctcagagaggagtgaagctcgccggaaacttcgggaatgtgatggtttagttgatgccctcattttcattgttcaggctgagattgggcagaaggattcagacagcaagcttgtagagaactgtgtttgccttcttcggaacttatcatatcaagttcaccgggagatcccacaggcagagcgttaccaagaggcagctcccaatgttgccaacaatactgggccacatgctgccagttgctttggggccaagaagggcaaagggaaaaaacctatagaggatccagcaaacgatacagtggatttccctaaaagaacgagtccagctcgaggctatgagctcttatttcagccagaggtggttcggatatacatctcacttcttaaggagagcaagactcctgccatcctagaagcctcagctggagctatccagaacttgtgtgctgggcgctggacgtatggtcgatacatccgctctgctctgcgtcaagagaaggctctttctgccatagctgacctcctgactaatgaacatgaacgggtggtgaaagctgcatctggagcactgagaaacctggctgtggatgctcgcaacaaagaattaattggtaaacatgctattcctaacttggtaaagaatctgccaggaggacagcagaactcctcttggaatttctctgaggacactgtcatctctattttgaacactatcaacgaggttatcgctgagaacttggaggctgccaaaaagcttcgagagacacagggtattgagaagctggtgttgatcaacaaatcagggaaccgctcagaaaaagaagttcgagcagcagcacttgtattacagacaatctggggatataaggaactgcggaagccactggaaaaagaaggatggaagaaatcagactttcaggtgaatctaaacaatgcttcccgaagccagagcagtcattcatatgatgatagtactctccctctcattgaccggaaccaaaaatcagataagaaacctgatcgggaagaaattcagatgagcaatatgggatcaaacacaaaatcactagataacaactattccacaccaaatgagagaggagaccacaatagaacactggatcgatcgggggatctaggcgacatggagccattgaagggaacaacacccttgatgcagaagatttagcaccactatctccgttccatctgggcttatatgtacttttattttttggtggtgaaattgactgatgattttcctttttcttcgctggactattgtgccaactgccaggctgcctcctgcccttacagccctaagtggctgccttctttccatcaactcccaacttcttcctgtgaagtttaattgtctcaacgcctccccctcccccattccctccatttttctcccaagaaacctgactcaattatttgcatattttgagaaactgctgcagattagttctttttgccagttttccctggaactcctggccttttgtggaggggagggatggagagaataggaatcttcactagaagccgtgggaagaattggaagttacatgctgtatatgcaatgtccagcagtctgataaactgacgattcttaatcaagatttttttcctgatggggaagggacttttattttcttttagagaggggaaagtgtgagctcttcccttattcctaatggctatttttgaagcaaagaaggccagcaacattggcacatgccacctggcaaaggacccttgagtaagtgaaggtctcctaaaactgggattaagaaaccttgctctcctcatctccaaggcagggaccatcaagaacctacagactccatctcttctgcaagcctcatgccaaccctgggctattgctgctgccccttaaacacaggctgtccttaacccacctctcctgccctgtgatatgtctgctgagttggcctggccatttccaagaggctgtagaaaggggagaatgtcaaggaagacttttggtagagaaggagcagaaagatgtgtttttgggaagaagaagacctctaggaggagctagtaggaatgtacatgaagcaattagtctgaaactggcttccccactcccccgtttctccttttcctatccttataggcctgtcccttgcctctgccctggattggttggcaaactataggacttgatgtacataactcctgtcccttttcccttacaaggtggggattgcccctggctttgcctcttctttgtgcctttggcctggggtgcatctcctcccgcccttccatgtgcctttctttgcctctgcagtctcatttctcataattttgcaaattatattttgttgctttcttacctactattggccctaaatagcagaaagaagagaagtgaccgagagaacctcagattcttcattgaggattggtatagccatgatttcagtcatagcaagcttttgctcaacagcatatgggtgggatttggcaaaaatcctattctgatgaatctcaaagtaaggctggtaagagaagtgagtggtgtgactcttactccttaggtgcccagaatttaccatcatctctgaaggagttacagggaagtggtctccccaattctcccctccctccagtattgccccctctcactttagcatatattaattagcaggttgggctagagaaatcagctgctatgcgggttgattattattattatttctaatccttttccttatttgccttctactccccttaatctaatctaaaagctctgttccatgcaactggagttccttatccctctcttccccttcccttatatattgaggctatggggtaggagaaaagtgcacaacccaccaccccctctactcgtgcattaaaatttcttatttacccttttcccccttcccatttcttcccactttcatctaccttttctggcaaaaaggagccttttgctctctgtgaccctaagagcacactgcacagggaaaattgccccatccagacctggctccactcttgatctctcttgtcctcttctgctcttttcctggtgctcttttttctcggtggggtgtgggtaatagaacagccgtgggcttttggggacctttaacttttttttctctcttttgtttataaaaaacactaaacattcaattccagagaacccaaaatcccaccttcccaccgaacactactaaggggcttgtgttctgctccataccttttctcttttctttctgtcttgttaatgcttttaaaaacaaatgagttttttatataaataaagtttttaaagtgtgtatgtggggggtctgtgtcatttcttcacttcaagctgttatttcttccctgctttgcatctttgttacttccttatgtatcagtgtcctttccagagcaaccagaaggaggttataccaggatttattttgagctcagccccaactctttatcaagcaacattcttgttaactatatgtgaaacattttttcttctgaagattcttaaaaattgaatgtggctgaagttgaacatgggagcttattgctaatttagagataggaaactgaagcataaagaattaatgacttactttaattactggaattcttctgcaacatttgacaaaactaaccttgaataaggcccactgtaatacgtagctctcttaaatataacacttaggactagaagattagaaactaccaatcccaactacgtaataggaaaatgtaggatcaaaaggcccatgtatataagtactgaccactgggccataatgttgcttctcaggctatatgcagtcctttagtcagaagtcaataggcctatttattaatattttacagaccatattacctggattaccagggactatctttgctgcagagatcaagggttaagatctatgggaagatacttatttttctgaggtccttatgtcctgtcatataattaaagactcaagagaatttatgtgaaatgctttctgtatgccccaatctttagattaaaattatatacctgctcct

SEQ ID NO: 133026 - DNA, 473 bp, Homo sapiens
atgcttggattccgcttggatgctgtcaagtccaatgcagctgcatacctgcaacacttatgctaccgcaatgacaaggtgaagactgacgtgcggaagctcaagggcatcccagtactggtgggattgttagaccatcccaaaaaggaagtgcaccttggagcctgtggagctctcaagaatatctcttttggacgtgaccaggataacccccccgccataaaaaactgtgatggtgaaaaaacccttgtgcgattgcttcgaaaggctcgtgatatggaccttactgaagttattaccgggccaggcggtgaagggcaatcagctgttgcccgtctcactggtgaaaagaaaaaccaccctggcgcccaatacgcaaaccgcctctccccgcgcgttggccgattcattaatgcagctggcacgacaggtttcccgactggaaagcgggcagtgagcgcaacgcaattaat

SEQ ID NO: 133027 - DNA, 6012 bp, Homo sapiens
ctgccagatcagtttgtcaccacccaggctcccttgcctttggctgggtgcaacttccattttaggtgttggatctgagggggaaaaaaaagagagagggagagagagagaaagaagagcaggaaagatcccgaaaggaggaagaggtggcgaaaaatcaactgccctgctggatttgtctttctcagcaccttggcgaagccttgggtttctttcttaaaggactgatttttagaactccacatttgaggtggagtcgaccgccagcatcttggcctctgtgaaggaacaagaggcccagtttgagaagctgacccgggcgctggaggaggaacggcgccacgtctcggcgcagctggaacgcgtccgggtctcaccacaagatgccaacccactcatggccaacggcacactcacccgccggcatcagaacggccggtttgtgggcgatgctgaccttgaaagacagaaattttcagatttgaaactcaacggaccccaggatcacagtcaccttctatatagcaccatccccaggatgcaggagccggggcagattgtggagacctacacggaggaggatcctgagggagccatgtctgtagtctctgtggagacctcagatgatgggaccactcggcgcacagagaccacggtcaagaaagtagtgaagactgtgacaacacggacagtacagccagtcgctatgggaccagacgggttgcctgtggatgcttcatcagtttctaacaactatatccagactttgggtcgtgatttccgcaagaatggcaatgggggacctggtccctatgtggggcaagctggcactgctacccttcctaggaacttccactaccctcctgatggttatagtcgccactatgaagatggttatccaggtggcagtgataactatggcagtctgtcccgggtgacccgcattgaggagcggtataggcccagcatggaaggctaccgggcacctagtagacaggatgtgtatgggccccaaccccaggttcgggtaggtgggagcagcgtggatctgcatcgctttcatccagagccttatgggctagaggatgaccagcgtagtatgggctatgatgacctggattatggtatgatgtctgattatggcactgcccgtcggactgggacaccctctgaccctcgtcggcgcctcaggagctatgaagacatgattggtgaggaggtgccatcggatcaatactactgggctcctttggcccagcatgagcgaggaagtttagcaagcttggatagcctgcgcaaaggagggcctccacctcctaattggagacagccagagctgccagaggtgatcgccatgcttggattccgcttggatgctgtcaagtccaatgcagctgcatacctgcaacacttatgctaccgcaatgacaaggtgaagactgacgtgcggaagctcaagggcatcccagtactggtgggattgttagaccatcccaaaaaggaagtgcaccttggagcctgtggagctctcaagaatatctcttttggacgtgaccaggataacaagattgccataaaaaactgtgatggtgtgcctgcccttgtgcgattgcttcgaaaggctcgtgatatggaccttactgaagttattaccggaaccctgtggaatctttcatcccatgactcaatcaaaatggagattgtggaccatgcactgcatgccttgacagatgaagtgatcattcctcattctggttgggagcgggaacctaatgaagactgtaagccacgccatattgagtgggaatcggtgctcaccaacacagctggctgccttaggaatgtaagctcagagaggagtgaagctcgccggaaacttcgggaatgtgatggtttagttgatgccctcattttcattgttcaggctgagattgggcagaaggattcagacagcaagcttgtagagaactgtgtttgccttcttcggaacttatcatatcaagttcaccgggagatcccacaggcagagcgttaccaagaggcagctcccaatgttgccaacaatactgggccacatgctgccagttgctttggggccaagaagggcaaagatgagtggttctccagagggaaaaaacctatagaggatccagcaaacgatacagtggatttccctaaaagaacgagtccagctcgaggctatgagctcttatttcagccagaggtggttcggatatacatctcacttcttaaggagagcaagactcctgccatcctagaagcctcagctggagctatccagaacttgtgtgctgggcgctggacgtatggtcgatacatccgctctgctctgcgtcaagagaaggctctttctgccatagctgacctcctgactaatgaacatgaacgggtggtgaaagctgcatctggagcactgagaaacctggctgtggatgctcgcaacaaagaattaattggtaaacatgctattcctaacttggtaaagaatctgccaggaggacagcagaactcctcttggaatttctctgaggacactgtcatctctattttgaacactatcaacgaggttatcgctgagaacttggaggctgccaaaaagcttcgagagacacagggtattgagaagctggtgttgatcaacaaatcagggaaccgctcagaaaaagaagttcgagcagcagcacttgtattacagacaatctggggatataaggaactgcggaagccactggaaaaagaaggatggaagaaatcagactttcaggtgaatctaaacaatgcttcccgaagccagagcagtcattcatatgatgatagtactctccctctcattgaccggaaccaaaaatcagataagaaacctgatcgggaagaaattcagatgagcaatatgggatcaaacacaaaatcactagataacaactattccacaccaaatgagagaggagaccacaatagaacactggatcgatcgggggatctaggcgacatggagccattgaagggaacaacacccttgatgcaggacgaggggcaggaatctctggaggaagagttggatgtgttggttttggatgatgaggggggccaagtgtcttacccctccatgcagaagatttagcaccactatctccgttccatctgggcttatatgtacttttattttttggtggtgaaattgactgatgattttcctttttcttcgctggactattgtgccaactgccaggctgcctcctgcccttacagccctaagtggctgccttctttccatcaactcccaacttcttcctgtgaagtttaattgtctcaacgcctccccctcccccattccctccatttttctcccaagaaacctgactcaattatttgcatattttgagaaactgctgcagattagttctttttgccagttttccctggaactcctggccttttgtggaggggagggatggagagaataggaatcttcactagaagccgtgggaagaattggaagttacatgctgtatatgcaatgtccagcagtctgataaactgacgattcttaatcaagatttttttcctgatggggaagggacttttattttcttttagagaggggaaagtgtgagctcttcccttattcctaatggctatttttgaagcaaagaaggccagcaacattggcacatgccacctggcaaaggacccttgagtaagtgaaggtctcctaaaactgggattaagaaaccttgctctcctcatctccaaggcagggaccatcaagaacctacagactccatctcttctgcaagcctcatgccaaccctgggctattgctgctgccccttaaacacaggctgtccttaacccacctctcctgccctgtgatatgtctgctgagttggcctggccatttccaagaggctgtagaaaggggagaatgtcaaggaagacttttggtagagaaggagcagaaagatgtgtttttgggaagaagaagacctctaggaggagctagtaggaatgtacatgaagcaattagtctgaaactggcttccccactcccccgtttctccttttcctatccttataggcctgtcccttgcctctgccctggattggttggcaaactataggacttgatgtacataactcctgtcccttttcccttacaaggtggggattgcccctggctttgcctcttctttgtgcctttggcctggggtgcatctcctcccgcccttccatgtgcctttctttgcctctgcagtctcatttctcataattttgcaaattatattttgttgctttcttacctactattggccctaaatagcagaaagaagagaagtgaccgagagaacctcagattcttcattgaggattggtatagccatgatttcagtcatagcaagcttttgctcaacagcatatgggtgggatttggcaaaaatcctattctgatgaatctcaaagtaaggctggtaagagaagtgagtggtgtgactcttactccttaggtgcccagaatttaccatcatctctgaaggagttacagggaagtggtctccccaattctcccctccctccagtattgccccctctcactttagcatatattaattagcaggttgggctagagaaatcagctgctatgcgggttgattattattattatttctaatccttttccttatttgccttctactccccttaatctaatctaaaagctctgttccatgcaactggagttccttatccctctcttccccttcccttatatattgaggctatggggtaggagaaaagtgcacaacccaccaccccctctactcgtgcattaaaatttcttatttacccttttcccccttcccatttcttcccactttcatctaccttttctggcaaaaaggagccttttgctctctgtgaccctaagagcacactgcacagggaaaattgccccatccagacctggctccactcttgatctctcttgtcctcttctgctcttttcctggtgctcttttttctcggtggggtgtgggtaatagaacagccgtgggcttttggggacctttaacttttttttctctcttttgtttataaaaaacactaaacattcaattccagagaacccaaaatcccaccttcccaccgaacactactaaggggcttgtgttctgctccataccttttctcttttctttctgtcttgttaatgcttttaaaaacaaatgagttttttatataaataaagtttttaaagtgtgtatgtggggggtctgtgtcatttcttcacttcaagctgttatttcttccctgctttgcatctttgttacttccttatgtatcagtgtcctttccagagcaaccagaaggaggttataccaggatttattttgagctcagccccaactctttatcaagcaacattcttgttaactatatgtgaaacattttttcttctgaagattcttaaaaattgaatgtggctgaagttgaacatgggagcttattgctaatttagagataggaaactgaagcataaagaattaatgacttactttaattactggaattcttctgcaacatttgacaaaactaaccttgaataaggcccactgtaatacgtagctctcttaaatataacacttaggactagaagattagaaactaccaatcccaactacgtaataggaaaatgtaggatcaaaaggcccatgtatataagtactgaccactgggccataatgttgcttctcaggctatatgcagtcctttagtcagaagtcaataggcctatttattaatattttacagaccatattacctggattaccagggactatctttgctgcagagatcaagggttaagatctatgggaagatacttatttttctgaggtccttatgtcctgtcatataattaaagactcaagagaatttatgtgaaatgctttctgtatgccccaatctttagattaaaattatatacctgctcct

SEQ ID NO: 133028 - DNA, 5071 bp, Homo sapiens
ctgccagatcagtttgtcaccacccaggctcccttgcctttggctgggtgcaacttccattttaggtgttggatctgagggggaaaaaaaagagagagggagagagagagaaagaagagcaggaaagatcccgaaaggaggaagaggtggcgaaaaatcaactgccctgctggatttgtctttctcagcaccttggcgaagccttgggtttctttcttaaaggactgatttttagaactccacatttgaggagctatgaagacatgattggtgaggaggtgccatcggatcaatactactgggctcctttggcccagcatgagcgaggaagtttagcaagcttggatagcctgcgcaaaggagggcctccacctcctaattggagacagccagagctgccagaggtgatcgccatgcttggattccgcttggatgctgtcaagtccaatgcagctgcatacctgcaacacttatgctaccgcaatgacaaggtgaagactgacgtgcggaagctcaagggcatcccagtactggtgggattgttagaccatcccaaaaaggaagtgcaccttggagcctgtggagctctcaagaatatctcttttggacgtgaccaggataacaagattgccataaaaaactgtgatggtgtgcctgcccttgtgcgattgcttcgaaaggctcgtgatatggaccttactgaagttattaccggaaccctgtggaatctttcatcccatgactcaatcaaaatggagattgtggaccatgcactgcatgccttgacagatgaagtgatcattcctcattctggttgggagcgggaacctaatgaagactgtaagccacgccatattgagtgggaatcggtgctcaccaacacagctggctgccttaggaatgtaagctcagagaggagtgaagctcgccggaaacttcgggaatgtgatggtttagttgatgccctcattttcattgttcaggctgagattgggcagaaggattcagacagcaagcttgtagagaactgtgtttgccttcttcggaacttatcatatcaagttcaccgggagatcccacaggcagagcgttaccaagaggcagctcccaatgttgccaacaatactgggccacatgctgccagttgctttggggccaagaagggcaaagatgagtggttctccagagggaaaaaacctatagaggatccagcaaacgatacagtggatttccctaaaagaacgagtccagctcgaggctatgagctcttatttcagccagaggtggttcggatatacatctcacttcttaaggagagcaagactcctgccatcctagaagcctcagctggagctatccagaacttgtgtgctgggcgctggacgtatggtcgatacatccgctctgctctgcgtcaagagaaggctctttctgccatagctgacctcctgactaatgaacatgaacgggtggtgaaagctgcatctggagcactgagaaacctggctgtggatgctcgcaacaaagaattaattggtaaacatgctattcctaacttggtaaagaatctgccaggaggacagcagaactcctcttggaatttctctgaggacactgtcatctctattttgaacactatcaacgaggttatcgctgagaacttggaggctgccaaaaagcttcgagagacacagggtattgagaagctggtgttgatcaacaaatcagggaaccgctcagaaaaagaagttcgagcagcagcacttgtattacagacaatctggggatataaggaactgcggaagccactggaaaaagaaggatggaagaaatcagactttcaggtgaatctaaacaatgcttcccgaagccagagcagtcattcatatgatgatagtactctccctctcattgaccggaaccaaaaatcagataagaaacctgatcgggaagaaattcagatgagcaatatgggatcaaacacaaaatcactagataacaactattccacaccaaatgagagaggagaccacaatagaacactggatcgatcgggggatctaggcgacatggagccattgaagggaacaacacccttgatgcaggacgaggggcaggaatctctggaggaagagttggatgtgttggttttggatgatgaggggggccaagtgtcttacccctccatgcagaagatttagcaccactatctccgttccatctgggcttatatgtacttttattttttggtggtgaaattgactgatgattttcctttttcttcgctggactattgtgccaactgccaggctgcctcctgcccttacagccctaagtggctgccttctttccatcaactcccaacttcttcctgtgaagtttaattgtctcaacgcctccccctcccccattccctccatttttctcccaagaaacctgactcaattatttgcatattttgagaaactgctgcagattagttctttttgccagttttccctggaactcctggccttttgtggaggggagggatggagagaataggaatcttcactagaagccgtgggaagaattggaagttacatgctgtatatgcaatgtccagcagtctgataaactgacgattcttaatcaagatttttttcctgatggggaagggacttttattttcttttagagaggggaaagtgtgagctcttcccttattcctaatggctatttttgaagcaaagaaggccagcaacattggcacatgccacctggcaaaggacccttgagtaagtgaaggtctcctaaaactgggattaagaaaccttgctctcctcatctccaaggcagggaccatcaagaacctacagactccatctcttctgcaagcctcatgccaaccctgggctattgctgctgccccttaaacacaggctgtccttaacccacctctcctgccctgtgatatgtctgctgagttggcctggccatttccaagaggctgtagaaaggggagaatgtcaaggaagacttttggtagagaaggagcagaaagatgtgtttttgggaagaagaagacctctaggaggagctagtaggaatgtacatgaagcaattagtctgaaactggcttccccactcccccgtttctccttttcctatccttataggcctgtcccttgcctctgccctggattggttggcaaactataggacttgatgtacataactcctgtcccttttcccttacaaggtggggattgcccctggctttgcctcttctttgtgcctttggcctggggtgcatctcctcccgcccttccatgtgcctttctttgcctctgcagtctcatttctcataattttgcaaattatattttgttgctttcttacctactattggccctaaatagcagaaagaagagaagtgaccgagagaacctcagattcttcattgaggattggtatagccatgatttcagtcatagcaagcttttgctcaacagcatatgggtgggatttggcaaaaatcctattctgatgaatctcaaagtaaggctggtaagagaagtgagtggtgtgactcttactccttaggtgcccagaatttaccatcatctctgaaggagttacagggaagtggtctccccaattctcccctccctccagtattgccccctctcactttagcatatattaattagcaggttgggctagagaaatcagctgctatgcgggttgattattattattatttctaatccttttccttatttgccttctactccccttaatctaatctaaaagctctgttccatgcaactggagttccttatccctctcttccccttcccttatatattgaggctatggggtaggagaaaagtgcacaacccaccaccccctctactcgtgcattaaaatttcttatttacccttttcccccttcccatttcttcccactttcatctaccttttctggcaaaaaggagccttttgctctctgtgaccctaagagcacactgcacagggaaaattgccccatccagacctggctccactcttgatctctcttgtcctcttctgctcttttcctggtgctcttttttctcggtggggtgtgggtaatagaacagccgtgggcttttggggacctttaacttttttttctctcttttgtttataaaaaacactaaacattcaattccagagaacccaaaatcccaccttcccaccgaacactactaaggggcttgtgttctgctccataccttttctcttttctttctgtcttgttaatgcttttaaaaacaaatgagttttttatataaataaagtttttaaagtgtgtatgtggggggtctgtgtcatttcttcacttcaagctgttatttcttccctgctttgcatctttgttacttccttatgtatcagtgtcctttccagagcaaccagaaggaggttataccaggatttattttgagctcagccccaactctttatcaagcaacattcttgttaactatatgtgaaacattttttcttctgaagattcttaaaaattgaatgtggctgaagttgaacatgggagcttattgctaatttagagataggaaactgaagcataaagaattaatgacttactttaattactggaattcttctgcaacatttgacaaaactaaccttgaataaggcccactgtaatacgtagctctcttaaatataacacttaggactagaagattagaaactaccaatcccaactacgtaataggaaaatgtaggatcaaaaggcccatgtatataagtactgaccactgggccataatgttgcttctcaggctatatgcagtcctttagtcagaagtcaataggcctatttattaatattttacagaccatattacctggattaccagggactatctttgctgcagagatcaagggttaagatctatgggaagatacttatttttctgaggtccttatgtcctgtcatataattaaagactcaagagaatttatgtgaaatgctttctgtatgccccaatctttagattaaaattatatacctgctcct

SEQ ID NO: 133029 - DNA, 5423 bp, Homo sapiens
agatggcggtcttggcacctctaattgctctcgtgtattcggtgccgcgactttcacgatggctcgcccaaccttactaccttctgtcggccctgctctctgctgccttcctactcgtgaggaaactgccgccgctctgccacggtctgcccacccaacgcgaagacggtaacccgtgtgactttgactggagagaagtggagatcctgatgtttctcagtgccattgtgatgatgaagaaccgcagatccactctctccttcctgcttcctccttgctgtggtggctgggatgcttcttccatgattttttgaatctagactgggctgttctctgtgttaaaccaatcagttgcgaccttctcttaacagtgtgaagtgagggggtctctctccctccttctccttcctctgtgattcaccttcctttttaccctgccctgcggcggctccgccccttaccttcatggacgactcagaggtggagtcgaccgccagcatcttggcctctgtgaaggaacaagaggcccagtttgagaagctgacccgggcgctggaggaggaacggcgccacgtctcggcgcagctggaacgcgtccgggtctcaccacaagatgccaacccactcatggccaacggcacactcacccgccggcatcagaacggccggtttgtgggcgatgctgaccttgaaagacagaaattttcagatttgaaactcaacggaccccaggatcacagtcaccttctatatagcaccatccccaggatgcaggagccggggcagattgtggagacctacacggaggaggatcctgagggagccatgtctgtagtctctgtggagacctcagatgatgggaccactcggcgcacagagaccacggtcaagaaagtagtgaagactgtgacaacacggacagtacagccagtcgctatgggaccagacgggttgcctgtggatgcttcatcagtttctaacaactatatccagactttgggtcgtgatttccgcaagaatggcaatgggggacctggtccctatgtggggcaagctggcactgctacccttcctaggaacttccactaccctcctgatggttatagtcgccactatgaagatggttatccaggtggcagtgataactatggcagtctgtcccgggtgacccgcattgaggagcggtataggcccagcatggaaggctaccgggcacctagtagacaggatgtgtatgggccccaaccccaggttcgggtaggtgggagcagcgtggatctgcatcgctttcatccagagccttatgggctagaggatgaccagcgtagtatgggctatgatgacctggattatggtatgatgtctgattatggcactgcccgtcggactgggacaccctctgaccctcgtcggcgcctcatgagctatgaagacatgattggtgaggaggtgccatcggatcaatactactgggctcctttggcccagcatgagcgaggaagtttagcaagcttggatagcctgcgcaaaggagggcctccacctcctaattggagacagccagagctgccagaggtgatcgccatgcttggattccgcttggatgctgtcaagtccaatgcagctgcatacctgcaacacttatgctaccgcaatgacaaggtgaagactgacgtgcggaagctcaagggcatcccagtactggtgggattgttagaccatcccaaaaaggaagtgcaccttggagcctgtggagctctcaagaatatctcttttggacgtgaccaggataacaagattgccataaaaaactgtgatggtgtgcctgcccttgtgcgattgcttcgaaaggctcgtgatatggaccttactgaagttattaccggaaccctgtggaatctttcatcccatgactcaatcaaaatggagattgtggaccatgcactgcatgccttgacagatgaagtgatcattcctcattctggttgggagcgggaacctaatgaagactgtaagccacgccatattgagtgggaatcggtgctcaccaacacagctggctgccttaggaatgtaagctcagagaggagtgaagctcgccggaaacttcgggaatgtgatggtttagttgatgccctcattttcattgttcaggctgagattgggcagaaggattcagacagcaagcttgtagagaactgtgtttgccttcttcggaacttatcatatcaagttcaccgggagatcccacaggcagagcgttaccaagaggcagctcccaatgttgccaacaatactgggccacatgctgccagttgctttggggccaagaagggcaaagatgagtggttctccagagggaaaaaacctatagaggatccagcaaacgatacagtggatttccctaaaagaacgagtccagctcgaggctatgagctcttatttcagccagaggtggttcggatatacatctcacttcttaaggagagcaagactcctgccatcctagaagcctcagctggagctatccagaacttgtgtgctgggcgctggacgtatggtcgatacatccgctctgctctgcgtcaagagaaggctctttctgccatagctgacctcctgactaatgaacatgaacgggtggtgaaagctgcatctggagcactgagaaacctggctgtggatgctcgcaacaaagaattaattggtaaacatgctattcctaacttggtaaagaatctgccaggaggacagcagaactcctcttggaatttctctgaggacactgtcatctctattttgaacactatcaacgaggttatcgctgagaacttggaggctgccaaaaagcttcgagagacacagggtattgagaagctggtgttgatcaacaaatcagggaaccgctcagaaaaagaagttcgagcagcagcacttgtattacagacaatctggggatataaggaactgcggaagccactggaaaaagaaggatggaagaaatcagactttcaggtgaatctaaacaatgcttcccgaagccagagcagtcattcatatgatgatagtactctccctctcattgaccggaaccaaaaatcagataagaaacctgatcgggaagaaattcagatgagcaatatgggatcaaacacaaaatcactagataacaactattccacaccaaatgagagaggagaccacaatagaacactggatcgatcgggggatctaggcgacatggagccattgaagggaacaacacccttgatgcagaagatttagcaccactatctccgttccatctgggcttatatgtacttttattttttggtggtgaaattgactgatgattttcctttttcttcgctggactattgtgccaactgccaggctgcctcctgcccttacagccctaagtggctgccttctttccatcaactcccaacttcttcctgtgaagtttaattgtctcaacgcctccccctcccccattccctccatttttctcccaagaaacctgactcaattatttgcatattttgagaaactgctgcagattagttctttttgccagttttccctggaactcctggccttttgtggaggggagggatggagagaataggaatcttcactagaagccgtgggaagaattggaagttacatgctgtatatgcaatgtccagcagtctgataaactgacgattcttaatcaagatttttttcctgatggggaagggacttttattttcttttagagaggggaaagtgtgagctcttcccttattcctaatggctatttttgaagcaaagaaggccagcaacattggcacatgccacctggcaaaggacccttgagtaagtgaaggtctcctaaaactgggattaagaaaccttgctctcctcatctccaaggcagggaccatcaagaacctacagactccatctcttctgcaagcctcatgccaaccctgggctattgctgctgccccttaaacacaggctgtccttaacccacctctcctgccctgtgatatgtctgctgagttggcctggccatttccaagaggctgtagaaaggggagaatgtcaaggaagacttttggtagagaaggagcagaaagatgtgtttttgggaagaagaagacctctaggaggagctagtaggaatgtacatgaagcaattagtctgaaactggcttccccactcccccgtttctccttttcctatccttataggcctgtcccttgcctctgccctggattggttggcaaactaaaggacttgatgtacataactcctgtcccttttcccttacaaggtggggattgcccctggctttgcctcttctttgtgcctttggcctggggtgcatctcctcccgcccttccatgtgcctttctttgcctctgcagtctcatttctcataattttgcaaattatattttgttgctttcttacctactattggccctaaatagcagaaagaagagaagtgaccgagagaacctcagattcttcattgaggattggtatagccatgatttcagtcatagcaagcttttgctcaacagcatatgggtgggattttgcaaaaatcctattctgatgaatctcaaagtaaggctggtaagagaagtgagtggtgtgactcttactccttaggtgcccagaatttaccatcatctctgaaggagttacagggaagtggtctccccaattctcccctccctccagtattgccccctctcactttagcatatattaattagcaggttgggctagagaaatcagctgctatgcgggttgattattattattatttctaatccttttccttatttgccttctactccccttaatctaatctaaaagctctgttccatgcaactggagttccttatccctctcttccccttcccttatatattgaggctatggggtaggagaaaagtgcacaacccaccaccccctttactcgtgcattaaaatttcttatttacccttttcccccttcccatttcttcccactttcatctaccttttctggcaaaaaggagccttttgctctctgtgaccctaagagcacactgcacagggaaaattgccccatccagacctggctccactcttgatctctcttgtcctcttctgctcttttcctggtgctcttttttctcggtggggtgtgggtaatagaacagccgtgggcttttggggacctttaacttttttttctctcttttgtttataaaaaacactaaacattcaattccagagaaccaaaaatcccaccttcccaccgaacactactaaggggcttgtgttctgctccataccttttctcttttctttctgtcttgttaatgcttttaaaaacaaatgagttttttatataaataaagtttttaaagtgtgt

SEQ ID NO: 133030 - DNA, 5949 bp, Homo sapiens
ctgccagatcagtttgtcaccacccaggctcccttgcctttggctgggtgcaacttccattttaggtgttggatctgagggggaaaaaaaagagagagggagagagagagaaagaagagcaggaaagatcccgaaaggaggaagaggtggcgaaaaatcaactgccctgctggatttgtctttctcagcaccttggcgaagccttgggtttctttcttaaaggactgatttttagaactccacatttgaggtggagtcgaccgccagcatcttggcctctgtgaaggaacaagaggcccagtttgagaagctgacccgggcgctggaggaggaacggcgccacgtctcggcgcagctggaacgcgtccgggtctcaccacaagatgccaacccactcatggccaacggcacactcacccgccggcatcagaacggccggtttgtgggcgatgctgaccttgaaagacagaaattttcagatttgaaactcaacggaccccaggatcacagtcaccttctatatagcaccatccccaggatgcaggagccggggcagattgtggagacctacacggaggaggatcctgagggagccatgtctgtagtctctgtggagacctcagatgatgggaccactcggcgcacagagaccacggtcaagaaagtagtgaagactgtgacaacacggacagtacagccagtcgctatgggaccagacgggttgcctgtggatgcttcatcagtttctaacaactatatccagactttgggtcgtgatttccgcaagaatggcaatgggggacctggtccctatgtggggcaagctggcactgctacccttcctaggaacttccactaccctcctgatggttatagtcgccactatgaagatggttatccaggtggcagtgataactatggcagtctgtcccgggtgacccgcattgaggagcggtataggcccagcatggaaggctaccgggcacctagtagacaggatgtgtatgggccccaaccccaggttcgggtaggtgggagcagcgtggatctgcatcgctttcatccagagccttatgggctagaggatgaccagcgtagtatgggctatgatgacctggattatggtatgatgtctgattatggcactgcccgtcggactgggacaccctctgaccctcgtcggcgcctcaggagctatgaagacatgattggtgaggaggtgccatcggatcaatactactgggctcctttggcccagcatgagcgaggaagtttagcaagcttggatagcctgcgcaaaggagggcctccacctcctaattggagacagccagagctgccagaggtgatcgccatgcttggattccgcttggatgctgtcaagtccaatgcagctgcatacctgcaacacttatgctaccgcaatgacaaggtgaagactgacgtgcggaagctcaagggcatcccagtactggtgggattgttagaccatcccaaaaaggaagtgcaccttggagcctgtggagctctcaagaatatctcttttggacgtgaccaggataacaagattgccataaaaaactgtgatggtgtgcctgcccttgtgcgattgcttcgaaaggctcgtgatatggaccttactgaagttattaccggaaccctgtggaatctttcatcccatgactcaatcaaaatggagattgtggaccatgcactgcatgccttgacagatgaagtgatcattcctcattctggttgggagcgggaacctaatgaagactgtaagccacgccatattgagtgggaatcggtgctcaccaacacagctggctgccttaggaatgtaagctcagagaggagtgaagctcgccggaaacttcgggaatgtgatggtttagttgatgccctcattttcattgttcaggctgagattgggcagaaggattcagacagcaagcttgtagagaactgtgtttgccttcttcggaacttatcatatcaagttcaccgggagatcccacaggcagagcgttaccaagaggcagctcccaatgttgccaacaatactgggccacatgctgccagttgctttggggccaagaagggcaaagatgagtggttctccagagggaaaaaacctatagaggatccagcaaacgatacagtggatttccctaaaagaacgagtccagctcgaggctatgagctcttatttcagccagaggtggttcggatatacatctcacttcttaaggagagcaagactcctgccatcctagaagcctcagctggagctatccagaacttgtgtgctgggcgctggacgtatggtcgatacatccgctctgctctgcgtcaagagaaggctctttctgccatagctgacctcctgactaatgaacatgaacgggtggtgaaagctgcatctggagcactgagaaacctggctgtggatgctcgcaacaaagaattaattggtaaacatgctattcctaacttggtaaagaatctgccaggaggacagcagaactcctcttggaatttctctgaggacactgtcatctctattttgaacactatcaacgaggttatcgctgagaacttggaggctgccaaaaagcttcgagagacacagggtattgagaagctggtgttgatcaacaaatcagggaaccgctcagaaaaagaagttcgagcagcagcacttgtattacagacaatctggggatataaggaactgcggaagccactggaaaaagaaggatggaagaaatcagactttcaggtgaatctaaacaatgcttcccgaagccagagcagtcattcatatgatgatagtactctccctctcattgaccggaaccaaaaatcagataacaactattccacaccaaatgagagaggagaccacaatagaacactggatcgatcgggggatctaggcgacatggagccattgaagggaacaacacccttgatgcaggacgaggggcaggaatctctggaggaagagttggatgtgttggttttggatgatgaggggggccaagtgtcttacccctccatgcagaagatttagcaccactatctccgttccatctgggcttatatgtacttttattttttggtggtgaaattgactgatgattttcctttttcttcgctggactattgtgccaactgccaggctgcctcctgcccttacagccctaagtggctgccttctttccatcaactcccaacttcttcctgtgaagtttaattgtctcaacgcctccccctcccccattccctccatttttctcccaagaaacctgactcaattatttgcatattttgagaaactgctgcagattagttctttttgccagttttccctggaactcctggccttttgtggaggggagggatggagagaataggaatcttcactagaagccgtgggaagaattggaagttacatgctgtatatgcaatgtccagcagtctgataaactgacgattcttaatcaagatttttttcctgatggggaagggacttttattttcttttagagaggggaaagtgtgagctcttcccttattcctaatggctatttttgaagcaaagaaggccagcaacattggcacatgccacctggcaaaggacccttgagtaagtgaaggtctcctaaaactgggattaagaaaccttgctctcctcatctccaaggcagggaccatcaagaacctacagactccatctcttctgcaagcctcatgccaaccctgggctattgctgctgccccttaaacacaggctgtccttaacccacctctcctgccctgtgatatgtctgctgagttggcctggccatttccaagaggctgtagaaaggggagaatgtcaaggaagacttttggtagagaaggagcagaaagatgtgtttttgggaagaagaagacctctaggaggagctagtaggaatgtacatgaagcaattagtctgaaactggcttccccactcccccgtttctccttttcctatccttataggcctgtcccttgcctctgccctggattggttggcaaactataggacttgatgtacataactcctgtcccttttcccttacaaggtggggattgcccctggctttgcctcttctttgtgcctttggcctggggtgcatctcctcccgcccttccatgtgcctttctttgcctctgcagtctcatttctcataattttgcaaattatattttgttgctttcttacctactattggccctaaatagcagaaagaagagaagtgaccgagagaacctcagattcttcattgaggattggtatagccatgatttcagtcatagcaagcttttgctcaacagcatatgggtgggatttggcaaaaatcctattctgatgaatctcaaagtaaggctggtaagagaagtgagtggtgtgactcttactccttaggtgcccagaatttaccatcatctctgaaggagttacagggaagtggtctccccaattctcccctccctccagtattgccccctctcactttagcatatattaattagcaggttgggctagagaaatcagctgctatgcgggttgattattattattatttctaatccttttccttatttgccttctactccccttaatctaatctaaaagctctgttccatgcaactggagttccttatccctctcttccccttcccttatatattgaggctatggggtaggagaaaagtgcacaacccaccaccccctctactcgtgcattaaaatttcttatttacccttttcccccttcccatttcttcccactttcatctaccttttctggcaaaaaggagccttttgctctctgtgaccctaagagcacactgcacagggaaaattgccccatccagacctggctccactcttgatctctcttgtcctcttctgctcttttcctggtgctcttttttctcggtggggtgtgggtaatagaacagccgtgggcttttggggacctttaacttttttttctctcttttgtttataaaaaacactaaacattcaattccagagaacccaaaatcccaccttcccaccgaacactactaaggggcttgtgttctgctccataccttttctcttttctttctgtcttgttaatgcttttaaaaacaaatgagttttttatataaataaagtttttaaagtgtgtatgtggggggtctgtgtcatttcttcacttcaagctgttatttcttccctgctttgcatctttgttacttccttatgtatcagtgtcctttccagagcaaccagaaggaggttataccaggatttattttgagctcagccccaactctttatcaagcaacattcttgttaactatatgtgaaacattttttcttctgaagattcttaaaaattgaatgtggctgaagttgaacatgggagcttattgctaatttagagataggaaactgaagcataaagaattaatgacttactttaattactggaattcttctgcaacatttgacaaaactaaccttgaataaggcccactgtaatacgtagctctcttaaatataacacttaggactagaagattagaaactaccaatcccaactacgtaataggaaaatgtaggatcaaaaggcccatgtatataagtactgaccactgggccataatgttgcttctcaggctatatgcagtcctttagtcagaagtcaataggcctatttattaatattttacagaccatattacctggattaccagggactatctttgctgcagagatcaagggttaagatctatgggaagatacttatttttctgaggtccttatgtcctgtcatataattaaagactcaagagaatttatgtgaaatgctttctgtatgccccaatctttagattaaaattatatacctgctcct

SEQ ID NO: 133031 - DNA, 1608 bp, Homo sapiens
atggagagaattaaagcaaggcacagcagctacacagaagagatgggagaagaggctaatgatgacaagaagccaaccactaaatttgaactagagcgagaaacagaacttcgctttgaggtggaggcatctcagtcagttcagttggagttgttgactggcatggcagagatctttggcacagagctgacccgaaacaagaaattcacctttgatgctggtgccaaggtggctgttttcacttggcatggctgttctgtgcaactgagcggccgcactgaggtggcttatgtctccaaggacactcctatgttgctttacctcaacactcacacagccttggaacagatgcggaggcaagcggaaaaggaagaagagcgaggtccccgagtgatggtagtgggccccactgatgtgggcaagtctacagtgtgtcgccttctgctcaactacgcagtgcgtttgggccgccgtcccacttatgtggagctggatgtgggccagttctgtgtccatccctgttttgacgtgaactgttcggaccctcagtgctacctgatagaaaactgcattccaggaaaggaacacagctgtgcagtggagtcgaccgccagcatcttggcctctgtgaaggaacaagaggcccagtttgagaagctgacccgggcgctggaggaggaacggcgccacgtctcggcgcagctggaacgcgtccgggtctcaccacaagatgccaacccactcatggccaacggcacactcacccgccggcatcaggatcacagtcaccttctatatagcaccatccccaggatgcaggagccggggcagattgtggagacctacacggaggaggatcctgagggagccatgtctgtagtctctgtggagacctcagatgatgggaccactcggcgcacagagaccacgatggttatccttaaggctcaggaatttgatcatcactgcccctgggtgaataactgtattggtcgccggaactaccgttattttttccttttcctcctttccctgacagcccacattatggctggcctcacgggatttcacgtggttctggtggccaggggacgcacaaccaatgaacaggttacgggtaaattccggggaggtgtgaaccccttcaccaatggctgctgtaacaatgtcagccgtgttctctgcagttctccagcacccaggtacacctatccctctggtctagtgtttaccattgttggcctcttggatgtctaccgtgctgaaggtcagccaaataggcagtctaagggaagcctggagataacagagagccagtctgcagatgctgaacctccacctcctcctaagccagacctgagccgttacacagggttgcgaacacacctcggcctggctactaatgaggatagtagcttattggccaaggacagccccccgacacctaccatgtacaagtatcggccgggttacagtagcagcagtacgtcagctgccatgccgcattcctccagcgccaagaggcctagctttgagaactcatctacaatgccatcttctgaaatgagacacaacaatttaattgaactggactatcccccaaaatga

SEQ ID NO: 133032 - DNA, 5791 bp, Homo sapiens
ctgccagatcagtttgtcaccacccaggctcccttgcctttggctgggtgcaacttccattttaggtgttggatctgagggggaaaaaaaagagagagggagagagagagaaagaagagcaggaaagatcccgaaaggaggaagaggtggcgaaaaatcaactgccctgctggatttgtctttctcagcaccttggcgaagccttgggtttctttcttaaaggactgatttttagaactccacatttgaggtgtgtggcttttgaagaaaataacggccggtttgtgggcgatgctgaccttgaaagacagaaattttcagatttgaaactcaacggaccccaggatcacagtcaccttctatatagcaccatccccaggatgcaggagccggggcagattgtggagacctacacggaggaggatcctgagggagccatgtctgtagtctctgtggagacctcagatgatgggaccactcggcgcacagagaccacggtcaagaaagtagtgaagactgtgacaacacggacagtacagccagtcgctatgggaccagacgggttgcctgtggatgcttcatcagtttctaacaactatatccagactttgggtcgtgatttccgcaagaatggcaatgggggacctggtccctatgtggggcaagctggcactgctacccttcctaggaacttccactaccctcctgatggttatagtcgccactatgaagatggttatccaggtggcagtgataactatggcagtctgtcccgggtgacccgcattgaggagcggtataggcccagcatggaaggctaccgggcacctagtagacaggatgtgtatgggccccaaccccaggttcgggtaggtgggagcagcgtggatctgcatcgctttcatccagagccttatgggctagaggatgaccagcgtagtatgggctatgatgacctggattatggtatgatgtctgattatggcactgcccgtcggactgggacaccctctgaccctcgtcggcgcctcaggagctatgaagacatgattggtgaggaggtgccatcggatcaatactactgggctcctttggcccagcatgagcgaggaagtttagcaagcttggatagcctgcgcaaaggagggcctccacctcctaattggagacagccagagctgccagaggtgatcgccatgcttggattccgcttggatgctgtcaagtccaatgcagctgcatacctgcaacacttatgctaccgcaatgacaaggtgaagactgacgtgcggaagctcaagggcatcccagtactggtgggattgttagaccatcccaaaaaggaagtgcaccttggagcctgtggagctctcaagaatatctcttttggacgtgaccaggataacaagattgccataaaaaactgtgatggtgtgcctgcccttgtgcgattgcttcgaaaggctcgtgatatggaccttactgaagttattaccggaaccctgtggaatctttcatcccatgactcaatcaaaatggagattgtggaccatgcactgcatgccttgacagatgaagtgatcattcctcattctggttgggagcgggaacctaatgaagactgtaagccacgccatattgagtgggaatcggtgctcaccaacacagctggctgccttaggaatgtaagctcagagaggagtgaagctcgccggaaacttcgggaatgtgatggtttagttgatgccctcattttcattgttcaggctgagattgggcagaaggattcagacagcaagcttgtagagaactgtgtttgccttcttcggaacttatcatatcaagttcaccgggagatcccacaggcagagcgttaccaagaggcagctcccaatgttgccaacaatactgggccacatgctgccagttgctttggggccaagaagggcaaagatgagtggttctccagagggaaaaaacctatagaggatccagcaaacgatacagtggatttccctaaaagaacgagtccagctcgaggctatgagctcttatttcagccagaggtggttcggatatacatctcacttcttaaggagagcaagactcctgccatcctagaagcctcagctggagctatccagaacttgtgtgctgggcgctggacgtatggtcgatacatccgctctgctctgcgtcaagagaaggctctttctgccatagctgacctcctgactaatgaacatgaacgggtggtgaaagctgcatctggagcactgagaaacctggctgtggatgctcgcaacaaagaattaattggtaaacatgctattcctaacttggtaaagaatctgccaggaggacagcagaactcctcttggaatttctctgaggacactgtcatctctattttgaacactatcaacgaggttatcgctgagaacttggaggctgccaaaaagcttcgagagacacagggtattgagaagctggtgttgatcaacaaatcagggaaccgctcagaaaaagaagttcgagcagcagcacttgtattacagacaatctggggatataaggaactgcggaagccactggaaaaagaaggatggaagaaatcagactttcaggtgaatctaaacaatgcttcccgaagccagagcagtcattcatatgatgatagtactctccctctcattgaccggaaccaaaaatcagataacaactattccacaccaaatgagagaggagaccacaatagaacactggatcgatcgggggatctaggcgacatggagccattgaagggaacaacacccttgatgcaggacgaggggcaggaatctctggaggaagagttggatgtgttggttttggatgatgaggggggccaagtgtcttacccctccatgcagaagatttagcaccactatctccgttccatctgggcttatatgtacttttattttttggtggtgaaattgactgatgattttcctttttcttcgctggactattgtgccaactgccaggctgcctcctgcccttacagccctaagtggctgccttctttccatcaactcccaacttcttcctgtgaagtttaattgtctcaacgcctccccctcccccattccctccatttttctcccaagaaacctgactcaattatttgcatattttgagaaactgctgcagattagttctttttgccagttttccctggaactcctggccttttgtggaggggagggatggagagaataggaatcttcactagaagccgtgggaagaattggaagttacatgctgtatatgcaatgtccagcagtctgataaactgacgattcttaatcaagatttttttcctgatggggaagggacttttattttcttttagagaggggaaagtgtgagctcttcccttattcctaatggctatttttgaagcaaagaaggccagcaacattggcacatgccacctggcaaaggacccttgagtaagtgaaggtctcctaaaactgggattaagaaaccttgctctcctcatctccaaggcagggaccatcaagaacctacagactccatctcttctgcaagcctcatgccaaccctgggctattgctgctgccccttaaacacaggctgtccttaacccacctctcctgccctgtgatatgtctgctgagttggcctggccatttccaagaggctgtagaaaggggagaatgtcaaggaagacttttggtagagaaggagcagaaagatgtgtttttgggaagaagaagacctctaggaggagctagtaggaatgtacatgaagcaattagtctgaaactggcttccccactcccccgtttctccttttcctatccttataggcctgtcccttgcctctgccctggattggttggcaaactataggacttgatgtacataactcctgtcccttttcccttacaaggtggggattgcccctggctttgcctcttctttgtgcctttggcctggggtgcatctcctcccgcccttccatgtgcctttctttgcctctgcagtctcatttctcataattttgcaaattatattttgttgctttcttacctactattggccctaaatagcagaaagaagagaagtgaccgagagaacctcagattcttcattgaggattggtatagccatgatttcagtcatagcaagcttttgctcaacagcatatgggtgggatttggcaaaaatcctattctgatgaatctcaaagtaaggctggtaagagaagtgagtggtgtgactcttactccttaggtgcccagaatttaccatcatctctgaaggagttacagggaagtggtctccccaattctcccctccctccagtattgccccctctcactttagcatatattaattagcaggttgggctagagaaatcagctgctatgcgggttgattattattattatttctaatccttttccttatttgccttctactccccttaatctaatctaaaagctctgttccatgcaactggagttccttatccctctcttccccttcccttatatattgaggctatggggtaggagaaaagtgcacaacccaccaccccctctactcgtgcattaaaatttcttatttacccttttcccccttcccatttcttcccactttcatctaccttttctggcaaaaaggagccttttgctctctgtgaccctaagagcacactgcacagggaaaattgccccatccagacctggctccactcttgatctctcttgtcctcttctgctcttttcctggtgctcttttttctcggtggggtgtgggtaatagaacagccgtgggcttttggggacctttaacttttttttctctcttttgtttataaaaaacactaaacattcaattccagagaacccaaaatcccaccttcccaccgaacactactaaggggcttgtgttctgctccataccttttctcttttctttctgtcttgttaatgcttttaaaaacaaatgagttttttatataaataaagtttttaaagtgtgtatgtggggggtctgtgtcatttcttcacttcaagctgttatttcttccctgctttgcatctttgttacttccttatgtatcagtgtcctttccagagcaaccagaaggaggttataccaggatttattttgagctcagccccaactctttatcaagcaacattcttgttaactatatgtgaaacattttttcttctgaagattcttaaaaattgaatgtggctgaagttgaacatgggagcttattgctaatttagagataggaaactgaagcataaagaattaatgacttactttaattactggaattcttctgcaacatttgacaaaactaaccttgaataaggcccactgtaatacgtagctctcttaaatataacacttaggactagaagattagaaactaccaatcccaactacgtaataggaaaatgtaggatcaaaaggcccatgtatataagtactgaccactgggccataatgttgcttctcaggctatatgcagtcctttagtcagaagtcaataggcctatttattaatattttacagaccatattacctggattaccagggactatctttgctgcagagatcaagggttaagatctatgggaagatacttatttttctgaggtccttatgtcctgtcatataattaaagactcaagagaatttatgtgaaatgctttctgtatgccccaatctttagattaaaattatatacctgctcct

SEQ ID NO: 133033 - DNA, 601 bp, Homo sapiens
  misc_feature (1)...(601): n = a,t,c or g
ggctgcttctgccccaggagggagaaacaccgactccctggctttggcgccagaagcctggatcggctgccaggagacttctatttctatctgggtctcgtctgggggggccctggccgggcagccccccaacgacttgtcctgccctgaaacacggctctagccaacctgctccgctgcttcacctgcgaccgtctctgcgggggctgcacggcgccagcccctccagcccaccagggcattgtcctccagcccgtcatgcccagctgtgaccccggtccgggccctgcctgcctccccaccaagactttccgcagctatctgccccgctgtcaccgcactttacagctgtgtccactggccgtgcacacctggccaaacacgatggagcttatttccaagttcctttccaagggaggccatggccggagcctaacctgttttaactccgtgggttcaacgtgggttgcggggccagctgaacagcgcctcttgctcacggggctccactcggtagctgacattttntgtggagagctgcaaaaccacactgggctgggaaatatggaggcaaagctttttggaggacggagccagaagt

SEQ ID NO: 133034 - DNA, 5833 bp, Homo sapiens
ctgccagatcagtttgtcaccacccaggctcccttgcctttggctgggtgcaacttccattttaggtgttggatctgagggggaaaaaaaagagagagggagagagagagaaagaagagcaggaaagatcccgaaaggaggaagaggtggcgaaaaatcaactgccctgctggatttgtctttctcagcaccttggcgaagccttgggtttctttcttaaaggactgatttttagaactccacatttgagaacggccggtttgtgggcgatgctgaccttgaaagacagaaattttcagatttgaaactcaacggaccccaggatcacagtcaccttctatatagcacccatccccaggatgcaggagccggggcagattgtggagacctacacggaggaggatcctgagggagccatgtctgtagtctctgtggagacctcagatgatgggaccactcggcgcacagagaccacggtcaagaaagtagtgaagactgtgacaacacggacagtacagccagtcgctatgggaccagacgggttgcctgtggatgcttcatcagtttctaacaactatatccagactttgggtcgtgatttccgcaagaatggcaatgggggacctggtccctatgtggggcaagctggcactgctacccttcctaggaacttccactaccctcctgatggttatagtcgccactatgaagatggttatccaggtggcagtgataactatggcagtctgtcccgggtgacccgcattgaggagcggtataggcccagcatggaaggctaccgggcacctagtagacaggatgtgtatgggccccaaccccaggttcgggtaggtgggagcagcgtggatctgcatcgctttcatccagagccttatgggctagaggatgaccagcgtagtatgggctatgatgacctggattatggtatgatgtctgattatggcactgcccgtcggactgggacaccctctgaccctcgtcggcgcctcaggagctatgaagacatgattggtgaggaggtgccatcggatcaatactactgggctcctttggcccagcatgagcgaggaagtttagcaagcttggatagcctgcgcaaaggagggcctccacctcctaattggagacagccagagctgccagaggtgatcgccatgcttggattccgcttggatgctgtcaagtccaatgcagctgcatacctgcaacacttatgctaccgcaatgacaaggtgaagactgacgtgcggaagctcaagggcatcccagtactggtgggattgttagaccatcccaaaaaggaagtgcaccttggagcctgtggagctctcaagaatatctcttttggacgtgaccaggataacaagattgccataaaaaactgtgatggtgtgcctgcccttgtgcgattgcttcgaaaggctcgtgatatggaccttactgaagttattaccggaaccctgtggaatctttcatcccatgactcaatcaaaatggagattgtggaccatgcactgcatgccttgacagatgaagtgatcattcctcattctggttgggagcgggaacctaatgaagactgtaagccacgccatattgagtgggaatcggtgctcaccaacacagctggctgccttaggaatgtaagctcagagaggagtgaagctcgccggaaacttcgggaatgtgatggtttagttgatgccctcattttcattgttcaggctgagattgggcagaaggattcagacagcaagcttgtagagaactgtgtttgccttcttcggaacttatcatatcaagttcaccgggagatcccacaggcagagcgttaccaagaggcagctcccaatgttgccaacaatactgggccacatgctgccagttgctttggggccaagaagggcaaagatgagtggttctccagagggaaaaaacctatagaggatccagcaaacgatacagtggatttccctaaaagaacgagtccagctcgaggctatgagctcttatttcagccagaggtggttcggatatacatctcacttcttaaggagagcaagactcctgccatcctagaagcctcagctggagctatccagaacttgtgtgctgggcgctggacgtatggtcgatacatccgctctgctctgcgtcaagagaaggctctttctgccatagctgacctcctgactaatgaacatgaacgggtggtgaaagctgcatctggagcactgagaaacctggctgtggatgctcgcaacaaagaattaattggtaaacatgctattcctaacttggtaaagaatctgccaggaggacagcagaactcctcttggaatttctctgaggacactgtcatctctattttgaacactatcaacgaggttatcgctgagaacttggaggctgccaaaaagcttcgagagacacagggtattgagaagctggtgttgatcaacaaatcagggaaccgctcagaaaaagaagttcgagcagcagcacttgtattacagacaatctggggatataaggaactgcggaagccactggaaaaagaaggatggaagaaatcagactttcaggtgaatctaaacaatgcttcccgaagccagagcagtcattcatatgatgatagtactctccctctcattgaccggaaccaaaaatcagataagaaacctgatcgggaagaaattcagatgagcaatatgggatcaaacacaaaatcactagataacaactattccacaccaaatgagagaggagaccacaatagaacactggatcgatcgggggatctaggcgacatggagccattgaagggaacaacacccttgatgcaggacgaggggcaggaatctctggaggaagagttggatgtgttggttttggatgatgaggggggccaagtgtcttacccctccatgcagaagatttagcaccactatctccgttccatctgggcttatatgtacttttattttttggtggtgaaattgactgatgattttcctttttcttcgctggactattgtgccaactgccaggctgcctcctgcccttacagccctaagtggctgccttctttccatcaactcccaacttcttcctgtgaagtttaattgtctcaacgcctccccctcccccattccctccatttttctcccaagaaacctgactcaattatttgcatattttgagaaactgctgcagattagttctttttgccagttttccctggaactcctggccttttgtggaggggagggatggagagaataggaatcttcactagaagccgtgggaagaattggaagttacatgctgtatatgcaatgtccagcagtctgataaactgacgattcttaatcaagatttttttcctgatggggaagggacttttattttcttttagagaggggaaagtgtgagctcttcccttattcctaatggctatttttgaagcaaagaaggccagcaacattggcacatgccacctggcaaaggacccttgagtaagtgaaggtctcctaaaactgggattaagaaaccttgctctcctcatctccaaggcagggaccatcaagaacctacagactccatctcttctgcaagcctcatgccaaccctgggctattgctgctgccccttaaacacaggctgtccttaacccacctctcctgccctgtgatatgtctgctgagttggcctggccatttccaagaggctgtagaaaggggagaatgtcaaggaagacttttggtagagaaggagcagaaagatgtgtttttgggaagaagaagacctctaggaggagctagtaggaatgtacatgaagcaattagtctgaaactggcttccccactcccccgtttctccttttcctatccttataggcctgtcccttgcctctgccctggattggttggcaaactataggacttgatgtacataactcctgtcccttttcccttacaaggtggggattgcccctggctttgcctcttctttgtgcctttggcctggggtgcatctcctcccgcccttccatgtgcctttctttgcctctgcagtctcatttctcataattttgcaaattatattttgttgctttcttacctactattggccctaaatagcagaaagaagagaagtgaccgagagaacctcagattcttcattgaggattggtatagccatgatttcagtcatagcaagcttttgctcaacagcatatgggtgggatttggcaaaaatcctattctgatgaatctcaaagtaaggctggtaagagaagtgagtggtgtgactcttactccttaggtgcccagaatttaccatcatctctgaaggagttacagggaagtggtctccccaattctcccctccctccagtattgccccctctcactttagcatatattaattagcaggttgggctagagaaatcagctgctatgcgggttgattattattattatttctaatccttttccttatttgccttctactccccttaatctaatctaaaagctctgttccatgcaactggagttccttatccctctcttccccttcccttatatattgaggctatggggtaggagaaaagtgcacaacccaccaccccctctactcgtgcattaaaatttcttatttacccttttcccccttcccatttcttcccactttcatctaccttttctggcaaaaaggagccttttgctctctgtgaccctaagagcacactgcacagggaaaattgccccatccagacctggctccactcttgatctctcttgtcctcttctgctcttttcctggtgctcttttttctcggtggggtgtgggtaatagaacagccgtgggcttttggggacctttaacttttttttctctcttttgtttataaaaaacactaaacattcaattccagagaacccaaaatcccaccttcccaccgaacactactaaggggcttgtgttctgctccataccttttctcttttctttctgtcttgttaatgcttttaaaaacaaatgagttttttatataaataaagtttttaaagtgtgtatgtggggggtctgtgtcatttcttcacttcaagctgttatttcttccctgctttgcatctttgttacttccttatgtatcagtgtcctttccagagcaaccagaaggaggttataccaggatttattttgagctcagccccaactctttatcaagcaacattcttgttaactatatgtgaaacattttttcttctgaagattcttaaaaattgaatgtggctgaagttgaacatgggagcttattgctaatttagagataggaaactgaagcataaagaattaatgacttactttaattactggaattcttctgcaacatttgacaaaactaaccttgaataaggcccactgtaatacgtagctctcttaaatataacacttaggactagaagattagaaactaccaatcccaactacgtaataggaaaatgtaggatcaaaaggcccatgtatataagtactgaccactgggccataatgttgcttctcaggctatatgcagtcctttagtcagaagtcaataggcctatttattaatattttacagaccatattacctggattaccagggactatctttgctgcagagatcaagggttaagatctatgggaagatacttatttttctgaggtccttatgtcctgtcatataattaaagactcaagagaatttatgtgaaatgctttctgtatgccccaatctttagattaaaattatatacctgctcct

SEQ ID NO: 133035 - DNA, 1904 bp, Homo sapiens
ccggggcggagggtacgatggagaatttcacggcactgtttggggctcaggctgacccaccaccgcccccaaccgcactcggcttcggaccaggaaagcctccacccccgccaccgcctcctgcgggcgggggacccggcacggccccgcctcccaccgcggccacggctcctcctggcgcggacaagtcaggagctggctgtggccctttttacctcatgagggaactgccaggtagcacagagctgacaggcagcacgaatctgatcacacactacaacttggaacaagcctataataaattctgtgggaagaaggtgaaggagaagctaagtaacttcctgcctgacctgccagggatgattgatctgcctggttcccatgataacagcagcctccgctctctcattgagaagccccctattctcagtagctctttcaatcctatcacagggaccatgctggccggcttccgcctccacactggcccgttgccggagcagtgtcgtctgatgcatattcagcctcccaagaagaagaataagcacaagcacaaacagagccgtacccaggatcctgtccccccaggtacttacatatttccagcccagtgtggttttgcagctctcacagaaaatgtcagctaccgagtggagccccgtgagcaagaggcgctgttcagctggcccgcaacccacaggaaaattactcactcacacacaagcacaagcacacgcacaaggaaagaggtagactcacacggagttaaacaggctagcctggtgcgcgagaggaggggaatggcaggtccccgcttcgcgtaccttggaaataagctcatcgtgtttggccaggtgtgcacggcagtggacacagctgtaagtgcggtgacagcggggcagatagctgcggaaagtcttggtggggaggcaggcagggcccggaccggggtcacagctgggcatgacgggctggaggacaatgccctggtgggctggaggggctggcgccgtgcagcccccgcagagacggtcgcagctgaggaggatgaggacaaggaagatgatttccgagctcccctttacaaaacagtggagataaagggcatccaggtgcgcatgaaatggtgtgccacctgccgcttttaccgtccccctcgatgttcccactgcagtgtctgtgacaactgtgtggaggtatttggggagaccaaagaaagagaagacattgtaatcagacctcccttccttcgaccagaagtttcagatgggcagataactgtgaagatcatggataatggcatccagggagagctgaggagaaccaaggcaagcaggccgtcgcgggacctagaccgagacaggcagatttcccatcagagctccaacatgcccgcagagtctggaaagagattcaaacccagcaagtatgtcccggtctctgcagccgccatcttcctagtgggagctacgacactcttctttgcctttacgctacaactagctacattattagaagccccagattctggcactgtgggggcagactttattttggcaacagatactggaattccattccaggattacacactttatctggaccaagttgatatccagaaggttgtagggtgtccaggactaagcctgtatgtgtcacctgcagtgcccatctacaatgcaattatgtttctctttgtgttggccaacttcagcatggccaccttcatggacccagggattttccctcgagatttttctatgctttccagatggactagcctgttggaaggacatacaagacatgtagaagagccaagttgtcctggtgtcatggctgaggccacagaagaccagtcatcccctaaccaacccaacaactataccttacagatgtatgaatga

SEQ ID NO: 133036 - DNA, 1975 bp, Homo sapiens
  misc_feature (1)...(1975): n = a,t,c or g
atggggagaaaccagagaagaaaagctgaaaattctataaaccagagagcctcttctcctccaaaggattgcagttcctcgccagcaatggaacaaagctggatggagaatgactttgatgagctaacagaagtaggcttcagaagtgatggagagaatggaaccaagctggaaaacacgcttcaggatattatccaggagaacttccccaacttagcaaggcaggccaacattcaaattcaggaaatacagagaacaccacaaagatactcctcaagaagagcaactccaagacacgtaattgtcagattcaccaaggttgaaatgaaggaaaaaattttaagggcagccagagagaaagcaccacattgtacttattccaaaattgaccacatagttggaagtaaagcactcctcagcaaatataaaagtacagaaatcacaacaaactgtctctcagaccacagtgcaatcaaattagaactcaagattaagaaactcactcgaaaccgctcaactacatggaaaccgaacaacctgctcctgaatgactactgggtaaataacgaaatgaaggcagaaataaagatgttctttgaaaccaatgacaacaaagacacaacgtaccagaatctctgggacacatttaaagcagtctgtagagggaaatttatagcactaaatgcccacaagagaaagcaggaaagatctaaaatcgacaccctaacatcacaattaaaagaactagagaagcaagagcaaacaaattcaaaagctatcagaaggcaagaaataactaagatcagagcagaactgaagctgataaccaacttcagcaaagtctcagcatacatcaatgtgcaaaaatcacaagcattcttatacacaaataacagacaaacagagagccaaatcatgagtgaactcccattcacaatagctacaaagggaataaaatacctaggaatccaacttacaacagatgtgaaggacctcttcaaggagaactacaaaccactgctcaacgaaataaaagaggacacaaacaaatggaagaacattccatactcatggataggaagaatcaatatcatgaaaatggccatactgcccaagtatggtcgatacatccgctctgctctgcgtcnngagaaggctctttctgccatagctgacctcctgactaatgaacatgaacgggtggtgaaagctgcatctggagcacctgagaaacctggctgtggatgctcgcaacaaagaattaattgggtaacatgctattcctaacttggtaaagaatcttgccaggaggacagcagaactcctcttggaatttctctgaggacactgtcatctctattttgaacactatcaacgaggttatcgctgagaacttggaggctgccaaaaagcttcgagagacacagggtattgagaagctggtgttgatcaacaaatcagggaaccgctcagaaaaagaagttcgagcagcagcacttgtattacagacaatctggggatataaggaactgcggaagccactggaaaaagaaggatggaagaaatcagactttcaggtgaatctaaacaatgcttcccgaagccagagcagtcattcatatgatgatagtactctccctctcatttgacccggacccaaaaatcagataagaaacctgatcgggaagaaattcagatgagcaatatgggatcaaacacaaaatcactagataacaactattccacaccaaatgagagaggagaccacaatagaacactggatcgatcgggggatctaggcgacatggagccattgaagggaacaacacccttgatgcaggacgaggggcaggaatctctggaggaagagttggatgtgttggttttggatgatgaggggggccaagtgtcttacccctccatggtatgtccttcagtcacccccaagattgttcttgaggaaggaggctcctga

SEQ ID NO: 133037 - DNA, 6313 bp, Homo sapiens
ctgccagatcagtttgtcaccacccaggctcccttgcctttggctgggtgcaacttccattttaggtgttggatctgagggggaaaaaaaagagagagggagagagagagaaagaagagcaggaaagatcccgaaaggaggaagaggtggcgaaaaatcaactgccctgctggatttgtctttctcagcaccttggcgaagccttgggtttctttcttaaaggactgatttttagaactccacatttgaggtgtgtggcttttgaagaaaatgtatgtactgacgggaaaaggaagataagcaagtcgaatttttgtcttacgctctctccttcctgcttcctccttgctgtggtggctgggatgctccttccatgattttttgaatctagactgggctgttctctgtgttaaaccaatcagttgcgaccttctcttaacagtgtgaagtgagggggtctctctccctccttctccttcctctgtgattcaccttcctttttaccctgccctgcggcggctccgccccttaccttcatggacgactcagaggtggagtcgaccgccagcatcttggcctctgtgaaggaacaagaggcccagtttgagaagctgacccgggcgctggaggaggaacggcgccacgtctcggcgcagctggaacgcgtccgggtctcaccacaagatgccaacccactcatggccaacggcacactcacccgccggcatcagaacggccggtttgtgggcgatgctgaccttgaaagacagaaattttcagatttgaaactcaacggaccccaggatcacagtcaccttctatatagcaccatccccaggatgcaggagccggggcagattgtggagacctacacggaggaggatcctgagggagccatgtctgtagtctctgtggagacctcagatgatgggaccactcggcgcacagagaccacggtcaagaaagtagtgaagactgtgacaacacggacagtacagccagtcgctatgggaccagacgggttgcctgtggatgcttcatcagtttctaacaactatatccagactttgggtcgtgatttccgcaagaatggcaatgggggacctggtccctatgtggggcaagctggcactgctacccttcctaggaacttccactaccctcctgatggttatagtcgccactatgaagatggttatccaggtggcagtgataactatggcagtctgtcccgggtgacccgcattgaggagcggtataggcccagcatggaaggctaccgggcacctagtagacaggatgtgtatgggccccaaccccaggttcgggtaggtgggagcagcgtggatctgcatcgctttcatccagagccttatgggctagaggatgaccagcgtagtatgggctatgatgacctggattatggtatgatgtctgattatggcactgcccgtcggactgggacaccctctgaccctcgtcggcgcctcaggagctatgaagacatgattggtgaggaggtgccatcggatcaatactactgggctcctttggcccagcatgagcgaggaagtttagcaagcttggatagcctgcgcaaaggagggcctccacctcctaattggagacagccagagctgccagaggtgatcgccatgcttggattccgcttggatgctgtcaagtccaatgcagctgcatacctgcaacacttatgctaccgcaatgacaaggtgaagactgacgtgcggaagctcaagggcatcccagtactggtgggattgttagaccatcccaaaaaggaagtgcaccttggagcctgtggagctctcaagaatatctcttttggacgtgaccaggataacaagattgccataaaaaactgtgatggtgtgcctgcccttgtgcgattgcttcgaaaggctcgtgatatggaccttactgaagttattaccggaaccctgtggaatctttcatcccatgactcaatcaaaatggagattgtggaccatgcactgcatgccttgacagatgaagtgatcattcctcattctggttgggagcgggaacctaatgaagactgtaagccacgccatattgagtgggaatcggtgctcaccaacacagctggctgccttaggaatgtaagctcagagaggagtgaagctcgccggaaacttcgggaatgtgatggtttagttgatgccctcattttcattgttcaggctgagattgggcagaaggattcagacagcaagcttgtagagaactgtgtttgccttcttcggaacttatcatatcaagttcaccgggagatcccacaggcagagcgttaccaagaggcagctcccaatgttgccaacaatactgggccacatgctgccagttgctttggggccaagaagggcaaagatgagtggttctccagagggaaaaaacctatagaggatccagcaaacgatacagtggatttccctaaaagaacgagtccagctcgaggctatgagctcttatttcagccagaggtggttcggatatacatctcacttcttaaggagagcaagactcctgccatcctagaagcctcagctggagctatccagaacttgtgtgctgggcgctggacgtatggtcgatacatccgctctgctctgcgtcaagagaaggctctttctgccatagctgacctcctgactaatgaacatgaacgggtggtgaaagctgcatctggagcactgagaaacctggctgtggatgctcgcaacaaagaattaattggtaaacatgctattcctaacttggtaaagaatctgccaggaggacagcagaactcctcttggaatttctctgaggacactgtcatctctattttgaacactatcaacgaggttatcgctgagaacttggaggctgccaaaaagcttcgagagacacagggtattgagaagctggtgttgatcaacaaatcagggaaccgctcagaaaaagaagttcgagcagcagcacttgtattacagacaatctggggatataaggaactgcggaagccactggaaaaagaaggatggaagaaatcagactttcaggtgaatctaaacaatgcttcccgaagccagagcagtcattcatatgatgatagtactctccctctcattgaccggaaccaaaaatcagataagaaacctgatcgggaagaaattcagatgagcaatatgggatcaaacacaaaatcactagataacaactattccacaccaaatgagagaggagaccacaatagaacactggatcgatcgggggatctaggcgacatggagccattgaagggaacaacacccttgatgcaggacgaggggcaggaatctctggaggaagagttggatgtgttggttttggatgatgaggggggccaagtgtcttacccctccatgcagaagatttagcaccactatctccgttccatctgggcttatatgtacttttattttttggtggtgaaattgactgatgattttcctttttcttcgctggactattgtgccaactgccaggctgcctcctgcccttacagccctaagtggctgccttctttccatcaactcccaacttcttcctgtgaagtttaattgtctcaacgcctccccctcccccattccctccatttttctcccaagaaacctgactcaattatttgcatattttgagaaactgctgcagattagttctttttgccagttttccctggaactcctggccttttgtggaggggagggatggagagaataggaatcttcactagaagccgtgggaagaattggaagttacatgctgtatatgcaatgtccagcagtctgataaactgacgattcttaatcaagatttttttcctgatggggaagggacttttattttcttttagagaggggaaagtgtgagctcttcccttattcctaatggctatttttgaagcaaagaaggccagcaacattggcacatgccacctggcaaaggacccttgagtaagtgaaggtctcctaaaactgggattaagaaaccttgctctcctcatctccaaggcagggaccatcaagaacctacagactccatctcttctgcaagcctcatgccaaccctgggctattgctgctgccccttaaacacaggctgtccttaacccacctctcctgccctgtgatatgtctgctgagttggcctggccatttccaagaggctgtagaaaggggagaatgtcaaggaagacttttggtagagaaggagcagaaagatgtgtttttgggaagaagaagacctctaggaggagctagtaggaatgtacatgaagcaattagtctgaaactggcttccccactcccccgtttctccttttcctatccttataggcctgtcccttgcctctgccctggattggttggcaaactataggacttgatgtacataactcctgtcccttttcccttacaaggtggggattgcccctggctttgcctcttctttgtgcctttggcctggggtgcatctcctcccgcccttccatgtgcctttctttgcctctgcagtctcatttctcataattttgcaaattatattttgttgctttcttacctactattggccctaaatagcagaaagaagagaagtgaccgagagaacctcagattcttcattgaggattggtatagccatgatttcagtcatagcaagcttttgctcaacagcatatgggtgggatttggcaaaaatcctattctgatgaatctcaaagtaaggctggtaagagaagtgagtggtgtgactcttactccttaggtgcccagaatttaccatcatctctgaaggagttacagggaagtggtctccccaattctcccctccctccagtattgccccctctcactttagcatatattaattagcaggttgggctagagaaatcagctgctatgcgggttgattattattattatttctaatccttttccttatttgccttctactccccttaatctaatctaaaagctctgttccatgcaactggagttccttatccctctcttccccttcccttatatattgaggctatggggtaggagaaaagtgcacaacccaccaccccctctactcgtgcattaaaatttcttatttacccttttcccccttcccatttcttcccactttcatctaccttttctggcaaaaaggagccttttgctctctgtgaccctaagagcacactgcacagggaaaattgccccatccagacctggctccactcttgatctctcttgtcctcttctgctcttttcctggtgctcttttttctcggtggggtgtgggtaatagaacagccgtgggcttttggggacctttaacttttttttctctcttttgtttataaaaaacactaaacattcaattccagagaacccaaaatcccaccttcccaccgaacactactaaggggcttgtgttctgctccataccttttctcttttctttctgtcttgttaatgcttttaaaaacaaatgagttttttatataaataaagtttttaaagtgtgtatgtggggggtctgtgtcatttcttcacttcaagctgttatttcttccctgctttgcatctttgttacttccttatgtatcagtgtcctttccagagcaaccagaaggaggttataccaggatttattttgagctcagccccaactctttatcaagcaacattcttgttaactatatgtgaaacattttttcttctgaagattcttaaaaattgaatgtggctgaagttgaacatgggagcttattgctaatttagagataggaaactgaagcataaagaattaatgacttactttaattactggaattcttctgcaacatttgacaaaactaaccttgaataaggcccactgtaatacgtagctctcttaaatataacacttaggactagaagattagaaactaccaatcccaactacgtaataggaaaatgtaggatcaaaaggcccatgtatataagtactgaccactgggccataatgttgcttctcaggctatatgcagtcctttagtcagaagtcaataggcctatttattaatattttacagaccatattacctggattaccagggactatctttgctgcagagatcaagggttaagatctatgggaagatacttatttttctgaggtccttatgtcctgtcatataattaaagactcaagagaatttatgtgaaatgctttctgtatgccccaatctttagattaaaattatatacctgctcct

SEQ ID NO: 133038 - DNA, 6250 bp, Homo sapiens
ctgccagatcagtttgtcaccacccaggctcccttgcctttggctgggtgcaacttccattttaggtgttggatctgagggggaaaaaaaagagagagggagagagagagaaagaagagcaggaaagatcccgaaaggaggaagaggtggcgaaaaatcaactgccctgctggatttgtctttctcagcaccttggcgaagccttgggtttctttcttaaaggactgatttttagaactccacatttgaggtgtgtggcttttgaagaaaatgtatgtactgacgggaaaaggaagataagcaagtcgaatttttgtcttacgctctctccttcctgcttcctccttgctgtggtggctgggatgctccttccatgattttttgaatctagactgggctgttctctgtgttaaaccaatcagttgcgaccttctcttaacagtgtgaagtgagggggtctctctccctccttctccttcctctgtgattcaccttcctttttaccctgccctgcggcggctccgccccttaccttcatggacgactcagaggtggagtcgaccgccagcatcttggcctctgtgaaggaacaagaggcccagtttgagaagctgacccgggcgctggaggaggaacggcgccacgtctcggcgcagctggaacgcgtccgggtctcaccacaagatgccaacccactcatggccaacggcacactcacccgccggcatcagaacggccggtttgtgggcgatgctgaccttgaaagacagaaattttcagatttgaaactcaacggaccccaggatcacagtcaccttctatatagcaccatccccaggatgcaggagccggggcagattgtggagacctacacggaggaggatcctgagggagccatgtctgtagtctctgtggagacctcagatgatgggaccactcggcgcacagagaccacggtcaagaaagtagtgaagactgtgacaacacggacagtacagccagtcgctatgggaccagacgggttgcctgtggatgcttcatcagtttctaacaactatatccagactttgggtcgtgatttccgcaagaatggcaatgggggacctggtccctatgtggggcaagctggcactgctacccttcctaggaacttccactaccctcctgatggttatagtcgccactatgaagatggttatccaggtggcagtgataactatggcagtctgtcccgggtgacccgcattgaggagcggtataggcccagcatggaaggctaccgggcacctagtagacaggatgtgtatgggccccaaccccaggttcgggtaggtgggagcagcgtggatctgcatcgctttcatccagagccttatgggctagaggatgaccagcgtagtatgggctatgatgacctggattatggtatgatgtctgattatggcactgcccgtcggactgggacaccctctgaccctcgtcggcgcctcaggagctatgaagacatgattggtgaggaggtgccatcggatcaatactactgggctcctttggcccagcatgagcgaggaagtttagcaagcttggatagcctgcgcaaaggagggcctccacctcctaattggagacagccagagctgccagaggtgatcgccatgcttggattccgcttggatgctgtcaagtccaatgcagctgcatacctgcaacacttatgctaccgcaatgacaaggtgaagactgacgtgcggaagctcaagggcatcccagtactggtgggattgttagaccatcccaaaaaggaagtgcaccttggagcctgtggagctctcaagaatatctcttttggacgtgaccaggataacaagattgccataaaaaactgtgatggtgtgcctgcccttgtgcgattgcttcgaaaggctcgtgatatggaccttactgaagttattaccggaaccctgtggaatctttcatcccatgactcaatcaaaatggagattgtggaccatgcactgcatgccttgacagatgaagtgatcattcctcattctggttgggagcgggaacctaatgaagactgtaagccacgccatattgagtgggaatcggtgctcaccaacacagctggctgccttaggaatgtaagctcagagaggagtgaagctcgccggaaacttcgggaatgtgatggtttagttgatgccctcattttcattgttcaggctgagattgggcagaaggattcagacagcaagcttgtagagaactgtgtttgccttcttcggaacttatcatatcaagttcaccgggagatcccacaggcagagcgttaccaagaggcagctcccaatgttgccaacaatactgggccacatgctgccagttgctttggggccaagaagggcaaagatgagtggttctccagagggaaaaaacctatagaggatccagcaaacgatacagtggatttccctaaaagaacgagtccagctcgaggctatgagctcttatttcagccagaggtggttcggatatacatctcacttcttaaggagagcaagactcctgccatcctagaagcctcagctggagctatccagaacttgtgtgctgggcgctggacgtatggtcgatacatccgctctgctctgcgtcaagagaaggctctttctgccatagctgacctcctgactaatgaacatgaacgggtggtgaaagctgcatctggagcactgagaaacctggctgtggatgctcgcaacaaagaattaattggtaaacatgctattcctaacttggtaaagaatctgccaggaggacagcagaactcctcttggaatttctctgaggacactgtcatctctattttgaacactatcaacgaggttatcgctgagaacttggaggctgccaaaaagcttcgagagacacagggtattgagaagctggtgttgatcaacaaatcagggaaccgctcagaaaaagaagttcgagcagcagcacttgtattacagacaatctggggatataaggaactgcggaagccactggaaaaagaaggatggaagaaatcagactttcaggtgaatctaaacaatgcttcccgaagccagagcagtcattcatatgatgatagtactctccctctcattgaccggaaccaaaaatcagataacaactattccacaccaaatgagagaggagaccacaatagaacactggatcgatcgggggatctaggcgacatggagccattgaagggaacaacacccttgatgcaggacgaggggcaggaatctctggaggaagagttggatgtgttggttttggatgatgaggggggccaagtgtcttacccctccatgcagaagatttagcaccactatctccgttccatctgggcttatatgtacttttattttttggtggtgaaattgactgatgattttcctttttcttcgctggactattgtgccaactgccaggctgcctcctgcccttacagccctaagtggctgccttctttccatcaactcccaacttcttcctgtgaagtttaattgtctcaacgcctccccctcccccattccctccatttttctcccaagaaacctgactcaattatttgcatattttgagaaactgctgcagattagttctttttgccagttttccctggaactcctggccttttgtggaggggagggatggagagaataggaatcttcactagaagccgtgggaagaattggaagttacatgctgtatatgcaatgtccagcagtctgataaactgacgattcttaatcaagatttttttcctgatggggaagggacttttattttcttttagagaggggaaagtgtgagctcttcccttattcctaatggctatttttgaagcaaagaaggccagcaacattggcacatgccacctggcaaaggacccttgagtaagtgaaggtctcctaaaactgggattaagaaaccttgctctcctcatctccaaggcagggaccatcaagaacctacagactccatctcttctgcaagcctcatgccaaccctgggctattgctgctgccccttaaacacaggctgtccttaacccacctctcctgccctgtgatatgtctgctgagttggcctggccatttccaagaggctgtagaaaggggagaatgtcaaggaagacttttggtagagaaggagcagaaagatgtgtttttgggaagaagaagacctctaggaggagctagtaggaatgtacatgaagcaattagtctgaaactggcttccccactcccccgtttctccttttcctatccttataggcctgtcccttgcctctgccctggattggttggcaaactataggacttgatgtacataactcctgtcccttttcccttacaaggtggggattgcccctggctttgcctcttctttgtgcctttggcctggggtgcatctcctcccgcccttccatgtgcctttctttgcctctgcagtctcatttctcataattttgcaaattatattttgttgctttcttacctactattggccctaaatagcagaaagaagagaagtgaccgagagaacctcagattcttcattgaggattggtatagccatgatttcagtcatagcaagcttttgctcaacagcatatgggtgggatttggcaaaaatcctattctgatgaatctcaaagtaaggctggtaagagaagtgagtggtgtgactcttactccttaggtgcccagaatttaccatcatctctgaaggagttacagggaagtggtctccccaattctcccctccctccagtattgccccctctcactttagcatatattaattagcaggttgggctagagaaatcagctgctatgcgggttgattattattattatttctaatccttttccttatttgccttctactccccttaatctaatctaaaagctctgttccatgcaactggagttccttatccctctcttccccttcccttatatattgaggctatggggtaggagaaaagtgcacaacccaccaccccctctactcgtgcattaaaatttcttatttacccttttcccccttcccatttcttcccactttcatctaccttttctggcaaaaaggagccttttgctctctgtgaccctaagagcacactgcacagggaaaattgccccatccagacctggctccactcttgatctctcttgtcctcttctgctcttttcctggtgctcttttttctcggtggggtgtgggtaatagaacagccgtgggcttttggggacctttaacttttttttctctcttttgtttataaaaaacactaaacattcaattccagagaacccaaaatcccaccttcccaccgaacactactaaggggcttgtgttctgctccataccttttctcttttctttctgtcttgttaatgcttttaaaaacaaatgagttttttatataaataaagtttttaaagtgtgtatgtggggggtctgtgtcatttcttcacttcaagctgttatttcttccctgctttgcatctttgttacttccttatgtatcagtgtcctttccagagcaaccagaaggaggttataccaggatttattttgagctcagccccaactctttatcaagcaacattcttgttaactatatgtgaaacattttttcttctgaagattcttaaaaattgaatgtggctgaagttgaacatgggagcttattgctaatttagagataggaaactgaagcataaagaattaatgacttactttaattactggaattcttctgcaacatttgacaaaactaaccttgaataaggcccactgtaatacgtagctctcttaaatataacacttaggactagaagattagaaactaccaatcccaactacgtaataggaaaatgtaggatcaaaaggcccatgtatataagtactgaccactgggccataatgttgcttctcaggctatatgcagtcctttagtcagaagtcaataggcctatttattaatattttacagaccatattacctggattaccagggactatctttgctgcagagatcaagggttaagatctatgggaagatacttatttttctgaggtccttatgtcctgtcatataattaaagactcaagagaatttatgtgaaatgctttctgtatgccccaatctttagattaaaattatatacctgctcct

SEQ ID NO: 133039 - DNA, 1477 bp, Homo sapiens
atgattggtgaggaggtgccatcggatcaatactactgggctcctttggcccagcatgagcgaggaagtttagcaagcttggatagcctgcgcaaaggagggcctccacctcctaattggagacagccagagctgccagaggtgatcgccatgcttggattccgcttggatgctgtcaagtccaatgcagctgcatacctgcaacacttatgctaccgcaatgacaaggtgaagactgacgtgcggaagctcaagggcatcccagtactggtgggattgttagaccatcccaaaaaggaagtgcaccttggagcctgtggagctctcaagaatatctcttttggacgtgaccaggataacaagattgccataaaaaactgtgatggtgtgcctgcccttgtgcgattgcttcgaaaggctcgtgaatatggaccttactgaagttattaccggaaccctgtggaatctttcatcccatgactcaatcaaaatggagattgtggaccatgcactgcatgccttgacagatgaagtgatcattcctcattctggttgggagcgggaacctaatgaagactgtaagccacgccacattgagtgggaatcggtgctcaccaacacagctggctgccttaggaatgtaagctcagagaggagtgaagctcgccggaaacttcgggaatgtgatggtttagttgatgccctcattttcattgttcaggctgagattgggcagaaggattcagacagcaagcttgtagagaactgtgtttgccttcttcggaacttatcatatcaagttcaccgggagatcccacaggcagagcgttaccaagaggcagctcccaatgttgccaacaatactgggccacatgctgccagttgctttggggccaagaagggcaaagggaaaaaacctatagaggatccagcaaacgatacagtggatttccctaaaagaacgagtccagctcgagaacgactgtacaatgaactgaaacgggacctcccccactttgtacgcactgtgctgctccctaaatctgggggtgtggtggagcgctccaaggacttccggcgggaatgtagggatgagcgtatccgtgagtatttttatggattccgaggctgtttctatccccatgccttcaatgtcaaattttcagatgtgaaaatctacaaagttggggcacccaccatcccagactcctgtttacctttgggcatgtctcaagaggataatcagctcaagctagtacctgtcactcctgggcgagatatggtgcaccacctactgagtgttagcactgccgagggtacagaggagaacctgtccgagacaagtgtagctggcttcattgtggtgaccagtgtggacctggagcatcaggtgtttactgttctgtctccagcccctcgcccactgcctaagaacttccttctcatcatggatatccggttcatggatctgaagtag

SEQ ID NO: 133040 - DNA, 1895 bp, Homo sapiens
catcctagaagcctcagctggagctatcaagaactgtgtgctgggcgctggacggtaccttttagaaaagggatttggagatgggaaaacttagataactagtttgctgccatttgtaatttgttccacccctttctatttgctattctagtatggtcgatacatccgctctgctctgcgtcaagagaaggctctttctgccatagctgacctcctgactaatgaacatgaacgggtggtgaaagctgcatctggagcactgagaaacctggctgtggatgctcgcaacaaagaattaattggtaaacatgctattcctaacttggtaaagaatctgccaggaggacagcagaactcctcttggaatttctctgaggacactgtcatctctattttgaacactatcaacgaggttatcgctgagaacttggaggctgccaaaaagcttcgagagacacagggtattgagaagctggtgttgatcaacaaatcagggaaccgctcagaaaaagaagttcgagcagcagcacttgtattacagacaatctggggatataaggaactgcggaagccactggaaaaagaaggatggaagaaatcagactttcaggaggcggtggcgggggtggaggctttcctggtccgaagccgagtgcggttgggggcggtggtggcgttcagagaactacatccgggtttagaggccgtacgtttgcgatatagcccaatagcagtcgttatggtgggggaggcggggcgagacctacgacgccggcgagcagtggccgttacggccgaaaagatggcggtcttggcacctctaattgctctcgtgtattcggtgccgcgactttcacgatggctcgcccaaccttactaccttctgtcggccctgctctctgctgccttcctactcgtgaggaaactgccgccgctctgccacggtctgcccacccaacgcgaagacggtaacccgtgtgactttgactgggtggtgcatgtcagaggggaactcgctggcaaagttgaaggcaaacctgtgaagcagagactgaaaggtggtctcttggcaaggagggcccgtttcctgcagccggagcccaatgtcaccctgaactcagcccaagagcctcacgaagaactgaaaaccaaggagagggcacttgcagatgacgttgctcccatggcagcgtctgtgcccgtgggcttctctctgtggaaaatggtggaggctgcttctgccccaggagggagaaacaccgactccctggctttggcgccagaagcctggatcggctgccagcccgtcatgcccagctgtgaccccggtccgggccctgcctgcctccccaccaagactttccgcagctatctgccccgctgtcaccgcacttacagctgtgtccactgccgtgcacacctggccaaacacgatgagcttatttccaaggagcaagcttttgagacgagccagaagtacaaggaagggaaatacatcattgaaatgtcacacatggtgaaggacaacggctgggactgaggggctcaggcagggtgtgcccttcctccgcatgcccctccctccccacggccctgccaagcagtctataccagcatgagtactgccccacccctgggggaaacctggctccaaccaacccctcccctgcctccaccatatccactaccaggcaccctttataacaggggtctgggggtaccccaggggtgttaaggctcacgagtgggcagcagtcagggagagacagaactggtggaaagggatggttgagggtctttctgttcccaagatcctgaacatggaagcgatggcagggcatagactcatgcacagaggattgtgggaggaatccgctattgctccaccttttttg

SEQ ID NO: 133041 - DNA, 6040 bp, Homo sapiens
ctgccagatcagtttgtcaccacccaggctcccttgcctttggctgggtgcaacttccattttaggtgttggatctgagggggaaaaaaaagagagagggagagagagagaaagaagagcaggaaagatcccgaaaggaggaagaggtggcgaaaaatcaactgccctgctggatttgtctttctcagcaccttggcgaagccttgggtttctttcttaaaggactgatttttagaactccacatttgagctctctccttcctgcttcctccttgctgtggtggctgggatgctccttccatgattttttgaatctagactgggctgttctctgtgttaaaccaatcagttgcgaccttctcttaacaggtggagtcgaccgccagcatcttggcctctgtgaaggaacaagaggcccagtttgagaagctgacccgggcgctggaggaggaacggcgccacgtctcggcgcagctggaacgcgtccgggtctcaccacaagatgccaacccactcatggccaacggcacactcacccgccggcatcagaacggccggtttgtgggcgatgctgaccttgaaagacagaaattttcagatttgaaactcaacggaccccaggatcacagtcaccttctatatagcaccatccccaggatgcaggagccggggcagattgtggagacctacacggaggaggatcctgagggagccatgtctgtagtctctgtggagacctcagatgatgggaccactcggcgcacagagaccacggtcaagaaagtagtgaagactgtgacaacacggacagtacagccagtcgctatgggaccagacgggttgcctgtggatgcttcatcagtttctaacaactatatccagactttgggtcgtgatttccgcaagaatggcaatgggggacctggtccctatgtggggcaagctggcactgctacccttcctaggaacttccactaccctcctgatggttatagtcgccactatgaagatggttatccaggtggcagtgataactatggcagtctgtcccgggtgacccgcattgaggagcggtataggcccagcatggaaggctaccgggcacctagtagacaggatgtgtatgggccccaaccccaggttcgggtaggtgggagcagcgtggatctgcatcgctttcatccagagccttatgggctagaggatgaccagcgtagtatgggctatgatgacctggattatggtatgatgtctgattatggcactgcccgtcggactgggacaccctctgaccctcgtcggcgcctcaggagctatgaagacatgattggtgaggaggtgccatcggatcaatactactgggctcctttggcccagcatgagcgaggaagtttagcaagcttggatagcctgcgcaaaggagggcctccacctcctaattggagacagccagagctgccagaggtgatcgccatgcttggattccgcttggatgctgtcaagtccaatgcagctgcatacctgcaacacttatgctaccgcaatgacaaggtgaagactgacgtgcggaagctcaagggcatcccagtacttgttgggattgttagaccatcccaaaaaggaagtgcaccttggagcctgtggagctctcaagaatatctcttttggacgtgaccaggataacaagattgccataaaaaactgtgatggtgtgcctgcccttgtgcgattgcttcgaaaggctcgtgatatggaccttactgaagttattaccggaaccctgtggaatctttcatcccatgactcaatcaaaatggagattgtggaccatgcactgcatgccttgacagatgaagtgatcattcctcattctggttgggagcgggaacctaatgaagactgtaagccacgccatattgagtgggaatcggtgctcaccaacacagctggctgccttaggaatgtaagctcagagaggagtgaagctcgccggaaacttcgggaatgtgatggtttagttgatgccctcattttcattgttcaggctgagattgggcagaaggattcagacagcaagcttgtagagaactgtgtttgccttcttcggaacttatcatatcaagttcaccgggagatcccacaggcagagcgttaccaagaggcagctcccaatgttgccaacaatactgggccacatgctgccagttgctttggggccaagaagggcaaagggaaaaaacctatagaggatccagcaaacgatacagtggatttccctaaaagaacgagtccagctcgaggctatgagctcttatttcagccagaggtggttcggatatacatctcacttcttaaggagagcaagactcctgccatcctagaagcctcagctggagctatccagaacttgtgtgctgggcgctggacgtatggtcgatacatccgctctgctctgcgtcaagagaaggctctttctgccatagctgacctcctgactaatgaacatgaacgggtggtgaaagctgcatctggagcactgagaaacctggctgtggatgctcgcaacaaagaattaattggtaaacatgctattcctaacttggtaaagaatctgccaggaggacagcagaactcctcttggaatttctctgaggacactgtcatctctattttgaacactatcaacgaggttatcgctgagaacttggaggctgccaaaaaagcttcgagagacacagggtattgagaagctggtgttgatcaacaaatcagggaaccgctcagaaaaagaagttcgagcagcagcacttgtattacagacaatctggggatataaggaactgcggaagccactggaaaaagaaggatggaagaaatcagactttcaggtgaatctaaacaatgcttcccgaaaccagagcagccattcatatgatgatagtactctccctctcattgaccggaaccaaaaatcagataagaaacctgatcgggaagatattcagatgagcaatatgggatcaaacacaaaatcactagataacaactattccacaccatatgagagaggagaccacaatagaacactggatcgatcgggggatctaggcgacatggagccattgaagggaacaacacccttgatgcagaagatttagcaccactatctccgttccatctgggcttatatggacctctaattttttggtggtgaaattgactggatgatctcactttttcttcactggaatattgggccaactgccaagctgccctccggccctaacggccctaaggggctggccttatttccattaaacttccatacttcttcctggggaagctaaaacgggcctaaaggccttccccttcccccattcccatccaatttttttcccaagaaacctgactcaattatttgcatattttgagaaactgctgcagattagttctttttgccagttttccctggaactcctggccttttgtggaggggagggatggagagaataggaatcttcactagaagccgtgggaagaattggaagttacatgctgtatatgcaatgtccagcagtctgataaactgacgattcttaatcaagatttttttcctgatggggaagggacttttattttcttttagagaggggaaagtgtgagctcttcccttattcctaatggctatttttgaagcaaagaaggccagcaacattggcacatgccacctggcaaaggacccttgagtaagtgaaggtctcctaaaactgggattaagaaaccttgctctcctcatctccaaggcagggaccatcaagaacctacagactccatctcttctgcaagcctcatgccaaccctgggctattgctgctgccccttaaacacaggctgtccttaacccacctctcctgccctgtgatatgtctgctgagttggcctggccatttccaagaggctgtagaaaggggagaatgtcaaggaagacttttggtagagaaggagcagaaagatgtgtttttgggaagaagaagacctctaggaggagctagtaggaatgtacatgaagcaattagtctgaaactggcttccccactcccccgtttctccttttcctatccttataggcctgtcccttgcctctgccctggattggttggcaaactataggacttgatgtacataactcctgtcccttttcccttacaaggtggggattgcccctggctttgcctcttctttgtgcctttggcctggggtgcatctcctcccgcccttccatgtgcctttctttgcctctgcagtctcatttctcataattttgcaaattatattttgttgctttcttacctactattggccctaaatagcagaaagaagagaagtgaccgagagaacctcagattcttcattgaggattggtatagccatgatttcagtcatagcaagcttttgctcaacagcatatgggtgggatttggcaaaaatcctattctgatgaatctcaaagtaaggctggtaagagaagtgagtggtgtgactcttactccttaggtgcccagaatttaccatcatctctgaaggagttacagggaagtggtctccccaattctcccctccctccagtattgccccctctcactttagcatatattaattagcaggttgggctagagaaatcagctgctatgcgggttgattattattattatttctaatccttttccttatttgccttctactccccttaatctaatctaaaagctctgttccatgcaactggagttccttatccctctcttccccttcccttatatattgaggctatggggtaggagaaaagtgcacaacccaccaccccctctactcgtgcattaaaatttcttatttacccttttcccccttcccatttcttcccactttcatctaccttttctggcaaaaaggagccttttgctctctgtgaccctaagagcacactgcacagggaaaattgccccatccagacctggctccactcttgatctctcttgtcctcttctgctcttttcctggtgctcttttttctcggtggggtgtgggtaatagaacagccgtgggcttttggggacctttaacttttttttctctcttttgtttataaaaaacactaaacattcaattccagagaacccaaaatcccaccttcccaccgaacactactaaggggcttgtgttctgctccataccttttctcttttctttctgtcttgttaatgcttttaaaaacaaatgagttttttatataaataaagtttttaaagtgtgtatgtggggggtctgtgtcatttcttcacttcaagctgttatttcttccctgctttgcatctttgttacttccttatgtatcagtgtcctttccagagcaaccagaaggaggttataccaggatttattttgagctcagccccaactctttatcaagcaacattcttgttaactatatgtgaaacattttttcttctgaagattcttaaaaattgaatgtggctgaagttgaacatgggagcttattgctaatttagagataggaaactgaagcataaagaattaatgacttactttaattactggaattcttctgcaacatttgacaaaactaaccttgaataaggcccactgtaatacgtagctctcttaaatataacacttaggactagaagattagaaactaccaatcccaactacgtaataggaaaatgtaggatcaaaaggcccatgtatataagtactgaccactgggccataatgttgcttctcaggctatatgcagtcctttagtcagaagtcaataggcctatttattaatattttacagaccatattacctggattaccagggactatctttgctgcagagatcaagggttaagatctatgggaagatacttatttttctgaggtccttatgtcctgtcatataattaaagactcaagagaatttatgtgaaatgctttctgtatgccccaatctttagattaaaattatatacctgctcct

SEQ ID NO: 133042 - DNA, 5020 bp, Homo sapiens
ctgccagatcagtttgtcaccacccaggctcccttgcctttggctgggtgcaacttccattttaggtgttggatctgagggggaaaaaaaagagagagggagagagagagaaagaagagcaggaaagatcccgaaaggaggaagaggtggcgaaaaatcaactgccctgctggatttgtctttctcagcaccttggcgaagccttgggtttctttcttaaaggactgatttttagaactccacatttgaggagctatgaagacatgattggtgaggaggtgccatcggatcaatactactgggctcctttggcccagcatgagcgaggaagtttagcaagcttggatagcctgcgcaaaggagggcctccacctcctaattggagacagccagagctgccagaggtgatcgccatgcttggattccgcttggatgctgtcaagtccaatgcagctgcatacctgcaacacttatgctaccgcaatgacaaggtgaagactgacgtgcggaagctcaagggcatcccagtactggtgggattgttagaccatcccaaaaaggaagtgcaccttggagcctgtggagctctcaagaatatctcttttggacgtgaccaggataacaagattgccataaaaaactgtgatggtgtgcctgcccttgtgcgattgcttcgaaaggctcgtgatatggaccttactgaagttattaccggaaccctgtggaatctttcatcccatgactcaatcaaaatggagattgtggaccatgcactgcatgccttgacagatgaagtgatcattcctcattctggttgggagcgggaacctaatgaagactgtaagccacgccatattgagtgggaatcggtgctcaccaacacagctggctgccttaggaatgtaagctcagagaggagtgaagctcgccggaaacttcgggaatgtgatggtttagttgatgccctcattttcattgttcaggctgagattgggcagaaggattcagacagcaagcttgtagagaactgtgtttgccttcttcggaacttatcatatcaagttcaccgggagatcccacaggcagagcgttaccaagaggcagctcccaatgttgccaacaatactgggccacatgctgccagttgctttggggccaagaagggcaaagatgagtggttctccagagggaaaaaacctatagaggatccagcaaacgatacagtggatttccctaaaagaacgagtccagctcgaggctatgagctcttatttcagccagaggtggttcggatatacatctcacttcttaaggagagcaagactcctgccatcctagaagcctcagctgggagctatccaggaacttgtgtgctgggcgctgggacgtatgggtcgatacatccgctctgctctgcgtcaagaggaaggctctttctgccatagctgaccctccgtgactaatgaacatgaacgggtggtgaaagctgcatctggagcacctgagaaacctggcttgtggaatgctcgcaacaaagaattaattggtaaacatgctattcctaacttggtaaagaatctgcccaggaggacagcagaactcctcttggaatttctctgagggacactgtcatctctattttgaacactatcaacgaggttatcgctgagaacttggaggctgccaaaaagcttcgagagacacagggtattgagaagctggtggtgatcaacaaatcagggaaccgctcagaaaaagaagttcgagcagcagcacttgtattacagacaatctggggatataaggaactgcggaagccactggaaaaagaaggatggaagaaatcagactttcaggtgaatctaaacaatgcttcccgaagccagagcagtcattcatatgatgatagtactctccctctcattgaccggaaccaaaaatcagataacaactattccacaccaaatgagagaggagaccacaatagaacactggatcgatcgggggatctaggcgacatggagccattgaagggaacaacacccttgatgcaggacgaggggcaggaatctctggaggaagagttggatgtgttggttttggatgatgaggggggccaagtgtcttacccctccatgcagaagatttagcaccactatctccgttccatctgggcttatatgtacttttattttttggtggtgaaattgactgatgattttcctttttcttcgctggactattgtgccaactgccaggctgcctcctgcccttacagccctaagtggctgccttctttccatcaactcccaacttcttcctgtgaagtttaattgtctcaacgcctccccctcccccattccctccatttttctcccaagaaacctgactcaattatttgcatattttgagaaactgctgcagattagttctttttgccagttttccctggaactcctggccttttgtggaggggagggatggagagaataggaatcttcactagaagccgtgggaagaattggaagttacatgctgtatatgcaatgtccagcagtctgataaactgacgattcttaatcaagatttttttcctgatggggaagggacttttattttcttttagagaggggaaagtgtgagctcttcccttattcctaatggctatttttgaagcaaagaaggccagcaacattggcacatgccacctggcaaaggacccttgagtaagtgaaggtctcctaaaactgggattaagaaaccttgctctcctcatctccaaggcagggaccatcaagaacctacagactccatctcttctgcaagcctcatgccaaccctgggctattgctgctgccccttaaacacaggctgtccttaacccacctctcctgccctgtgatatgtctgctgagttggcctggccatttccaagaggctgtagaaaggggagaatgtcaaggaagacttttggtagagaaggagcagaaagatgtgtttttgggaagaagaagacctctaggaggagctagtaggaatgtacatgaagcaattagtctgaaactggcttccccactcccccgtttctccttttcctatccttataggcctgtcccttgcctctgccctggattggttggcaaactataggacttgatgtacataactcctgtcccttttcccttacaaggtggggattgcccctggctttgcctcttctttgtgcctttggcctggggtgcatctcctcccgcccttccatgtgcctttctttgcctctgcagtctcatttctcataattttgcaaattatattttgttgctttcttacctactattggccctaaatagcagaaagaagagaagtgaccgagagaacctcagattcttcattgaggattggtatagccatgatttcagtcatagcaagcttttgctcaacagcatatgggtgggatttggcaaaaatcctattctgatgaatctcaaagtaaggctggtaagagaagtgagtggtgtgactcttactccttaggtgcccagaatttaccatcatctctgaaggagttacagggaagtggtctccccaattctcccctccctccagtattgccccctctcactttagcatatattaattagcaggttgggctagagaaatcagctgctatgcgggttgattattattattatttctaatccttttccttatttgccttctactccccttaatctaatctaaaagctctgttccatgcaactggagttccttatccctctcttccccttcccttatatattgaggctatggggtaggagaaaagtgcacaacccaccaccccctctactcgtgcattaaaatttcttatttacccttttcccccttcccatttcttcccactttcatctaccttttctggcaaaaaggagccttttgctctctgtgaccctaagagcacactgcacagggaaaattgccccatccagacctggctccactcttgatctctcttgtcctcttctgctcttttcctggtgctcttttttctcggtggggtgtgggtaatagaacagccgtgggcttttggggacctttaacttttttttctctcttttgtttataaaaaacactaaacattcaattccagagaacccaaaatcccaccttcccaccgaacactactaaggggcttgtgttctgctccataccttttctcttttctttctgtcttgttaatgcttttaaaaacaaatgagttttttatataaataaagtttttaaagtgtgtatgtggggggtctgtgtcatttcttcacttcaagctgttatttcttccctgctttgcatctttgttacttccttatgtatcagtgtcctttccagagcaaccagaaggaggttataccaggatttattttgagctcagccccaactctttatcaagcaacattcttgttaactatatgtgaaacattttttcttctgaagattcttaaaaattgaatgtggctgaagttgaacatgggagcttattgctaatttagagataggaaactgaagcataaagaattaatgacttactttaattactggaattcttctgcaacatttgacaaaactaaccttgaataaggcccactgtaatacgtagctctcttaaatataacacttaggactagaagattagaaactaccaatcccaactacgtaataggaaaatgtaggatcaaaaggcccatgtatataagtactgaccactgggccataatgttgcttctcaggctatatgcagtcctttagtcagaagtcaataggcctatttattaatattttacagaccatattacctggattaccagggactatctttgctgcagagatcaagggttaagatctatgggaagatacttatttttctgaggtccttatgtcctgtcatataattaaagactcaagagaatttatgtgaaatgctttctgtatgccccaatctttagattaaaattatatacctgctcct

SEQ ID NO: 133043 - DNA, 2030 bp, Homo sapiens
  misc_feature (1)...(2030): n = a,t,c or g
gggggtacgtttgcgatatagcccaatagcagtcgttatggtgggggaggcggggcgagacctacgacgccggcgagcagtggccgttacggccgaaaagatggcggtcttggcacctctaatttgctctcggtgtattcggtgccgcgacatttcacgatggctcgcccaaccttactaccttctgtcggcccctgctctctgctgccttccctactcgtgaggaaactgccgccgctctgccacggtctgcccacccaaccgcgaagacggtaaccccgtgtgactttgactggagagaaagtggagatcctgatgtttctcagtgccattgtgatgatgaagaacccgcagatccatcactgtggagcaacatataggcaacattttcatgtttaagtaaaagtggccaacacaattcttttcttcccgcttggatattcgcatgggcctactttacatcacactctgcatagtgttcctgatgacgtgcaaacccccccctccccatatatgggccctgagtatatcaagtacttcaatggataaaccctttgatgaggaactagaacgggacaacagggtcaattggaattgttggagttctttggcaattggtctaatgactggcaatcatttgcccctatctatgctgacctctcccttaaatacaactgtacagggctaaattttgggaaggtggatgttggacgctatactgatgttagtacgcggtacaaagtgagcacatcacccctcaccaaggcaactccctaccctggatcctgttccaaggtgggcaaggagggcaatgcgggcggccacagatttgacaaggaaagggacggggctgttttcatgggaccttctctgaggtacctgaaaggaagggcaggagaatgtgatccgagaatttaacttaaatgagctataccagcgggccaagaaactatcaaaggctggagacaatatcccctgaggagcagcctgtggcttcaacccccaccacagtgtcagatgggggaaaacaagaaggataaataagatcctcgactttggcaagtgcttcctctcctgtcaattcccaggctctttccataaccacaagcctgaggttgcaagctttttatttatgttttccctttggcttgtgactgggtgggggcagcatgcagcttctgattttaaagaggcatctagggaattgtcaggcaccctacaggaaaggcctgccatgctgttggccaactgtttcactggagcaaagaaagagatctcatagggacggagggggaaatggttttccctccaagcttgggtcaagtgtgttaacttgcttatcaagctattcaggaccatctccatggttttctccatggaaactctgtggtttccatcattccctccttagttgaaccctgcacagccttggttagaaccctagatttaaacccttaaggttaagatgcctggggtataggaacgcttaagaattttccccccaaggaactcttgccttcccttaaagccctttctggcttcggtttatggtccttcaattaaaagtataagccgtaactttgtccgcctagtccctaaggagaaaccttttaaccacaaaagtttttatcattgaagacaaatattgaacaacccccctattttgtggggggattgaggaagggggtggaataggagggctttgaggacttttccttttgtgtgggtagggacttggaggagaaatcccctggactttccctaaccctgctgacatacatccccacacccagttgatggctttccgtaataaaaagattgggatttccttttgnnnnnnnnnnnnnnngggggggccgtttaaaaggatcaaattttactgccgggggctgggaaggtattattttttttatggggcccccaaaataaaatcccgggcccggggtttaaaaacggggggaggggaaaaccctgggggtacccaaattaaatggcttggaaaaaaatccctttttggccggggggggaag

SEQ ID NO: 133044 - DNA, 1422 bp, Homo sapiens
atggaatctactggtgaagatgctgtgaatattgttgaaatggtaactgaggatttagtatatcgtctagtagtcctgaagtctctccaagtctggctgagtccaggggattttatgggctcagaagggacagagtgcatgctgattggtccatgggtggccatgggcaggcccagtgaaagcaccctaagttctcactctgggccgaggtctccacatggaactggcagcccagcccccaggcttcaggctgtccatgtcttgaagtgcccaaagtccagaggggttcaaggtggctgggggctggcatctcagtgtctccctgagcacaggcacacccagttgagttgtgacagcacccaggcttggccacaactttgctctgcccagagcctgcgccacaatcggagtggccagggagcaggagcagtcacttctgagcctgcaggggcaggagggcttcccaggcccccaagaacacaaggatgcctgggtgcagagtcacggctggacaactgcactctcagcagagaggaggccctgaagagggtagactcctctctgatgttgatcatcctgacctcagcagctctcagcagagaggtccagaagggccaaggtggcaggaggctggtgtgtcagtgctgcctggagcagcacacacctggctgggccacaacaacgctgggaccaggaagaggccaggcaatgggagcagatacccctgagtctgctgatgatgggggacccacctgggtactcgagagcaccaggagacccaggcccacagccacaacccaggcagctgcagctgtgcctggggagctctcaccctaccaactcataaggggcagagctcccgccagtccctggctctgcagagtgtgcagcattgactgtgctgccttctctgcatctcccacagtggtggcaggtaggtcggcccggccccacctgagtggatcccagggttgggcttccagggcagcaggccccagagcaaagagtttactcactgactcacccagagcaacttccagtcctgcaagtaccattgctgatatacagatactcctcaacttacaatggagttccttcctgttaaagcatggcccagggaaaccaaaagattggacagccctgaagtctagtccttatgtccaaacttgctttctccctgccaatactactgcttcctatggccggtgccatccaatggccgccagcagctacaacaaaacaggcaggagaaggggtataagcagtttgctgagacttctggctttctctttctacctgtgtcagacgcttgcctcctctcttactactcctgaacatcatactccaggttatccagcctttggactgtggaattgtaccagcggcctcctggaggctctcaggctttcagccacagactga

SEQ ID NO: 133045 - DNA, 393 bp, Homo sapiens
  misc_feature (1)...(393): n = a,t,c or g
cttaacttgccagcccgggtgataaagcttgttccctttaaacggcccccccnnnnnnnnnnnnnnnnnncaacacaaatccaggaggaagtgcatgccgatacatgcaaatatccccccctccagggcatacccaaaaccagccatacttgttgttttcaatagcttccaggaaatgcttgcaccccgtgcttcttgttcactacttcttccagctttttctcatcccaattatccatagtatctttttcaagttcttcatctcttgcatcaatgtaaacacttcgcttttcacattttctctccagagtcaagtcatgggagaacttccacttatctcctttagtacactgtccttgctagaagaaagcacatactacagacttgggatct

SEQ ID NO: 133046 - DNA, 376 bp, Homo sapiens
ttttggattttaatgtatgatggtctttattttctaactttattggcaaaaaagaaaagggaaacttttaaacaatttaacacagggcattgtagctgatcctgtcagataaaagaagttccattttaaatgtccatctaattgtccaaagatacacaatactgaatctgcatacgcagtttcctttatgaagtacagtgctcatgttttaggcagtctttatgagatgtagccaaagtcagaagagaagatgtagggacaagatgccttttttgcaggaggttaactcctccagaatcagcataggaaataaacatcctgttgattcatctttatctgaagtatatgtgctgaatctttcaagaacttggcttta

SEQ ID NO: 133047 - DNA, 1425 bp, Homo sapiens
tcatagctgcagcataataggtgtatcataaaacaaaggtggtgtgaagtgttgaaagctgtagttttcagttgtacttgacggtggtcctctggcagcatctgggttctgctttttcttagtcttatatatgtgaattctgctagtgtgccatttgaagggttccactgctctttcctcttctgtacctgttctgctgccacctctatggaccttcactgtggaaaaatcaacatgcaggttttgggaactagcagtggtccccaacctttccttccctggacatagagggggatgctttcgggatgaaactgtccaactcggatcaccaggtattaggttctcataagaagcatgtaacctagatcccttgcatgcacacttcacagcagggttcacacaatagggtttgctcctatgagaatctaatgccaccactgatgaagacgcgctgggcacgaagaaatccacgcgaagccgaagtaacttccctcggggccagagtactcggcaggactgtccacgtctaggttgaaggcgcggcacagaggtagcaggagtcccgagagaagaagcgggaggccgcggggaccgaggcgcagccgtgccgcggcggaaaagccatcgccgaagtgcgcgcgggacgccaagccgggagcggtagccacctcccccgccccagcgaggcgcccagtgcccggcccgcgcctgcgcgcgcccaaacttgccggccgctctcttctcggctagcccgggacagctccggggcaggcaagagggctgagcttcggagcgaccgccagggacgacggcggagagcgcgcggggcggggacagcagcgcagacggtcctttgcttaccactgctcccgtccacgcagcgtcattgaaaccatcctggtccagatctcccaaaggagctatggcactgccaaaccgtgcaaagacctcaaatccattcagctttgtcgtctggaagtctcctgaagctctctgtagagacactgagacctgccccacctcttggagtttgccatcagagccacgatccatgaagagaggtgctccaataaacacatctgcataatcatctccattaatgtcagtggcagctacagaaaaatccgaaatatgcagccatctacccaaatagctgtcatcaaaaatagcttgtgcagtccgagttgctaattggttattatacttgatgctgtaaacattggggtcgtatttagatacgatttctgccacttgatccgaaataagctgaccttgccaataaaagctaccaggaccaccaagaagtactctgtcagcctttgcatttgattgttcttcccacaagataatctgcccaaatatctgctcatcctctcttgctttctccagtgtctctctcgaagaattttcctctctctcctgcat

SEQ ID NO: 133048 - DNA, 649 bp, Homo sapiens
atcagtggtggcattagattctcataggagcaaaccctattgtgtgaaccctgctgtgaagtgtgcatgcaagggatctaggttacatgcttcttatgagaacctaatacctggtgatccgagttggacagtttcatcccgaaagcatccccctctatgtccagggaaggaaagccggatgtttcttctcgtgggagctcccaaagcaaacaccacccagcctgggattgtggaaggagggcaggtcctcaaatgtgactggtcttctacccgccggtgccagccaattgaatttgatgcaacagaattacacagagagctgaaagaaaatcagaatcattcctattctctgaagtcgtctgcttcatttaatgtcatagagtttccttataagaatcttccaattgaggatatcaccaactccacattggttaccactaatgtcacctggggcattcagccagcgcccatgcctgtgcctgtgtgggtgatcattttagcagttctagcaggattgttgctactggctgttttggtatttgtaatgtacaggatgggcttttttaaacgggtccggccacctcaagaagaacaagaaagggagcagcttcaacctcatgaaaatggtgaaggaaactcagaaacttaa

SEQ ID NO: 133049 - DNA, 5717 bp, Homo sapiens
ggctaccgctcccggcttggcgtcccgcgcgcacttcggcgatggcttttccgccgcggcgacggctgcgcctcggtccccgcggcctcccgcttcttctctcgggactcctgctacctctgtgccgcgccttcaacctagacgtggacagtcctgccgagtactctggccccgagggaagttacttcggcttcgccgtggatttcttcgtgcccagcgcgtcttcccggatgtttcttctcgtgggagctcccaaagcaaacaccacccagcctgggattgtggaaggagggcaggtcctcaaatgtgactggtcttctacccgccggtgccagccaattgaatttgatgcaacaggcaatagagattatgccaaggatgatccattggaatttaagtcccatcagtggtttggagcatctgtgaggtcgaaacaggataaaattttggcctgtgccccattgtaccattggagaactgagatgaaacaggagcgagagcctgttggaacatgctttcttcaagatggaacaaagactgttgagtatgctccatgtagatcacaagatattgatgctgatggacagggattttgtcaaggaggattcagcattgattttactaaagctgacagagtacttcttggtggtcctggtagcttttattggcaaggtcagcttatttcggatcaagtggcagaaatcgtatctaaatacgaccccaatgtttacagcatcaagtataataaccaattagcaactcggactgcacaagctatttttgatgacagctatttgggttattctgtggctgtcggagatttcaatggtgatggcatagatgactttgtttcaggagttccaagagcagcaaggactttgggaatggtttatatttatgatgggaagaacatgtcctccttatacaattttactggcgagcagatggctgcatatttcggattttctgtagctgccactgacattaatggagatgattatgcagatgtgtttattggagcacctctcttcatggatcgtggctctgatggcaaactccaagaggtggggcaggtctcagtgtctctacagagagcttcaggagacttccagacgacaaagctgaatggatttgaggtctttgcacggtttggcagtgccatagctcctttgggagatctggaccaggatggtttcaatgatattgcaattgctgctccatatgggggtgaagataaaaaaggaattgtttatatcttcaatggaagatcaacaggcttgaacgcagtcccatctcaaatccttgaagggcagtgggctgctcgaagcatgccaccaagctttggctattcaatgaaaggagccacagatatagacaaaaatggatatccagacttaattgtaggagcttttggtgtagatcgagctatcttatacagggccagaccagttatcactgtaaatgctggtcttgaagtgtaccctagcattttaaatcaagacaataaaacctgctcactgcctggaacagctctcaaagtttcctgttttaatgttaggttctgcttaaaggcagatggcaaaggagtacttcccaggaaacttaatttccaggtggaacttcttttggataaactcaagcaaaagggagcaattcgacgagcactgtttctctacagcaggtccccaagtcactccaagaacatgactatttcaagggggggactgatgcagtgtgaggaattgatagcgtatctgcgggatgaatctgaatttagagacaaactcactccaattactatttttatggaatatcggttggattatagaacagctgctgatacaacaggcttgcaacccattcttaaccagttcacgcctgctaacattagtcgacaggctcacattctacttgactgtggtgaagacaatgtctgtaaacccaagctggaagtttctgtagatagtgatcaaaagaagatctatattggggatgacaaccctctgacattgattgttaaggctcagaatcaaggagaaggtgcctacgaagctgagctcatcgtttccattccactgcaggctgatttcatcggggttgtccgaaacaatgaagccttagcaagactttcctgtgcatttaagacagaaaaccaaactcgccaggtggtatgtgaccttggaaacccaatgaaggctggaactcaactcttagctggtcttcgtttcagtgtgcaccagcagtcagagatggatacttctgtgaaatttgacttacaaatccaaagctcaaatctatttgacaaagtaagcccagttgtatctcacaaagttgatcttgctgttttagctgcagttgagataagaggagtctcgagtcctgatcatatctttcttccgattccaaactgggagcacaaggagaaccctgagactgaagaagatgttgggccagttgttcagcacatctatgagctgagaaacaatggtccaagttcattcagcaaggcaatgctccatcttcagtggccttacaaatataataataacactctgttgtatatccttcattatgatattgatggaccaatgaactgcacttcagatatggagatcaaccctttgagaattaagatctcatctttgcaaacaactgaaaagaatgacacggttgccgggcaaggtgagcgggaccatctcatcactaagcgggatcttgccctcagtgaaggagatattcacactttgggttgtggagttgctcagtgcttgaagattgtctgccaagttgggagattagacagaggaaagagtgcaatcttgtacgtaaagtcattactgtggactgagacttttatgaataaagaaaatcagaatcattcctattctctgaagtcgtctgcttcatttaatgtcatagagtttccttataagaatcttccaattgaggatatcaccaactccacattggttaccactaatgtcacctggggcattcagccagcgcccatgcctgtgcctgtgtgggtgatcattttagcagttctagcaggattgttgctactggctgttttggtatttgtaatgtacaggatgggcttttttaaacgggtccggccacctcaagaagaacaagaaagggagcagcttcaacctcatgaaaatggtgaaggaaactcagaaacttaactgcagtttttaagttatgctacatcttgacccactagaattagcaactttattatagatttaaactttcttcatgaggagtaaaaatccaaggctttactgctgatagtgctaattggcattaaccacaaaatgagaattatatttgtcaaccttctccttataaataagttcagacatacatttaataacatagggtgacttgtgtttttaggtatttaaataataaaatttcaagggatagtttttattcaatgtatataagacaggtagtgcctgatttactactttatataaaatagtacctccttcagttactgtttctgatttaatgtacggaactttatttgttgttgttgttgttgttgttgttgttgttttaaagcagtccaaatttggaccttagcaatcatgtcttttgtataggtacttaatgttaatacatattacactacagtttacttttcagaatactaaagactttataactgcatgaacttggatttttttaatcactcatatggtagaattttataaacacatacatgataccatccaaattcttgcttttaataacaaaggtacaatattttgttttagtatgaaaatctggtagatcctattacacttctgtttatattaaatccacaatattttattacatttttaacttgtataaattttaggtcaaatccttcaagccaacctatactaaaaattagttccataatcacaaatggctcttttgtgtaattgtttaatttcacctgaatatcataatgcttaaagccatatggagttggaaattatttccaaagcatatttattccattgttttagtctggctatttacagtataaaaaaagcattttattaaaatactgtgtagttctttgagatagttgcttatgcatatagtaagtattacattcttagagtagagcagagtttttagttagtattaatttattttcctccattcatgtacttttccttatatttccaaaactgttactgagaatgggtcaagatcagtgagaaatctttacagttgacaggaacctggaccccttaccccaactttatgagtaatgcttggaataaaaaactcttaaggcaactcactgatttacttctagcaatagcatgatgttacaggaatattacctctgtttaagcaaggtaatgtgtaaaatcagtctcggctgtcagaataacttctaaaaggtatttttataagcagttcaagttactgaaaaccttttaaacctttctgaagttcgttagtataaattacttttctaggattattaataaaagccacataggtggcaagttgtagttttatatggctctgtagagtggtgaaccttctagaggaatatatgatttattcacagttcctcaaggcctggggatgatgatcagttatacctatttttgtgcaattacatcatgttgtacattagaaatggagagtttaatagctctttaactgctgtcctcattaggtaatgataaatatttcccttaaataattgactattttgctgtgttttaaaaatgattgaaatttatcttgccatatctcataatttcatgcacaagttgactgagctaatcttgagaatatattcgtaaaataggagcacatttagttgaggtatacaaggtaggactctagacaaaaccttctattttagctttagtgaatttcaaaagtaatgggtcttggagtatagatttttattagtagcttgaaagagcttaatcatatgcagtaagtatttttattaccaataaatttaaaattttttaagaaaaatatttttatcctagggccaagtgttgcctgccaccaatcagtaagttagtctataacaaattttaccctaacagttttaccacctagcaacagtcatttctgaaaatatgttggatagaaagtcactctttggcaaaagtgttagaatttgcttttgtgccatctattccttttatggcatctatcttgaaagtaatcttgtattggagattgaaagatgctgtaatttagaaattaacatgatatcttaaattacctttatgaaatatagttttgtataatagcatagattttccttcaaaaaatgaacatttatatatctacaaaaatatggagaagagcaatttgaaagcctactttctgaagaaaatggtgggatttttttttatcatgattaaatatcaaaaaattgccctatgaaaactttaaatctctaaaacatttgaaatactaccatatttgtgatttattgagaataaaaatccattttgaaatgtaaaatttttatgatctgattcagttttaagaaaacatgaatgaactagaagatattaaaaacatttgacattggtaagaaatattgatactgatattgatttttatataggtatttatttcagaattgatattttgagaaaaatacatgtgagtcattttttctgtttctcttttctcttaacgattatcactgtaattctgaatct

SEQ ID NO: 133050 - DNA, 423 bp, Homo sapiens
cgtatgatttagaatttagaacaaatgaaaactgtatagattcccctttaagggaatttgccccattgttctacatattttaagataaacttcctgttgcaattcctgccacagaatagaggcctagacagagcacccttatgtgcagaaatgaatagaatgtacttgtgtaatataacgtacttgtgtgtatacttgttccatatactcaggcatttaccttggaaatggcctacactgagccaccgcttgtgaataatattgtctctataggtgtgcaagcatttcctggaagctattgaaaacaacaagtatggctggttttgggtatgccctggagggggtgatatttgcatgtatcgtcatgcacttcctcctggatttgtgttcaacaaagataaaaagaaagaagagaaaaaagat

SEQ ID NO: 133051 - DNA, 3416 bp, Homo sapiens
ttatgcagatgtgtttattggagcacctctcttcatggatcgtggctctgatggcaaactccaagaggtggggcaggtctcagtgtctctacagagagcttcaggagacttccagacgacaaagctgaatggatttgaggtctttgcacggtttggcagtgccatagctcctttgggagatctggaccaggatggtttcaatgacgctgcgtggagcggcggacgagtggaagcaaaggaccgtctgcgctgctgtccccgccccgcgcgctctgcgccctcgtccctggcggtcgctccgaagctcagccctcttgcctgccccggagctgtcccgggctagccgagaagagagcggccggcaagtttgggcgcgcgcagcggcgggcgcggcaactgggcgcctcgctggggcgcggggaggtggctaccgctcccggcttggcgtcccgcgcgcacttcggcgatggcttttccgccgcggcgacggctgcgcctcggtccccgcggcctcccgcttcttctctcgggactcctgctacctctgtgccgcgccttcaacctagacgtggacagtcctgccgagtactctggccccgagggaagttacttcggcttcgccgtggatttcttcgtgcccagcgcgtcttcatcagtggtggcattagattctcataggagcaaaccctattgtgtgaaccctgctgtgaagtgtgcatgcaagggatctaggttacatgcttcttatgagaacctaatacctggtgatccgagttggacagtttcatcccgaaagcatccccctctatgtccagggaaggaaagccggatgtttcttctcgtgggagctcccaaagcaaacaccacccagcctgggattgtggaaggagggcaggtcctcaaatgtgactggtcttctacccgccggtgccagccaattgaatttgatgcaacagggcctatcggatgcgcgacatcacgagtgacgcgtagtcattttcccacgtcccgtccctgccccctcctagtgggacgcagtgggcgcgcacgcgcagctccgcttccgggagccgctcctcgctacccactatgctctgcgacatcgacctgtcgcaaaggccgcgtttgcggggccaatgagcgactcgctttccgtgcgggccagaacccctgacggtattcagctgcgcgtaagtctggccggtgccatctgtctccgcaatgccccccaagaaacaggctcaggccgggggcagcaaaaaggcggagcaaaaaaagaaggagaagattatcgaacccctgatgacgctagctctctcattactatagtgacgctgctggcgcccccgcacgctgggctttgcctctccgcccacacgcccgtgttcacccacccatgcacccgggtgcgaaatgacccctcgggactggcacagggttttatccttcgctagtcctctcagaattgaggagattttccaaggttatgacaaaactttcggtttgaagaataagaaaggagcaaagcaacagaagtttatcaaggctgtcacacatcaagttaaatttggtcaacaaaatccacgtcaggtagcacagagtgaagctggaaaaggaaattgaagaaggatgacaagaagaaagaattgcaggagctaaatgagctgttcaaacctgtagttgctgctcaaaaaattaagttaaaggtgcagatcccaagtctgtagtattgtgcattcttcaagcaagggcagtgtactaaaggagataagtgtaagttctcccatgacttgactctgggagagaaaatgtgaaaagcgaagtgtttacattgatgcaagagatgaagaacttgaaaaagagacaaagtcttcccttatccaggctgatactatggataattgggatgagaaaaagctggaagaagtagtgaacaagaagcacggtgaggcggaaaagaaaaaaccaaaaactcaaatagtgtgcaagcatttcctggaagctattgaaaacaacaagtatggctggttttgggtatgccctggagggggtgatatttgcatgtatcgtcatgcacttcctcctggatttgtgttgaaaaaagataaaaagaaagaagagaaagaagatgaaatttcattagaagatctaattgagagagagcgttctgccctaggtccaaatgttaccaaaatcactctagaatcttttcttgcctggaagaaaaggaaaagacaagtataagattgttaaacttgaacaagatatggaaagagaggaaagctgacttcaaagcagggaaagcacttagtgatccagtgggcgtgaagtgtttgaatttcgtcctgaactggtcaatggatgatgatgaggaagcagatgataccccgctacaccccagggaacaggtggtgattgaggttgatgattcagtgagtgtaaattgacatagattttaagcctggtacatccccaagagatgtagatggaaacaggtattactgtagccagtcttggaaagattcagcacatatacttcagattaaagatgaaaacaaattaagtgaagcttctgggaggtagggctgaaaatggtgaaagaagtgacttggaagaggacaacgagagggagggaacggaaaatgggagccattgatgctgttcctgttgatgaaaatcttttccctgggagaggatttgggatgaactagaagaagaatataaatgcacttgatttagaagaatgacaccaaacacatcgctgaaaaaattaagtcagctcagcacgagttgaaattgactacattaatttctttccacctagaatcaacaggatgtttatttcctatgctgattctggaggagttaacctcctgcaaaaaaggcatcttgtccctacatcttctcttctgactttggctacatctcatagtaagttcagagtagttcatgataaattgaaaatataatggtccattgccagaaaatggattggatgttgtaactgtccacccaagtaagaaggtgtatctgcctttccatcttttggttttcatttgggccatgtgcttattacccagaaaccaacaaaccttatatttaaaaataccccttcatttggacacagtttttaaatgagtgatttaatttccctctgtatttgtatgtttagaagactgcctaaaacatgagcactgtactttataaaaggaaactgcgtatgcagattccagtattgtgtatctttgggacaattagatgggcatttaaaatggaacttcttttatctgacaggatcagctacaatgcccggtgttaaattgtttaaaagtttcccttttcttttttgccaataaagttgtaaataaagaccatcatacattaaaatccaaaaaaaaaaacaaagggcggccgct

SEQ ID NO: 133052 - DNA, 484 bp, Homo sapiens
agcagctgccatggatggattttgggggaacatggcgactcaagtgtggctgtgtggagtggtgtgaatgtggcaggtgtttctctccaggaattgaatccagaaatgggaactgccaatgatagtgaaaattggaaggaagtgcataagatggtggttgaaagtgcctatgaagtcatcaagctaaaaggatataccaactgggctattggattaaccagcgttatcaaccagaagctaaaggatgatgaggttgctcagctcaagaaaagtgcagataccctgtgggacataggctgtagaaatttaaaaactacaatgtgattaactcgagcctttagttttcatccatgtacatggatcacagtttgctttgatcttcttcaatatgtgaatttgggctcacagaatcaaagcctatgcttggtttaatgcttgcaatctgagctcttgaacaaataaaattaactattgtagtgtgaaa

SEQ ID NO: 133053 - DNA, 825 bp, Homo sapiens
atgggaaaagctaaggaagaggtgtttctagcagacgagctagtgcatgcaaagaccaatagaaataaagaatgtgattattctgtgaccgccaattctaagattgtagtggtaactgcaggagtccgtcagcaagaaggggagagtcggctcaatctggtgcagagaaatgttaatgtcttcaaattcattattcctcagatcgtcaagtacagtcctgattgcatcataattgtggtttccaacccagtggacattcttacgtatgttacctggaaactaagtggattacccaaacaccgcgtgattggaagtggatgtaatctggattctgctagatttcgctaccttatggctgaaaaacttggcattcatcccagcagctgccatggatggattttgggggaacatggcgactcaagtgaccaccctggccggccacgtccccatcctgtgcctataaaaccccctgagaccctaccaggcagagacacaagcagctggacgtcaagaggagcacactggcggaggaacacacaagcagctggacgtcgagagcacatcgacaggcaccagcaggccatcgacaggtggaacaacgtggggtttggacggggtggtcagaggagagcccggctgctgagtgacctgactccaacaggaaaaccatcttcctactctgtctcccttctggctcccccatctgctgagagctacttccactcaataaaaccttgcattcattctccaagcccacgtgagatccaattcttcgggtacaccaaggcaagaaaccccagggtacagaaagccttctgtccttga

SEQ ID NO: 133054 - DNA, 1339 bp, Homo sapiens
atggagaaacctaagaggctgcggtggttgtggggccccgccccctcctccctccttgcagagccggcgccggaggagacgcacgcagctgactttgtcttctccgcacgactgttacagaggtctccagagccttctctctcctgggggggccgtgccctggcggaggagcagaaggcagagggtagcagctgcggctcagcggagagacttgttgcatttgcagctaaaaccaggccctacttgtccttgtgcaaaatggcaactcttaaggaaaaactcattgcaccagttgcggaagaagaggcaacagttccaaacaataagatcactgtagtgggtgttggacaagttggtatggcgtgtgctatcagcattctgggaaagagcagagcaatggagcacacaactgcaggggcaccatacacaccaaggcagcagacctgccagtgcaacatgatgtctctggctgatgaacttgctcttgtggatgttttggaagataagcttaaaggagaaatgatggatctgcagcatgggagcttatttcttcagacacctaaaattgtggcagataaagattattctgtgactgccaattctaagattgtagtggtaactgcaggagtccgtcagcaagaaggggagagtcggctcaatctggtgcagagaaatgttaatgtcttcaaattcattattcctcagatcgtcaagtacagtcctgattgcatcataattgtggtttccaacccaagggacatttttaacgtatggtacctggaaactaagtggattacccaaacaccgcgtgattggaagtggatgtaatctggattctgctagatttcgctaccttatggctgaaaaacttggcattcatcccagcagctgccatggatggattttgggggaacatggcgactcaagtgtggctgtgtggagtggtgtgaatgtggcaggtgtttctctccaggaattgaatccagaaatgggaactgacaatgatagtgaaaattggaaggaagtgcataagatggtggttgaaagtgcctatgaagtcatcaagctaaaaggatataccaactgggctattggattaagtgtggctgatcttattgaatccatgttgaaaaatctatccaggattcatcccgtgtcaacaatggtaaaggggatgtatggcattgagaatgaagtcttcctgagccttccatgtatcctcaatgcccggggattaaccagcgttatcaaccagaagctaaaggatgatgaggttgctcagctcaagaaaagtgcagataccctgtgggacatccagaaggacctaaaagacctgtga

SEQ ID NO: 133055 - DNA, 1430 bp, Homo sapiens
  misc_feature (1)...(1430): n = a,t,c or g
tttttttttttttttttttcacactacaatagttaattttatttgttccaagaagctcaagattccaagcattaaaccaagcataggcttttgaattctgtgagcccaaattcacaatatttgaagaagatcaaagcaaacttgtgatccatgtaccatggatcgaaaactaaaggctcgagttaatcacattgtagtttttaaatttctacagcctagagctcactagtcacaggtcttttaaggtccttctggatgtccccacagggtatctgcacttttcttgaagctgagcaacctcatcatcctttaagcttctgggttgataacgctggttaatccccggggcatttgaggatacatggaaaggctccagggaagacttcattctccaatggccatacatccccctttaaccattggttgacacgggatggaatcctgggataggatttttcaacatggaattcaataagattcagccacacttaaatccaaatagccccagttggggatatccttttagcttggatgacttcataggcacatttcaaccaccatccttatgcacttccttcccatttttcactatcattgtcagttcccatttctgggattcaattcctggagagaaacacctgccacattcacaccattccaacaccaagccacacttgagtcgccatgttccccccaaaattccatccatgggcagctgcttgggatgaatgccaagttttttcagccataaggtagcgaaatctagcaggaatccagattacatccacttccaatcacgcggtgtttgggtaatcccactttagtttcccagggtaacatacggtaagaatgtcccactgggggttgaaacccacaattatgatgcaatccaggactgtacttggacgatcttgaggaataatgaatttgaagacattaaccatttctctgcacccagattggagccgactctccctttcgtggctgacgggactccctgcagttacccactacaatctttagaattggcggtccacagaaataatctttatcctgcccacaattttagggtgtctgaagaaataagctcccatgctgcagatccatcatttctcctttaagcttatcttccaaaacatccacaagagcaaagttcatcaggccaggagactttcccaggaatgctgatagcacactgccataccaacttgtccaacacccactacaggtgatcttattgtttggaactgttgcctcttcttccgcaactggtgcaatgagtttttccttaagagttgccattttgcacaggagagagaaggctctggagacctctgtaacagtcgtgcggagaagacaaagtcaggctgcgtgcgtctcctcgtgccgaattcaacgccgtacgatttncaattncnnnccggcccgcg

SEQ ID NO: 133056 - DNA, 1062 bp, Homo sapiens
atgagtggcagcttcctgatgttcttgcctaaagcagatatgccagctcccatgcttgtacagccagcagaacgatttgactcatgggtctgggcggggcctgagcagctgcattctaaccagctgccgggtgatgccgatgctctgctcctcggccgcaatttgacaaaagggacacggcgcctctgtacagaagaacaggtcaaaattccccagccagagccaggtcccccgcagaagctgtgtgtcctgtctgcagcgggaggccaggcctgcctggtgctcacattccccaggtggactgtctgggaagaaccgccaccccctgggcttgtgggagtgaaggcctgtgcaaggtggtgggggaagggcgagccggacagaaaagccccagcccccccacccccgcccccgggaactgagaaagtggatcagacatcagaggcaaagaggaaccctcattcagagaccacctgcaccagcgcttccgggctgggtcagaaaaacaggtcgtcctcgccgcccgcgccgggcgcctgcagcaggttcctcttctgggagccagcacgcagccagagctccagggaggggggtgcacccggggttagtccaggtcttggggaagatgttgagaagatggtatgtcgctgtcttacctggctgagtagccacaagcaacaagccaaagggcaccctgaggggagaacactgtggctctcagtggccgcctcgggagaaacagcagcagctacacctgcaggcctgcaggggagaggaactttcacccacgtgggggcccctcctccactgcagctcttcatcttagaaagatgccagggaccccccaatgtgagggccgcagagctgtgcccagggctttacccgaaacctgaatgcttcagggaccaggcacaaccaggtgaacgctccagggcctctcgccttctcacccccatcaagccccacaggtcctcagaaggtcaaaagcctcggaaacagttcagccagaacaattttgccacccaaatggtgactcaaggagggaggcagaagaatgcgtaa

SEQ ID NO: 133057 - DNA, 212 bp, Homo sapiens
gtgtgactgcacagaaaagttacaaaacaaatttgactttttgcgctcacagttgaatgatatttcgtcatttaagaatatctacagatatgcctttgattttgcaaggcaatcaaagtatcgtgttatgaacaaagatcaatggtacaatgtattagaattcagcagaacagtccatgctgatcttagtaactatgatgaagatggtgctt

SEQ ID NO: 133058 - DNA, 425 bp, Homo sapiens
cccacgcgtccggcagcagtagcggaagacggaggcctcaaaaagtgtaaaatctccagctattgcagatcccaaccccctgctagactaataagtggagaggaacatttttcaagcaagaagtgcctggcttggttttatgaatatgcaggtcctgatgaagttgtagggccagaaggaatggaaaaattttgtgaagacattggtgttgaacctgaaaatgtgtgactgcacagaaaagttacaaaacaaatttgactttttgcgctcacagttgaatgatatttcgtcatttaagaatatctacagatatgcctttgattttgcaagggataaagatcagagaagccttgatattgatactgctaaatctatgttagctcttctgcttgggaggacatggccactgttttcagtattttacc

SEQ ID NO: 133059 - DNA, 1333 bp, Homo sapiens
  misc_feature (1)...(1333): n = a,t,c or g
ctcttgcttgctgtgactggtggagctgccgcgctgtccgcgttatctcctcccggtgagaacgaaccgcagtgtccaccggcgaggagccagccctgtcccggtcagagaaagacgacgaggatacctgggagcgggcggcggccgggctgggccgcgccggtgcgggctggcgactctgctcctccgcttgctgcatgtctctgggaactgggtgccagcgcctgaggggcttccaagcggacagggacccccttccccggcttccctgcccaccctgcccgggaaggccggaagatgccggtgaagaagaagagaaaatcccctggggtggcagcagcagtagcggaagacggaggcctcaaaaagtgtaaaatctccagctattgcagatcccaaccccctgctagactaataagtggagaggaacatttttcaagcaagaagtgcctggcttggttttatgaatatgcaggtcctgatgaagttgtagggccagaaggaatggaaaaattttgtgaagacattggtgttgaacctgaaaatattattatgttagttttagcgtggaaattggaggctgaaagcatgggattttttaccaaggaagaatgggtaaaggggaatgacttcattacagtgtganctgcacagaaaagggtacaaaccaaattttgacttttttgccgctcacagttgaattgatatttcgtcatttaagaatatctacagatatgcctttgattttgcaagggataaagatcagagaaagccttgataatgatactgctaaatcttatgttagctcttctgcttggggagggacatggcccactgttttcaagtattttaccaggtacctggggggcaatcaaagtatcgtgttatgaacaaagactcaatggtacaatgtatcagaattcagcagaacagtcccatgctgatcttagtaactatgatgaagatgggtgcttggcctgttcttcttgatgaatttgttgagtggcaaaaagtccgtcagacatcatagcaagaactatgtggaagaaaatgccaacctttccagttcccacgtgtatacaagcttaatgtgatgagggggaaaaaaatccaacgggtgcattttcattcagtatgaaagacttctcatagtacttttttttcctttttttaaaggaggtttttcttggtacatgtgatgggcattgagccacacgtcttcttagactgaatattgaaggtttttgttttgagttatgtttataacaacatttattttcagaacaataaagattcagatttgtgacaaaggccttaaagtgaaaaaaaaaaa

SEQ ID NO: 133060 - DNA, 479 bp, Homo sapiens
gcggccgcgccggctccagggccatgaagcccccaggaggagaatcgagcaatctttttggaagtccagaagaagctactccttccagcaggcctaataggatggcatctaatatttttggaccaacagaagaacctcagaacatacccaagaggacaaatcccccagggggtaaaggaagtggtatctttgacgaatcaacccccgtgcagactcgacagcacctgaacccacctggagggaagaccagcgacatttttgggtctccggtcactgccacttcacgcttggcacacccaaacaaacccaaggatcatgttttcatttccttttgcccaaatgagcggggtgggaagagggttagtcttatgtgagcctggctgctcagcgtctcctggccgtcatgacagctgcttggagacccgtgccttccagatggctgggagatgcctctgtggggatgaaatggggcacccctg

SEQ ID NO: 133061 - DNA, 1500 bp, Homo sapiens
gcggccgcgccggctccaggaaatggttactgctgacaggaagtttggcatccacctcccccagcctcctgagtggacaggggccctgggcaccacttcagagggccatgaagcccccaggaggagaatcgagcaatctttttgtgatttccagaagaagctactccttctagcaggcctaataggatgtcatctaatatttttggaccaacagaagaacctcagaacatactcaagaggacaaatcccccaggggtataaggaagtggtatctttgacgaatcaacccccgtgcagactcgacagcacctgaacccacctgggagggaagaccagcgacatttttgggtctccggtcactgccacttcacgcttggcacacccaaacaaacccaaggatcatgtttttcttatgtgaaggagaagaaccaaaatccggatcttaaagctgcaagggagcatcccggctgggagcagagccaggtgagaaaggcagcgccagataaagcaggccccgccaaggagcaggagcccatgcccacagtcgacagccatgagccccggctggggccgcggcctcgctctcacaacaaggtcctgaacccaccgggaggcaaatccagcatctccttctactaagagaagccactgctccacccggagccagaccacaaactcaagagatagggtatccatgttgtcatttccttttgcccaaatgaagcggggtgggaagagggttagtcttatgtgagcctggctgctcagcgtctcctggccgtcatgacagctgcttggagacccgtgccttccagatggctgggagatgcctctgtggggatgaaatggggcacccctggccatcactcatgtgtagtccaggtttgagaggaacttggaaggggggtgagggtggggaggtggggcagggcatggtccttggatcaacagcccgccagctgattggatgtctaggaatgactgaaagaaaccaaaacagcctgtccacttgttgttgtgggatggaggaggcgtaagcagaaacactaacagtatattgaccttttagcagaaccgcttccattttggagatcacggctgctaaatccagcatccccacttcattttacccccagcatattgttttgtagtcttttcttgaaacattttgattgcttttcctcggcagctttcaaaaaaccaaataataatagttatccgttttttacttcatgggaaggattgttttgggtgccctggaccctctggaagtggcccagttcctggccatctggaaacctcgggcctggatcttgatctcatgttggggaatctggcctgtctttttcacacaggggctggtcttgggtcctttaacatgccagttttggcttgtggaattcttgctttttttcctctcatcagccttaagtttaggcgttttgttggtcttcaacgatgtagacagttccctttacaagtcacaggtttttcccatag

SEQ ID NO: 133062 - DNA, 687 bp, Homo sapiens
atgtctggtggctccatggattataacagagaacgtggcagcccagagggaatggaccctgatggtgccattgagagcaactgtaatgagatcgttgataactttgatgatatgaatttaaaggagtctcttctttggggcatctatgcttacgattttgagaagtcttctgctattcagcagagagctattattacctgtatgaaagggtatgatgtgattgctcaagctcagtcaggtactggcaagacagccacatttgctatttccatcctgcaacagttggagacccaagcactaatgctggcccccaccagagaactggctccacagatccaaaaggtaattctggcacttggagactatatgggagcaacttgtcatgcctgcattggtggaacaaatgttcaaactgaaatgcaaaaactgcaggctgaagcaccacatattgttgttggtacacttgggagagtgtttgatatgttaaacagaagatatctttttccaaaatggatcaaaatgcttgttttggatgaagcagatgaaatgttgagccatgggtttaaggatgaaatctatgagattttccaaaaactaaatacaagtattcaggttgtgttgctttctgccacaatgccaactgatgtgttggaagtgaccaaaaaattcatgagagatccaatttga

SEQ ID NO: 133063 - DNA, 262 bp, Homo sapiens
gcgggattgatgtgcaacaagtgtctttggttataaattatgatctacctaccaatcgtgaaaactatattcacaggtgagaagccagcatcttggctgtattgaaaaaaattcatacgtttttctactgtgatttgtatgaaaggtaacatcaaatcaaggaatagattcagtaaagtcagtagtgttcagtaagatgatgtaattaaatttgtactagggaaggttgatgagaacaaagtggggaaaacttgtaaacatt

SEQ ID NO: 133064 - DNA, 468 bp, Homo sapiens
gctcgtggccggaacccgtttcttgcggaggaattttctcgccgtgcttcgagcaactggaatgagattgttgataactttgatgatatgaatttaaaggagtctctccttcgtggcatctatgcttacggttttgagaagccttccgctattcagcagagagctattattccctgtattaaagccgagggccctgtggtgacagcccagtacgactgcctcggctgtgtgcatcctatatcaacgcagagcccagacctggagcccattctgagacgcggcattcagtactttaacagcaacactcaacattcctccctcttcatgcttaatgaagtaaaacgggcccaaagacagagaggaggggaaggaactggttacttcgtggacttctctgtgcggaactgccccagacaccatttccccagacaccccaatgtgaggataagaaatgtctgtgaacgttga

SEQ ID NO: 133065 - DNA, 384 bp, Homo sapiens
gtcgacgcggccgggcttaaaataaagttgtttcttaactatacctgtctgctattctcctgtaacagacagggacgcttggtctcatacatgttgattaaaattaaataccgacctgactggtgattcttgaattaaggcttattaatttgcagcatggtgacatggaccagaaggagagagatgttatcatgagggaattccggtcagggtcaagtcgtgttctgatcactactgacttgttggtaagtctcttaatgctttttaaaaatctaccaaaagttagctttttggggggcaggcttttaagtaacctttgccaacttgggctatatgcaagatgaaaagaccacactccacagtgggctataccacttagtatag

SEQ ID NO: 133066 - DNA, 3259 bp, Homo sapiens
  misc_feature (1)...(3259): n = a,t,c or g
ccagcccccaattgatatcgtcagcttctcggcccgcagtccggaattccaggcacgacgccacgcgtccggtggtttttcagatcatgtctggtggctccgcggattataacagcagagaacatggcggcccagagggaatggaccccgtatggtgtcatcgagagcaactggaatgagattgttgataactttgtgtgactatgaatttaaaggagtctctccttccgtggcatcctatgcttacggttttgagaagccttcccctattcagcagaaagctaattattccctgtattaaagggtattgatgtggattgctcaagctccagtcaggtactggcaagacagccacattttgctaatttccatcctgcaaccagttgggagattgagtttcaaggagacccaaagcactagttattgggcccccaccagagaactgggctcaacagatccaaaaggtaattctggcacttggagactatatgggagccacttgtcatgcctgcattgggtggaacaaatgttcgaaatgaaatgcaaaaactgcaggctgaagcaccacatattgttggttggtacacccgggagagtgtttgatatgttaaacagaagatacctttctccaaaatgggatcaaaatgtttgttttggatgaagcagatgaaatgttgagccgtggttttaaggatgcaaatctatgagattttccaaaaactaaacacaagtattcaggttgtgtttgcttctgccacaatgccaactgatgtgttggaagtgaccaaaaaattcatgagagatccaattcgaattctggtgaaaaaggaagaattgacccttgaaggaatcaaacagttttatattaatgttgagagagaggaatggaagttggatacactttgtgacttgtacgagacactgaccattacacaggctgttatttttctcaatacgaggcgcaaggtggactggctgactgagaagatgcatgccagagacttcacagtttctgctctgcatggtgacatggaccagaaggagagagatgttatcatgagggaattccggtcagggtcaagtcgtgttctgatcactactgacttgttggctcgcgggattgatgtgcaacaagtgtctttggttataaattatgatctacctaccaatcgtgaaaactatattcacagaattggcagagggggtcgatttgggaggaaaggtgtggctataaactttgttactgaagaagacaagagatttcttcgtgacattgagactttctaccaatactacagtggaggagatgcccatgaatgtggctgaccttatttaattcctggggatgagagttttggatgcagtgctcgcttgttgctgaataggcgatcacaacgtgcaattgtgcttctttctttgggaatatttgaaatcttgtctcaattgctcataaccggatcagaaaatacagattttgatagcaaagcgacgttagtccgtgagctcttggtgagggaaagtccattggcctttatccctctttaggagttagaactgttgggggtgggtataaaaagatggggtcctgtaaaaacccttccttcccatagaaatttaattcccctagttcctgtagaaaatggttgtaattagatgttcccctatcatttaataattataacttggtggacttaaaaggatcataagtggctgtatattattaaatgatagagaaccatctaataccaaccatttctacaggaactaggggaataaatttctaagaaagaaagatttttacagacccccatcttttaataccccacccccaacagtcctaactcctaaaagagggataaagcccaatgactttccctccacaagaagcctncaggactaacgtcgctttgcctatcaaaatctgtatttctggacccgttatgagcattgagacaagattcaaatattccccaaagaaagaagcacaatgcacgttgtgatcgcctattccagcaacagcggagcactgcatccaaaactctcatccccaggaattaaaataaggtcagcccacatttcatgggcattctcctccactgtagtattggtagaaaggtctcaatgtcacggaggaatcctcttgtcttcttcaagtaacaaaagtttatagccacaccttttcctcccaaattcgacccccctctgccaattctgtgaatataggttttcacggattggtaggtagatccataaatttataaccaaaggacacttgttgcacatcaatccccgcgagcccaacaagtcagtagtgatcagaacacggactttgacccttgaccggaattccctcatgataacatctcttctccttctggtcccatgtcaccatgctgcaaattaataaaccagagcagaaacttgtgaaagtcctctggcatgcatcttctcaggtcaggccaggtccaccttgcgcctcggtattgagaaaaataacagcctgtgtaatggtcaggtgtctcgtacaacgtcacaaaggtgtatccaacttccattcctctctctcaacattaatataaaactggtttgattccttcaagggtcaattcttccttttgtcaccagaattcgaaatgggatctctcatgaattttcgggtcacctgccaaacacatcagttggcattgtggcagaaagcaacacaacctgaatacttgtgtttagtttttggaaaatcttcatagatttgatccttaaaacccaggctcaacattttcatctgcttcatccaaaacaaacattttgatccattttggagaaagggaatcttctgtttaacatatcaaacactcctcccgggttgtacccaacaacaatatgtggtgcttcagcctgcagtttttgcatttcatttcgaacatttgttccaaccaatgcaggcatgacaagtggctcccatatagtctccaagtgccagaattaccttttggatctttaatacagggaataatagctctctgctgaatagcggaaggcttctcaaaaccgtaagaatagatgccacgaaggagagactcctttaaattcatatcatcaaagttatcaacaatctcattccagttgctctcgatgacaccatcggggtccaattccttctgggccgccatgttctctgctgttataattccgcggagccaccaaacatgatccgaaaaaccaccccacgcgtccgcggacgcgtgggcggacgcgtgggtcg

SEQ ID NO: 133067 - DNA, 820 bp, Homo sapiens
gggcggacaatgcaactaggctgtggttggggcatccattccttgcagtgatggtactcagcccttgtccctgagcttgctgcttccggcctaggtatgcggtgctttgtggtcagctggctgagcatgagagcatccagaggcgcatccagagtggctttagcttcaaggagcatgtggacaaagccattgctctccagccagaaaaccccatggctcactttcttcttggcaggtggtgctatcaggtctctcacctgagctggctagaaaaaaaaactgctacagccttgcttgaaagccctctcagtgccactgtggaagatgccctccagagcttcctaaaggctgaagaactacagccaggattttccaaagcaggaagggtatatatttccaagtgctacagagaactagggaaaaactctgaagctagatggtggatgaagttggccctggagctgccagatgtcacgaaggaggatttggctatccagaaggacctgggaagaacttggaagtcattttaccgagactaaccacgtttcactggccttcatgacttgatgccactatttaaggtgggggggcggggaggcttttttccttagacctttgcttgagattcaggaaaccacacaaatctgttctcctgggtctgactgctacccactaccactccccattagttaatttattctaacctctaacctaatctagaattggggcagtactcatggcttccgtttctgttgttctctcccttgagtaatctcttaaaaaaatcaagattcacacctgccccaggattacacatggg

SEQ ID NO: 133068 - DNA, 1531 bp, Homo sapiens
tttcgttgctgccatggtggctggcggccgggtaagggtctgagtggatctcctgccaggccaaagcgccttcgggggccgcgggggaaggccaagagtttgcagccagggcgccgggtttgtggtctgcagtgtcgtgaggctgatgtgcagcatgtctagactgggagccctgggtggtgcccgtgccgggctgggactgttgctgggtaccgccgacggccttggattcctgtgcctcctttacagccagcgatggaaacggacccagcgtcatgggcgcagccagagcctgcccaactccctggactatacgcagacttcagatcccggacgccacgtgatgctcctgcgggctgtcccaggtggggctggagatgcctcagtgctgcccagccttttcacggaaaggaaaggaaaagggggctggaccgcctgaattttgtgctgaccacccttgtggcgctgcggcgggaggtggaggagctgagaagcagcctgcgagggcttgcgggggagattgttggggaggtccgatgccacatggaagagaaccagagagtggctcggcggcgaacagtttccgtttgtccgggagaggagtgactccactggctccagctctgtctacttcacggcctcctcgggagccacgttcacagatgctgagagtgaagggggttacacaacagccaatgcggagtctgacaatgagcgggactctgacaaagaaagtgaggacggggaagatgaagtgagctgtgagactgtgaagatggggagaaaggattctcttgacttggaggaagaggcagcttcaggtgcctccaagtgccctggaggctggaggttcctcaggcttggaggatgtgctgcccctcctgcagcaggccgacgagctgcacaggggtgatgagcaaggcaagcgggagggcttccagctgctgctcaacaacaagcttggtgtatggaagccggcaggacttttctctggcgcctggcccgagcctacagtgacatgtgtgagctcactgaggaggtgagcgagaagaagtcatatgccctagatggaaaagaagaagcagaggctgctctggagaagggggatgaagagtgctgacttgtcacctgtggtatgccggtgctttgtggtcagctggctgagcaatgagagcatccagaaggcgcatccaagaattggctttaactttcaaggagcattgtggacaaaagccatttgctctccagccagaaaacccccatggctcactttcttcttggcaggtggtgctatcaggtctctcacctgagctggctagaaaaaaaaactgctacagccttgcttgaaagccctctcagtgccactgtggaagatgccctccagagcttcctaaagtgctacagagaactagggaaaaactctgaagctagatggtggatgaagttggccctggagctgccagatgtcacgaaggaggatttggctatccagaaggacctggaagaactggaagtcattttacgagactaa

SEQ ID NO: 133069 - DNA, 540 bp, Homo sapiens
ctaatgtccacaggagttgccagttaccacctcttggtgacaacctttaataatcctagaattggtgctgtcccagtcagaagtgtccaattttaaggcacagaaaggcgaactggcaaactcccagctctcctgacaccgaatctggtgcaactccgccgcctcctcttccccgggatccagactatctaggtcccagcccagggacgcggtcacctcctccaacgtccggcagccgctctccacgaactcgttcagctcctcctgcagccgccgccgctcctccacaggtggaggctcgccctccatagctgcagcccacccgccaagaggaagcggccgaactgcagaccgcacgcgcaggcctctgggagctgtgggcggggccacagtcgccacgtgacttgaacagccttgagtccataagaataacctgttccccaactccttgatacagtccttcactgaatctgttgttacattaggagttataagtgattccgcaatagtatcatgccttttatgtttattaactggcat

SEQ ID NO: 133070 - DNA, 1803 bp, Homo sapiens
cgaacggaaccacgggggcgacccacgcgtccggcagttcggccgcttcctcttgtcgggtgggcttgtgctatggagggcgagcctgcacctgtggaggagcggcggggggtgcaggaggagctgaacgatttcgtggagagcggctgccggacgttggaggaggtgaccgcgtccctgggctgggacctacatagtctggatcccggggaaaaggaggcggcggaggatgaagatgtgatttgtccatacgattccaatcatcacatgcctaaatcatttttggcaaagcacatggcatcttgtagattgaggaaaatgggctataccaaagaagaagaggatgaaatgtctaatcctgagtttttctatgaaaatgtgaagataccttcgattactttgaataaggactcacaattccagataattaaacaagctagaactgcagttgggaaagacagtgattgttataatcaaagaatttattcttcattgcctgttgaagttcctttgaatcacaaacggtttgtttgtgatctaactcaagctgatcgtcttgccctctatgatttcgtagttgaggagacaaagaaaaagcgctctgattctcaaattattgaaaatgacagcgatctctttgtagacttggctgccaaaatcaatcaagacaatagtcgaaaaagtccaaaatcctaccttgaaatcctggcagaagtacgagattataaaagaagacgccagtcctatagagccaagaatgttcacataaccaagaaatcatatactgaggtgattcgagatgtgataaatgtgcacatggaagaactcagcaatcattggcaagaagagcaagagaaggcagaggatgatgccgaaaagaatgaagaaaggcgatcagcttcagtagattcacggcagtctggtggaagctatttggatgctgagtgttcacgacatagaagggataggagtagaagcccacataaaagaaaaagaaacaaagataaggataaaaactgtgagtcgagaagaaggaaagagaggagccaggagcctgcacggtcctataataatgaagagagattaagcaacttgactgagctcacacagcactgggatgagacctcaggcagcctgactccagagcacccagcacctgctacggagcctagaacacagaaggcacccaggaaaaacgggttgaatgattccatgcaggaatctaggaggctgaacttcagctttagagtagaatgcccgtcagctcaatatcaaacacaaagggaaaataatgatgattttggggaggaagaagtggaactgtgggttatggtgcagacatgggaaagttcaagaacaacactacaaacaaccagtcctgaaaatagtacagaaacacatcaagaaatcctgatcacaaagattgatttcttaaagggatggaccccaagttcccgaagaacatgcacttcgcctagaagcacaacgagaagggcctggagaagatgcaggacaacaacatgcgagctgaggctatcaaggccccccaaagcctatggaagtccagcccagggttccaaagagcgccagccgcaagctcgatttgcctacactgcccaccccaaggctgggaagcatgctcgggcccacattgccacgggtctcaggctctgctggccaaaggccaaggccaaggatcaaaccaaggcccaggcctcggcttcagctgcagctccagcttcagttctagctcctgctcaggcttccaaaggtgcccaggcccccatgaaggctctggagtag

SEQ ID NO: 133071 - DNA, 1326 bp, Homo sapiens
atggctagctcgtgttccgtgcaggtgaagctggagctggggcaccgcgcccaggtgaggaaaaaacccaccgtggagggcttcacccacgactggatggtgttcgtacgcggtccggagcacagtaacatacagcactttgtggagaaagtcgtcttccacttgcacgaaagctttcctaggccaaaaagagtgtgcaaagatccaccttacaaagtagaagaatctgggtatgctggtttcattttgccaattgaagtttattttaaaaacaaggaagaacctaggaaagtccgctttgattatgacttattcctgcatcttgaaggccatccaccagtgaatcacctccgctgtgaaaagctaactttcaacaaccccacagaggactttaggagaaagttgctgaaggcaggaggggaccctaataggagtattcataccagcagcagcagcagcagcagcagtagcagcagcagcagcagcagcagcagcagcagtagcagcagcagcagcagcagcagcagcagcagtagcagcagcagtagcagcagcagcagcagcagtagtaccagtttttcaaagcctcacaaattaatgaaggagcacaaggaaaaaccttctaaagactccagagaacataaaagtgccttcaaagaaccttccagggatcacaacaaatcttccaaagaatcctctaagaaacccaaagaaaataaaccactgaaagaagagaaaatagttcctaagatggccttcaaggaacctaaacccatgtcaaaagagccaaaaccagatagtaacttactcaccatcaccagtggacaagataagaaggctcctagtaaaaggccgcccatttcagattctgaagaactctcagccaaaaaaaggaaaaagagtagctcagaggctttatttaaaagtttttctagcgcaccaccactgatactcacttgttctgctgacaaaaaacagataaaagataaatctcatgtcaagatgggaaaggtcaaaattgaaagtgagacatcagagaagaagaaatcaacgttaccgccatttgatgatattgtggatcccaatgattcagatgtggaggagaatatatcctctaaatctgattcggtccctggacaatcacctgttaccaatatattttttacatcttcttcaacgccaactattctcaaaagctaccaactggacaattctgatcaacagggagctcaggaggcctcggataagcaaattgaaggatatttttccggtgaagttcccgcttaccgacaaggtgagctgattcttgtggcaagccgccagtga

SEQ ID NO: 133072 - DNA, 1030 bp, Homo sapiens
tctgtggaggaattcatggtgagtcttactgttgcgggctccggggccgtcgaccatgccgctcgacctccacctccgctgggaagctgaggcgccgaacggctgccagagggtcccgggaagcgcatggtgttcaggcgcttcgtggaggttggccgggtggcctattgtctcctttggacctcatgcccgaaaaattgggtcgcgattgtagatgtattttgatcagaacaagggcttttggtcgaatgaccttgcactcaagtgaggaagacaggcccatgcctttccggtgcatgcagctcaactgatttcatccttcaaggttcccgaacagtgcccaaccagaaagtatgttccgacaggcctggcagaagggcagacattcaatacaaaatggggcagcccacacgatggggccaagaagattgaagcccagaggaaaggaaagcccaaagatgaccagatttttgatccgttttaaagttatggaaggccaaaagaaaatgagggaacaggaataatccaaggaatgaagttaaagaagcttcaaaagggcagctctcctggaaaagctttctcccaaaaaaaagcaccttggtacttaagggtactgctgcttgctgctgctgcttgctgctgctgctgctgctgctgctgctgctgctgcttgctgcttgcttgcttgctgcttaaaagttcccagcaaaaaaagatcacccgccgcgagtaaaaaagctccagcccagaaggttcctgcccagaaaagccacaggcccagaaagcagcgcctgctccaaaagctcagaagggtcaaaaagctccagcccagaaagcacctgctccaaaggcatctgggcaagaaagcataagtggcaatcataaaaagtaataaaggttctttttgacctgttgacaaatgtatttaagcctttggatttaaagcctgttgaggctagagttaggaggcagattgatagtaggattataataaacattaaataatcaaaaaaaaaaaaaaaaaaaagtc

SEQ ID NO: 133073 - DNA, 1539 bp, Homo sapiens
agtaaactgagttgatttgactttatctcagtactactcttgacctttcacaactttcgtaggttcacagtctctctttttctaggaacttggctgtgatgtcctgcctcaaagacaaattcatctattgtaggcctagcccctgcctttgaaaacaaagaaaggttggtactaacatcaacacagcatggaatttccaggggaggtctcatttcaaaacttcataaagaacaagaaccacctgggacttctgtgagggcgatgattaaactggcctgaagtttgaatgaagggataatgtatgctcaaccttgtgactaacaccaaggaggtcaaagtggcagaaggtctttgtatgagcgacagcccttttccctggataaactatggtgggaccggcgattcctgggaagaagctccggaaaaaacatccatgctccggaaaatacccaatatttggggctgtgggtaatttgagtccagtgttggtgatccagcagctgtgcagtgtttgtgtttttgtggttatccgggtggtatatggatgagggtcttctggccccccattggcttgtagggactggcctggcttcttcactgattgggtatgttttgtttgatctcattgatggaggtgaagggcggaagaagagtggggcagacccggtgggctgacctttaagagttgccctagtctttcattactttcacttatggggttttcaccagtgctgaagacccttacagagttctgttcagcactgacacccatctatgccatgtcagtcttcatgctgttaagacatctcatcttttttgactatgggtgccaatgctgccattgtaatccagcacacatccttgtgaacatggccatctttgcttctggtatgctgggcatcacgtcttcccccggtcccctgcatgccttcatcatggttgccatttgccattcaaattttttgccctggtggccccatgttggcagaagaaactaaaaggcatgtactcccccggagctaatgtgggggtcacactggctttttgcattttcagccgtggggaggcctactgtccattagtgctgtgggagcccgtactcttggccccttctgctgatgtctatctcatgtctgtgttccattctacctccatttcgcttgcagcctttttaaagaaaacattccatgggcccttgggatgaagcctgaaatccaaggaagacttgtccccaggttccctcagttaaattaggggcatcccattacattattaaagccaagcctgatagattagcctccctaactagttatagaacttaaagaccagagttccattttggaagcagcatgtcattgtggtaagagaataagggttcaaacccaaaaaaaatgaaccaaaggcttgggtggtgagggtgcttatcctttctgttattttgtagatgaaaaaaactttctggggacctcttgaattacatgcatatgtaacatatgaagtgatgtggtttctattaaaaaaataacacatccatcaaaa

SEQ ID NO: 133074 - DNA, 325 bp, Homo sapiens
gcctacttcggtatctatgacactgcaaagggaatgcttccggatcccaagaacactcacatcgtcatcagctggatgatcgcacagactgtcactgctgttgccgggttgacttcctatccatttgacaccgttcgccgccgcatgatgatgcagtcagggcgcaaaggaactgacatcatgtacacaggcacgcttgactgctggcggaagattgctcgtgatgaaggaggcaaagcttttttcaagggtgcatggtccaatgttctcagaggcatttccccctgtgaacaggcatgttgtattatataacatatcttgagca

SEQ ID NO: 133075 - DNA, 485 bp, Homo sapiens
cacatccctgtgttttgtgtaccctcttgattttgcccgtacccgtctagcagctgatgtgggtattatcatctaccgagccgcctacttcggtatctatgacactgcaaagggaatgcttccggatcccaagaacactcacatcgtcatcagctggatgatcgcacagactgtcactgctgttgccgggttgacttcctatccatttgacaccgttcgccgccgcatgatgatgcagtcagggcgcaaaggaactgacatcatgtacacaggcacgcttgactgctggcggaagattgctcgtgatgaaggaggcaaagcttttttcaagggtgcatggtccaatgttctcagaggcatgggtggtgcttttgtgcttgtcttgtatgatgaaatcaagaagtacacataagttatttcctaggatttttccccctgtgaacaggcatgttgtattatataacatatcttgagcattcttaaaa

SEQ ID NO: 133076 - DNA, 1580 bp, Homo sapiens
atgacctctggtcctcagaccaacaagcccaaggaacatctcaccgattttaaattggacttgagcgttggtggttcacatggcatcgcctggccttcccggcaaatgggctctccgttagcccgttacctccagtttagacggaaggagtcgggtttctgtgctgtgcctactgcagggaaggggctggaaatggattctctcatcggagttattgaggacctggaccgaggctcagcccccccaaccatttcccaaggccaaaaggtcccgctggcaaaagcgtttctgtcaatggcatgcagttacgggcttcgagatggggagtttactctggattttctgaatgggcccaatgtactcacagggttgagtgctcacaaggctcataagaaaaagagagaggcggaaggctcagagccagagagagagatgccgctgtgtccttgccaaggacttcctggcaggtggagtgaccgcggccatctccaagatggcggtggcacccacggaggggtcaagctgctgctgcaggtgcagagtgccagcaagcagatcaccgcagataagcaatacacgggcgttgtagactgcatggtccgcattcccaaggagcaggagtcctgtccctctggcacgaggatccagttttggcacaagtttgcagggagtctggcatcaggtggtgcccctggggccacatccctgtgttttgtgtaccctcttgagttttgcccgtacccgtctagcagctgatgtgggtaaagctggagctgaaagggaattccgaggcctcgggtgacctgctgggttaagaatctacaaatctgatgggaaataaggggcctgtaccaaggcttttaacgtgtctgtgcagggtattatcatctaccgagccgcctacttcggtatctatgaccactgccaaggggaatgcttccggatcccccagaacactcacatcgtcatcagctggatgatcgcacagactgtcactgctgttgcccgggttgacttccctatcccatttgacacccgttcgccgccggaatgaatgaatgcagtccagggcgccaaaggaactgaccatccatgtacaccaggcacgctttgactgctgggcggaaggattgcttcgtgatgaaggagggcaaagcttttttcaaggggtgcatgggtcccaatgtttctcagagggcatggggtgggtgctttttgtgctttgtctttgtatggatggaaatccaaggaaggtacacataaattaatttcctaggggatttttccccctgtggaacagggcatgtttgtatttatattaacatatctttggaggcattcttgacaagactcctgggctgttcagttttcttcagtgggcaactattttactgggttgaaaaatggggaaggcaataatatttcatctggaccagttctctctcctctaaagccattctccatgatgtatgatgataggactaaaattataatttttatatcagtaaaacactgataaataacaaatttggagaaataaaaatatctaaaataaaaaaaaaaaaaaaaaaaaacctcgt

SEQ ID NO: 133077 - DNA, 1213 bp, Homo sapiens
atggaaatgggaggctgtcaggagcccctggtgagttctaagcaggtgaatgttgtgattagacttgtgttcacagtctggtgcattgtggaggatggggcaagcaggagtacaggacatcgggagcacggtgcagcaggagcacagggcaatgggagcacaatgcagcaggagcacaaggtgatgggagcacggtgcagtaggagcacagagcagtgtgagcacagagcagtggctggtgccatgaaggaggaagagatcagagaatctatgcggagaaggtcttcttcttccagtgtggttgtagttggcattgctgcctctgggtaccaaagaatgaaaaccccattttcaactgagctatctttgctccagcctgatactccagactgtgctggagatagtcataccccactggctttttccttcaccgaggacttggaaagttcttgtttgctagaccgaaaggaagaaaaaggggattctgccaggaaatgggaatggcttcatgagtctaagaagaactatcagagtatggagaaacacaccaaactacctggggacaaatgctgtcagcccttaggcaagactaaattggaaagaaaggtgtctgccaaagaaaacaggcaggcccctgtcctccttcaaacatacagggaatcctggaatggagaaaacatagaatcagtgaaacaaagccgtagtccagtttctgtgttttcctgggacaatgaaaagaatgacaaggactcctggagtcaacttttcactgaagattctcaaggccagcgggtcattgccccccaccatagaggttccttttcaagatgtaaccaataactggaattgggacttagggccgtttcctaacagtccttgggctcagtgccaggaggatgggccaactcaaaatttgaagcctgatttgctttttacccaggactttgaaggtaatcaagttatcagacaccaattctaaatgtttgaagctttgtttctaaaagtaccttgaaatgatagagatgtaggaaaatatagttgtgggtggagagaggagtgagtttgtttaggtgggaaggtggcatgggatgaagttgtcattactgagcatcttctctgtgtaaataaagggcagtaccattgttaagacagtgattagcaaatctccccacaacccaggtgtggagagaagagaggtagaatggtgctagct

SEQ ID NO: 133078 - DNA, 408 bp, Homo sapiens
cgacaatgagcacagactcacagacgtgggcagtgtgaagcgggtcacttcaggaccgtctctgggttccctcccacctgccgcaatggagtctatggaatccttaagactcaaagataaaaatgagcctgttcaaaacctacccatccagaagagtattgatgatgtggattcaaaactgaaaggaataggaaagccaagaaagttctccaaatttagtctctacaagcagctccacaggcaccacctgcacgacgcagatagcatcagcagcattgacagcacctccaataccgggtccatccgtagtttacagacaggtgtgggagagctgcatggggaaaccagattctggcatggaaaggactactgcaatttcgtcttcaaagactgggttcaacttgataa

SEQ ID NO: 133079 - DNA, 888 bp, Homo sapiens
atgacgcagcatgctggaaagcgtgacagtgaattgcctgtcattgtgcaagatacagagactgttccttcagtaatggatggaaaagagtaccaagctggccggtttgcccgaggacttcggctacagtgctttagaagaaggagaaggagaaggaggacgaggagaaggagaagaaaagaagaagaagaagaagaagaagaagaagaagaagaagaagaagaagaagtagaagaagaaggaatgaagaaggaagaagaaggaagaagaaggaagaagaagaagaagaagaaagcagaagaagaagaagagaagaagaagaaagaagaagaagagaagaaaagaagaagaagagaagaacccccacgcccacgcaacgacgacgacgcacgaagaagaagaaaagaagaagaagaaggaagaagaagaagtatgaagaaagaagaagaagaagaagaagaagaagaagaagaagaagaagaagaagaagaagaagaagaagaagaagaaaagaagaaaagaagaatagggcctgcctcaaagatgatgggaggatttgaggagctaaggcggggtctcaatgttgggcccacaatggctatttttttccttcagtcagcagctctagctcctgccatcctctacttttgtccttcactgaaaagcaacatttctaaatgtaacttccaattcctgatgttttgtcagcttctagggagagtaacaattcccttccttgtctcacaaagatccaggattgaagttgggagacattcactgtcaactctcaatgcagaaacagctcatgaactatatttaggaaggacagagcctgatgagtgtggaaagactgcaggtttgggcacagggctggatttaaaggtctag

SEQ ID NO: 133080 - DNA, 381 bp, Homo sapiens
aaccagtttttcataagctgtgctgatgacaaagttgtgttcaacaagataggcgatgccattgcccagaggatcctgaaagctcacagggaaaaccagaaataccgggtatatgtcgtgataccacttctgccagggttcgaaggagacatttcaaccggcggaggaaatgctctacaggcaatcatgcacttcaactacaggtgccaaaactctaaatggtctattttgagctttcggtcatgcatcatctccatgataatcttaaaagccaacagctgctcaaatcagggtgaaaaccagcagcctagcagccattggagggagcagatcagggttaaggctcccatgtcccacagttctcacattgtcattatttga

SEQ ID NO: 133081 - DNA, 3703 bp, Homo sapiens
tttcgtcagctgtgccagaggcacccgagccctgagagtccgccgccaacgcgcaggtgctagcggccccttcgccctgcagcccctttgcttttactctgtccaaagttaacatgtcactgaaaaacgagccacgggtaaatacctctgcactgcagaaaattgctgctgacatgagtaatatcatagaaaatctggacacgcgggaactccactttgagggagaggaggtagactacgacgtgtctcccagcgatcccaagatacaagaagtgtatatccctttctctgctatttataacactcaaggatttaaggagcctaatatacagacgtatctctccggctgtccaataaaagcacaagttctggaagtggaacgcttcacatctacaacaagggtaccaagtattaatctttacactattgaattaacacatggggaatttaaatggcaagttaagaggaaattcaagcattttcaagaatttcacagagagctgctcaagtacaaagcctttatccgcatccccattcccactagaagacacacgtttaggaggcaaaacgtcagagaggagcctcgagagatgcccagtttgccccgttcatctgaaaacatgataagagaagaacaattccttggtagaagaaaacaactggaagattacttgacaaagatactaaaaatgcccatgtatagaaactatcatgccacaacagagtttcttgatataagccagctgtctttcatccatgatttgggaccaaagggcatagaaggtatgataatgaaaagatctggaggacacagaataccaggcttgaattgctgtggtcagggaagagcctgctacagatggtcaaaaagatggttaatagtgaaagattcctttttattgtatatgaaaccagacagcggtgccattgccttcgtcctgctggtagacaaagaattcaaaattaaggtggggaagaaggagacagaaacgaaatatggaatccgaattgataatctttcaaggacacttattttaaaatgcaacagctatagacatgctcggtggtggggaggggctatagaagaattcatccagaaacatggcaccaactttctcaaagatcatcgatttgggtcatatgctgctatccaagagaatgctttagctaaatggtatgttaatgccaaaggatattttgaagatgtggcaaatgcaatggaagaggcaaatgaagagatttttatcacagactggtggctgagtccagaaatcttcctgaaacgcccagtggttgagggaaatcgttggaggttggactgcattcttaaacgaaaagcacaacaaggagtgaggatcttcataatgctctacaaagaggtggaactcgctcttggcatcaatagtgaatacaccaagaggactttgatgcgtctacatcccaacataaaggtgatgagacacccggatcatgtgtcatccaccgtctatttgtgggctcaccatgagaagcttgtcatcattgaccaatcggtggcctttgtgggagggattgacctggcctatggaaggtgggacgacaatgagcacagactcacagacgtgggcagtgtgaagcgggtcacttcaggaccgtctctgggttccctcccacctgccgcaatggagtctatggaatccttaagactcaaagataaaaatgagcctgttcaaaacctacccatccagaagagtattgatgatgtggattcaaaactgaaaggaataggaaagccaagaaagttctccaaatttagtctctacaagcagctccacaggcaccacctgcacgacgcagatagcatcagcagcattgacagcacctccagttattttaatcactatagaagtcatcacaatttaatccatggtttaaaaccccacttcaaactctttcacccgtccagtgagtctgagcaaggactcactagacctcatgctgataccgggtccatccgtagtttacagacaggtgtgggagagctgcatggggaaaccagattctggcatggaaaggactactgcaatttcgtcttcaaagactgggttcaacttgataaaccttttgctgatttcattgacaggtactccacgccccggatgccctggcatgacattgcctctgcagtccacgggaaggcggctcgtgatgtggcacgtcacttcatccagcgctggaacttcacaaaaattatgaaatcaaaatatcggtccctttcttatccttttctgcttccaaagtctcaaacaacagcccatgagttgagatatcaagtgcctgggtctgtccatgctaacgtacagttgctccgctctgctgctgattggtctgctggtataaagtaccatgaagagtccatccacgccgcttacgtccatgtgatagagaacagcaggcactatatctatatcgaaaaccagtttttcataagctgtgctgatgacaaagttgtgttcaacaagataggcgatgccattgcccagaggatcctgaaagctcacagggaaaaccagaaataccgggtatatgtcgtgataccacttctgccagggttcgaaggagacatttcaaccggcggaggaaatgctctacaggcaatcatgcacttcaactacagaaccatgtgcagaggagaaaattccatccttggacagttaaaagcagagcttggtaatcagtggataaattacatatcattctgtggtcttagaacacatgcagagctcgaaggaaacctagtaactgagcttatctatgtccacagcaagttgttaattgctgatgataacactgttattattggctctgccaacataaatgaccgcagcatgctgggaaagcgtgacagtgaaatggctgtcattgtgcaagatacagagactgttccttcagtaatggatggaaaagagtaccaagctggccggtttgcccgaggacttcggctacagtgctttagggttgtcccttggctatcttgatgacccaagtgaggacattcaggatccagtgagtgacaaattcttcaaggagggtgtgggtttcaacagcagctcgaaatgctacaatttatgacaaggttttccggtgccttcccaatgatgaagtacacaatttaattcagctgagagactttaataaccaaggcccgtatttagcctagggaaagatcccccatcgagctgaggaggaactgaaggaagatccggtggatttttggtgcaattcccccttttatttctttgtctgaagaaagccctactgcccttcctgttgggacccaaagaggcccatagtgccccattgaaggtttggactttaagagatattcattggcagcttcaaagacttccaccctggagaccacactgcacacagtgacttccctgggggatgtcgatagccaaagccaggcctgacgcattctcgtatccaacccaaggaccttttggaaaggcttgggaagggctccagtcccattaatgtaaggcctgtaaacatcagcaagactttataattccttctgcctaacttgtaaaaagggggctgcattcttgttggtagcatgtactctgttgagtaaaacacatattcaaattccgtataccaaaatccatttcctttgtaacaagaatttaccagtaactgtgatctaggttgccaaaaa

SEQ ID NO: 133082 - DNA, 277 bp, Homo sapiens
  misc_feature (1)...(277): n = a,t,c or g
gaacgcggcncggcgcagcaacagtcgcaggagatgatggaggaagaacatgagctgcctgtggacatggaaaccatcaacctggacagagatgcagaggatgttgatttgaatcactatcgcatagggaagattgaaggatttgaggtactgaagaaagtgaagactctctgcctccgccaaaatttaattaaatgcattgagaatctggaggagctacagagtcttcgagagctggatctttaccgacaaccagatcaagaacgattgagaatct

SEQ ID NO: 133083 - DNA, 412 bp, Homo sapiens
  misc_feature (1)...(412): n = a,t,c or g
cctgtggacatggaaaccatcaacctggacagagatgcagaggatgttgatttgaatcactatcgcatagggaagattgaaggatttgagactctctgcctccgccaaaatttaattaaatgcattgagaatctggaggagctacagagtcttcgagagctggatctttacgacaaccagatcaagaagattgagaatctggatgcgctaacagagctggagattctagatatttcttttaatctgctgagaaacatcgaaggggttgacaagttgacacgnctgaaaaaactcttcttggtcaacantaaaatcagtaaaattgagaacttaagcaacttacatcaactacagatgctagagctgggatctaaccgcatccgggcatcgaaaatatcgacacttaaccaac

SEQ ID NO: 133084 - DNA, 2024 bp, Homo sapiens
  misc_feature (1)...(2024): n = a,t,c or g
cccacgcgtccgggggaagagcagccaacatggcggcggatcgcggcgcggttcagcaacagtcgcaggatatgatggaggttgacaggcgggtcgagtctgaagaatccggcgatgaagaagggaagaaacacagcagtggcatcgtggccgacctcagtgaacagagcctgaaggatggggaggagcctgggggaggaggacccagaagaagaacatgagctgcctgtggacatggaaaccatcaacctgggacagagatgcagaggatttttgatttgaatcactatcgcatagggaagattgaaggatttgaggtacttgaagaaagttgaagactctcttgcctccgccaaaatttaatttaaatgcctttgagaatcttgggagggagctaccagagtctttccgagagctggatctttacgacaaccagatcaagaagattgagaatctggaggcgctaacagagctggagattctagatatttcttttaatctgctgagaaacatcgaaggggttgacaagttgacacgactgaaaaaactcttcttggtcaacaataaaatcagtaaaattgagaacttaaggcaacttacatcaactaccgaatgctaggagctggggatcttaaccgcatccggggccaattcggnaaatatccgaccaccttaaaccaacctgggagagttggtttttggggaaaaaaacaaaaattactaactttcagaaccctggatgcgcttcaccaaacttgacagtcctcagtatgcagagcaaccggctgaccaagatcgagggtctgcagaaccctggtgaacttgcgggagctgtactttagccacaatggcatcgaggtcatcgagggcctggagaacaataaacaaactcacgaatgttggacattgcatcaaatagaatcaaaaagatttgaaaaatatcagcccatctaacagagcttgcaagagttctgggatggaacgacaatccccttgaagagctggagcgacctcgacgagcttgaaggggagccaggagccttggaagacagtgtaccctggggcgggaacccccttgcaagaaggacccccaagtaccggcggaaaggtcatgctcgcccctcccctccgtgcggcaagatcgatgcccacgttccgtcaggttcctgaagtccttccttggctccctcatgtggtccctctcctcggaagaactgcccagccacggggtttttaacccaccgtgttgctcctgaggtcgtcactatatcaacagtcacaaacccaatgggcaataaaggcactgacgattagctgggcgcgcgcgacgccacacaccatttttcagatgccgttgcaattaaatcttgccacactgtcctcctgggtgattgttgacagttattgtagccacagagagaacataagacacgttgcgttcattcgctagaaatccctgtttccttctctcagaaggcagtcacagtccctacctgagtcgtgtgaaacacagggcctgagagtgctttacaggcattcacgggctgtccgagtggcattcgggggctggcctagctggccctagacctggtgtgcagggttcaggcagtcttgacctgcaacaaccgaggtttttttagtcttttaacccagccattttcaattttttaaaaattagggtaagttaaaaaagcttgggtaaaagctgacttcagccctgtgtggcttgtgttccttagagctctccttccaaagagcgccgggcagggctgactgttttcacgtgtgcccgtcagttctcgccacatccccttgcctgtgggtgaaagctcaggtgtggggagggtgtcctgtgtcccacacggtgctgtgctgctgccagaatacgagtcccattgagcctctccaaagacggcctccaaggatctgaactcttggccactggtatagtggcctcctgttctcaccccattgttattttggcttttttaatataaaatgtacattgacagacaaaaaaaaaa

SEQ ID NO: 133085 - DNA, 567 bp, Homo sapiens
atgacagattcctgtgcgaagctaattttcaaaaggcaggaagaagacagccctaagaaaaaatctgagtgggaacagccagaaaagaaagaagaaaaggagtttaaatcaggaatgcagcaactagtgtcaaatgatacagagaagtcatggtctctgagtcttgagaaacccccgctggagcccgaggaagaccgtattatttttcagcaccggggacagcgccgcgctgccattaacgtccaccctcccccaccttctctctccgccaccccccacccgccccaacctcagcccccacccccgcaccagcacaatgccaaggcccgtgtcgctaccattcggacaaaacgcacatcaaattgcagaattcggtcccggaaggttaggaaatcgcccccggagaaatgggtgggatttaataggcggccaaaggcttcctgtccgtcccctcctggagctgcccgcgttgatgtgggcggggagaccgaaaggagagagcaggctgcggctcctggtgaaatgggaaaatgggctcgaccgggggaggagtatttccattcataa

SEQ ID NO: 133086 - DNA, 1839 bp, Homo sapiens
atgtccaaaatacacttctcccagactctggttctggctgtgggtgactttggatgtcaaaaacacttagtcatcttctgtttactctctcatcgtggaagaagctgcaaagaaaccgctggcctagatgacgaacagacatttcaatgtgcaattattaagaagagacctgccagattgggttctattgaggtatttgcacataacattgtgtggaaaagggtttcaggatggggaaaatccttcacagctggggatctttcaggggccactatggagaaagctaaagagaaaagggaactcctggggcagggagacatggagacagggcttattagtttaggtgataccaacgtcactcagcagtgtggtgaggagtctccaggtctctccagactggggatccctaacacaagaggaagtcttatgccccaagtgccagaattccaggaaactcatgcaatgaaaccagtcctcttgtgtcagagtttgcagctagaagcggttcaagggatggaggactctctgggagctggagtggtacgctgcaaagaacctaaatatgccataacttcctttacttccctctccaagaatttccaattgctcttccagcctattctgcctgacagtcccgccctcccgcacacgctgacccagggacacaccctactgcagcgacgcaaacagggcgttgttcccgttaaaggggaacgccaggagcctcccactgcccccttgcttcgcgcgcgcgcagccccgcagcgcagctttggcggcgccagcagcggagccaacgcacccgagtttgtgtttgaggccaccctgaggatcgggacagctgttcctttgggctactggacccctaggcgagcacgtgggtctagcgcaagagcagaatgccccctgaccccaggggctgcctggggaagcgcgcggtggacgggaagcgcagggtccgggcaaccctctcgagccattcttttctttccacactactctggctctgcaccacctctccggagccgccagagtctgcgcgaggctgagctggggccaggaccgttcctctacgctggcagagttgggtggaaacttggagacaaacggaatgcggagagcactggggtctgggaaaccagcctcctcgccgctgtctcccccaccgcatgccacggctgtctccaggcagaaactccgctgagcagaacttgccgccagaatgctcctcctgttgctgagtatcatcgtcctccacgtcgcggtgctggtgctgctgttcgtctccacgatcgtcagccccgtgctcctgctggttcaggactgtgttatttgcagacagttggaagtctcagacgtcccagggaagtttctggcaatctgcccccttccagttgctttgagaaaacgagagcagattcagtgataggaaccaagcgagcgctgggctgggatatctatctgattctctctagcaatggatcgtgggcaatggacacgcaactgatctctggcagaactgtagcacctcttcctcaggaaatgtccaccactgtttctcatcatcaccaaacgggtctggctgaagttcccggagcactccggatgggagtctccgtactcgctactgacacctggtggttacaagtagtgactcagcccgaaaagggcaggctttggtgctcacaggcgccatccccaagtggcatctggccacgcggcttggcacagaatcctggactcttgggcccggaagggggcagttttggcaggcgtgttaaaacccggcgaagtttcagcagaaacgaggcggcagaggagttgctaagttgtgcttaa

SEQ ID NO: 133087 - DNA, 1953 bp, Homo sapiens
cccacgcgtccgcaccagggaacatctcggggagcctgtttggaagctgcaggcttagtctgtcggctgcgggtctctgactgccctgtggggagggtcttgccttaacatcccttgcatttggctgcaaagaaatctgcttggaagaaggggttacgctgtttggccgggcagaaactccgctgagcagaacttgccgccagaatgctcctcctgttgctgagtatcatcgtcctccacgtcgcggcgctggtgctgctgttcgtctccacgatcgtcagccaatggatcgtgggcaatggacacgcaactgatctctggcagaactgtagcacctcttcctcaggaaattgtccaccactgtttctcatcatcaccaaacgaatgggctgcagtcttgttccaggggcaccatggatcctgtcgattcatctttcagcattctgtctctgttcctgttcttctgccaactcttcaccctcaccaagggggggcaggttttacatcactggaatcttccaaattcttgctggtctgtgcgtgatcgagtgctgcggccatctacacggtgaggcacccggagtgggaatctcaactccggatacttcctaacggttcgcctaaattcctggcctgggtggccttccccctcggcccttctcagcggtgtcatctatgtgatcttgcggaaacgcgaatgaggcgcccagacggtctgtctgaggctctgagcgtccatagggaagggaggaagggaatccagaaagcagacaaaagaaaaaagagctagccccaaaatcccaacactcaaaccaaaccaaacagaaagcagtggaggtgggggttgctgttgattgaagatgtatataatatctccggtttataaaacctatttataacactttttacatatatgtacatagtattggtttgctttttatgttgaccatcagcctcgtgttgagccttaaagaagtagctaaggaactttacatcctaacagtataatcccagctcagtatttttgttttgttttttgtttgtttgttttgttttacccaggaaataaggataactccatctcgccccttccctttcatctgaaagaaggatacctccctcccaagtccacctcatttagggaaaaccaaagtgtggggtaggaaacccccaaatgtcccaaaagccctttttctgggggggggtgacccagtggcatcccaacaggaaacaggccggtggcccggaacctctggtgtgaagcttttacgcgccacacgggacaaaatgcccaaactgggagccccttgcaaaaacacgggcttgtggccattggcatacttgccctttacaggtgggagtatttttcgtcaccaccatctaaaatggggaatccagtgaccaacaagtcttttggaaatgggtggtatgggattttaccatttccttattatcactcaaccatcgtaagcaatctcactggaaaatcccaattaaccaattttaccaacataaggataggaatgggagacctggaattaatttctgtggtaattttaaatgggtttattaactggtttttgtaccttagctagggctgcctattaattacctataatgaagtaaatccataaagccttccatcactcccccacattttttccttacggtcggagcatcaagaacaagcggtctagactcccttgggacccgtgagttcctagaagcttggctgggtcctaggctgttcctgtgccctccaaggactgtctgggcaatggacttgtattgggccaccaactggtagatgtatatatgggtgcccttctggatgctaaagactccaggaccttttggtttttggctttgcattttctgattttaataccaactggtgtgggactaaggatgcattaaaaataaacatcagagtaactcaaaaaaaaaaaaaaa

SEQ ID NO: 133088 - DNA, 499 bp, Homo sapiens
  misc_feature (1)...(499): n = a,t,c or g
ttcccggcttcccgtctcgtcaccctctgctcagaacctgaggacgcagccatggagcggtcggccttcatggagctggatgctgggagcaggctggtgatgcatctccgcgagtggccagccctgctggtcagcagcacgggctggacagagtttgaacaacttactcttgatggacacaaccttccttctcttgtctgtgtgataacagggtcggtggacctgggtgtctgtctgcacatgtcctccagtggcctggacctgcccatgaaggtggtggacatgttcgggtgctgtttgcctgtgtgtgccgtgaacttcaagtgtttacatgagctggtgaaacatgaagaaaatggcctggtctttgaggactcaaaggaactggcagctctgcagatgctnttctcanactttcctgatcctgcaggcaagctaaaccagttttggaaggacctgcgggagtcgcagcagcttcgatgggatgagagctgnggcg

SEQ ID NO: 133089 - DNA, 461 bp, Homo sapiens
  misc_feature (1)...(461): n = a,t,c or g
nccctcgtcatgaccagaaactgtttccttatgaagagcacttgaagatggcaatgctgaacctcacactgtaggactcacacacgactccaatgggattgtgagaatcaagtcactctcaagggaagaggtttcatatgggaaagctgataaaactttcactggactggaatgtttggagaatgttaatttccaaatcaggaactacaaactgccctctaataagacatcggctatctaagcgtgtgggtgctccctttctgccagcagttctggttcttaaggaaatcgccatcactcagacatgaaaactctggctccaaaaatagcattttctttgtgcaaataacaacgtgtgtatcaagtatgtggacacactcgaaacctcacaaagccaagcctgctgcagctgccacgaaatcgtcggcccgggaattccgaagcggtacaggcaatacact

SEQ ID NO: 133090 - DNA, 442 bp, Homo sapiens
ctccatgcttggcacgaggtggtgtaggtagatccggggcaggctcaggaccaagtccctctccttccaccaaggagcgcccagaggccggcgggagctccaggttcacctcctcctcctccaggaaatcccacttccaactggatgtctggatgaactactgaaagctgctgagtgtcctgcagcagggtcggtggacctgggtgtctgtctggacacatcctccagtggcctggacctgcccatgaaggtggtggacatgttcaggagctgtttgcctgcgtgtgctgtgaacttcaagtgacggtaagggccatgtagaattgaggagcccgctggtgctcccggcaggcagccagcctccgcaggaccccgaccagcgacacgatggcttctgggcaatacagcacgtctacggtgaaagcttcaggttactgaaagg

SEQ ID NO: 133091 - DNA, 723 bp, Homo sapiens
ttggaattcctccgacgcacctccaagccctttctcctgctctaggcccagcgccttggacgtgcacagtagatccctcccggcttcccggcttcccgtgtcgtcaccctctgctcagaacctgaggacgcagccatggagcggtcggccttcatggagctggatgctgggagcaggctggtgatgcatctccgcgagtggccagccctgctggtcagcagcacgggctggacagggtcggtggacctgggtgtctgtctgcacatgcctccaagtgggcctggcctgccccatgaaggtggtggacatgttcgggtgctgtttgcctgtgtgtgccgtgaacttcaaggtgtttacatgagctggtgaaacatgaagaaaatggcctggtctttgaggactcagaggaactggcagctcttcagatgcttttctcaaactttcctgatcctgcaggcaagctaaaccagttttggaagaacctgcgggagttgcagcagctccgatgggatgagagctgggtgcagactgtgctccctttggttatggacacacaactcctaggccagaggctaaaaccccgggacccctgctgtccttcccgcagcttcttctcggagtctcagagcaaacccttttgagcagcgcctcccagtggccagaagctgaagtgacggcagtggtgccgcctggtgaatgaattggttctgtgacccgggaaaa

SEQ ID NO: 133092 - DNA, 653 bp, Homo sapiens
gcagagagctgatcaaaacagcaaaagcaaagcagtgccccggcccagttctaaagccaaccttccttaatcacccagacccatcccagtccaggctcggcttccgcccggtctcccggcaacgctgcggccccgcccccgtcttggtgcccgaggagaacgcggggaccgaactcttgctgcagagttctcaagcgccgctttcctggcggcgcgtgcactgcgctccttaccctggcagagcttaaaagcaaagttaagagactcatcagattctgagctgctgcgggatattttgcagaagacgtgctgtatagcccagaagccatcgtgtcgctggtcggggtcctgcggaggctggctgcctaccaggagcaccagcgggctcctcaagtctatgtggcccttaccgtctgcaacccagagacgtgccagctggttcaccaccgagctatgctggactgggatcagatgggaagcggaagctcatcatgaccagaaactgtttccctacagagagcacttggagatggcaaagctgaacctcacactgtaggactcacacatgactccaacgggattgtgagaattaagtcactctcgtgggaagaatttttatatgggaaagcggataaaactttcattggactgga

SEQ ID NO: 133093 - DNA, 842 bp, Homo sapiens
ggcatgaagatcaaaagacaggaagcgtttcagagactccaaagaagaaatcagggccacacacagcctcccgagtcattcaccaggtggcaccactgccttcatttcagcttccggccactgggaggcgctgctagaaagggtttgccctgagacaccaagaagaagctgcgggaaggacagcaggggccctggggttttagcctctggcccaggagttatgtgtccataaccaaagggagcacagtctgcacccagctctcatcccatcagagctgctgcgactccggcaggttcttccggaaactggtttagcttgcctgcaggatcaggaaagttttgagaaaagcatcttgcaaaattactaaagggcgagcttacctcattgcctgtccccacccccatccccaggtcaccacctggctgaccccaggtccccggacccaacaacaaccccttcccaagtccctaactccctcacttggacttgagacccttcacaacccccctcacttggacttgagacccttcacgccccagcatcgctccgcctcccacttgacagtcatgctttctggaaacttccccgtatgtcccactttcccacacttggtgccctggagcaccttccggcctctacatgatgtacgttcccctgtgagcaccctcctctcggcctctggccaacacagtcccacccatctgtgggtaacaagggggtgttggtgttcttttcagccttgctaaactgtctgaatcaaggatcacaaactacagcctgcaggccaaatccagcccacagcctgtgtttgtaaataaagttttattggaacaaagcaaaa

SEQ ID NO: 133094 - DNA, 1024 bp, Homo sapiens
accgacgatttcgtcggggagcgaactcttgctgcagagtttcaagcgccgcttcctggcggcgcgcgccctgcgctccttcccctggcagagcttagaagcaaagttaagagactcatcagattctgagctgctgcgggatattttgcagaagtagactgtgaagcatcctgtgtgtgtgtgaagcacccgccgtcagtcaagaaagcccggtgctttctctcagaactcatcaaaaagacgtgctgtattgcccagaagccatcgtgtcgctggtcgggatcctgcggaggctggctgcctgccgggagcaccagcaggctcctgaggtctacgtggcctttaccgtccacaacccagagacgtgccagctgttcaccaccgagctaggccaggctgggatcatatgggaagcggaagctcatcatgaccagaaactgtttccctatggagagcacttggagatggcaatgctgaacctcacactgtaggactcacacacgactccaacgggattgtgagaatcaagtcaatctcatgggaagaatttttatatgggaaagcggataaaactttcattgtactggaatgtttggagaatgttaaattccaaatcagaaaccacaaactgccctctaataagacatcggctatctaagcgtgtgggtgccccctttctgccagcagttctggttcttacgaaaatcaccatatatcagacatgaaaattctggctccaaaaatagcattttcattgtgcaaataaaaacgtgtgtatcaagtatgacattcccccaacgtggacacacttggttcctcacaaagccaagcccgctgcagctgccacatccctggacacactcgttgcctcacaaagccaagcccgctgcagctgccacatccctggacacacttggtttctaacaatgccgagcacactggagctgacaaatccctgagcctatggtgcagcaggtgcttttttcaagacagggatcaaagtgttagcaacacggcatgtatt

SEQ ID NO: 133095 - DNA, 1687 bp, Homo sapiens
  misc_feature (1)...(1687): n = a,t,c or g
ggcgggccagccaagatggcggcctcatgcttggtcctgctggcgctgtgtctgctgctgccgctgctgctgctgggaggatggaagcgctggcgccgggggcgggcggncggcatgtagtagcggtggtgctgggcgacgtgggccgcagcccccgtatgcagtaccacgcgctgtcgttggccatgcacggcttctcggtgaccctcctggggttctgcaactccaaaccccatgatgagctcttgcagaacaacagaattcagattgtggggttgacagaacttcagagtcttgcagttgggccccgagttttccagtacggagtcaaagttgtacttcaggctatgtacttgctgtggaagttgatgtggagggagccaggtgcctatatctttctccagaaccccccaggtctgcctagcattgctgtctgctggttcgtgggctgcctttgtggaagcaagctcgtcattgactggcacaactatggctactccatcatgggtctggtgcatggccccaaccatcccctcgttctgctggccaagtggtacgagaagttctttgggcgcctgtcccacctgaacctgtgtgttaccaatgctatgcgagaagacctggcggataactggcacatcagggctgtgaccgtctacgacaagcccgcatctttctttaaagagacacctctggacctgcacgcaccggctcttcactaaactgaccaacatgcactctccgttcagggcccgctcagaacctgaggacccagtcacggagcggtcggccttcacggagcgggatgctgggagcgggctggtgacgcgtctccgtgagcggccagccctgctggtcagcagcaccgagctggacagaggacgaagacttctccatcctgctggcagctttagaaagtagagtttgaacaactgactcttgattggacacaaccttccttctctcgtctgtgtgataacaggcaaagggcctccgagggagtattacagccgcctcatccaccagaagcatttccagcacatccaggtctgcaccccttggctggaggccgaggactacccccgcttctagggtcggtggatctgggtgtctgtctgcacacgtcctgcagtggcctggacctgcccatgaaggtggtggacatgttcgggtgctgtttgcctgtgtgtgccgtgaacttcaagtggcaggagcagaacccgaatctttctggggatagcttcacagatccaccgctgaggaggaaacagtgcagagcgagctgcccacagtgaggccctgctcctggtttacatgagctggtgaaacatgaagaaaatggcctggtctttgaggactcagaggaactggcagctcagctgcaggtgcttttctcaaactttcctgatcctgcgggcaagctaaaccagttccggaagaacctgcgggagtcgcagcagctccgatgggattagagctgggtgcagactgtgctccctttggttatggacacataactcctgggccagaggctaaaaccccgggacccctgctgtccttcccacagcttcttctcagagtctcagggcaaatcctttcgagcagcgcctcccagtggccagaagctgaaatgatggcagtagtgccacctggtgaatgaattggttctgtgacccgggaaaaaaaa

SEQ ID NO: 133096 - DNA, 2918 bp, Homo sapiens
  misc_feature (1)...(2918): n = a,t,c or g
tttcgtcggcctcatgcttggtcctgctggcgctgtgtctgctgctgccgctgctgctgctgggaggatggaagcgctggcgccgggggcgggcggtctcttcatgtagtagcggtggtgctgggcgacgtgggccgcagcccccgtatgcagtaccacgcgctgtcgttggccatgcacggcttctcggtgaccctcctggggttctgcaactccaaaccccatgatgagctcttgcagaacaacagaatccagattgtggggttgacagaacttcagaagtcttgcagttgggccccgagttttccagtacggagtcaaagttgtacttcaggctatgtacttgctgtggaagttgatgttggaaggagccaagtgcctatatctttctccagaaccccccacgtctgcctagcattgctgtctgctggttcgtgggctgcccttgtggaagcaagctcgtcattgactggcacaactatggctactccatcatgggtctggtgcatggccccaaccatcccctcgttctgctggccaagtggtgcacatccagcctccgtgtgcatgtccagctgctgcgtgtacttccggccttgggccattggctggctgtggccttcgccctgatagtttgttcactggcagtggtgacagcagcagcaaacagcttagttgagcaaatggagcagaatggtcaatggtacgagaagttctttgggcgcctgtcccacctgaacctgtgtgttaccaatgctatgcgagaagacctggcggataactggcacatcagggctgtgaccgtctacgacaagcccgcatctttctttaaagagacacctctggacctgcagcaccggctcttcatgaagctgggcagcatgcactctccgttcagggcccgggtttttttctgctccttcatctcagaacctgaggacccagccacagagcggttggccttcacagagcgggatgctgggagtaggctggtgacacttctccacgagcggccagctctgctggtcagcagcacaagctggacagaggacgaagacttctccatcctgctggcagctttagaaagcaaagggcctctgagggagtattatagccgcctcatccaccagaagcacttccagcacatccaggtctgcaccccctggctggagggccgagagactaccccctgcttctagggtcggcggacctgggtgtctgtctgcacacgtcctccaagtggcctggacctgcccatgaaggtggtggacatgtttgggtgctgtttgcctgtgtgtgctgtgaacttaaagtgtttacatgagctggtgaaacatgaagaaaatggcctggtctttgaggactcagaggaactggcagctcagctgcagatgcttttctcaaactttcctgatcctgcgggcaagctaaaccagttccggaagaacctgcgggagtcgcagcagctccgatgggatgagagctgggtgcagactgtgctccctttggttatggacacataactcctggggccagaggctattaaaaccccagggncccctgctgtccttcccgcagcttcttcttgggagtctcagggcaaaccctttcgagcagcccctcccagtggccagaagctgaaatgacagcagtggtactgcctggtaaaaagaattggttctgtgacccgggaagcttttggttggccttgatttcttctcttggaaggcttgggaaacgctttcctctcttcttctgttcttcacgccccatgcccctgctagcgtattactgttctgtgacttccctgtgacctctgcagaactccttcatcctgcgtttggtctccaggtagtcccctttctgccgtgttccctaccattttgattcctgttttgaaaaaagcccctgctgcacccgtaagccccaggggatgtggcagctgcagtgggcttggctttgttgggtgcttgggtgtgtccacgttgggggaacatcatacttgatacactacgtttttatttgcacaaagaaaatgctatttttggagccagaatttccatgtctgatttatggtgattctcttaagaaccagaactgctggcagaaagggggcacccacatgcttagatagccgatgtcttattagagggcagtttgtagttcctgatttggaaattaacattctccaaacattccagtccagtgaaagttttatcagctttcccatatgaaacctcttcccttgagagtgacttgattctcacaatcccattggagtcgtgtgtgagtcctacagtattaggttcagcattgccatctccaagtgctctttgtagggaaacagtttctggtcatgacaagcttccacttcccatctgatcccggcccggcctagctcggtggtgaacagctggcacgtctctgggttgcggacggtaaaggccacgtagacctcaggagcccgctggtgctcccnggcaggcagcccagcctccgcaggacccctgacccagtgaacacaatggccttcctgggcaatacagcacatcctacggtgaaagccttcaggttactgaaagggaccagcggacagttcccaggtcacgctgacctcagcagcagggcgaggccagagaggcagcggtcatatgagactattagatgccttttgaccatttgagccattagatggaaaggcaattacttgggtgaaaaaggagaacccttagtagagaaagctgcaaaagaccgaagcaaaagaaaaaaatctccagactcactggtgttccttacaaaaacagctctggttcttggcctatctagagggctttgaatgacacaaagcctgaccctgccatgaacttcatgtttcaggcatctgctgatttgtctgctggcttgcgaattccaccacg

SEQ ID NO: 133097 - DNA, 1841 bp, Homo sapiens
  misc_feature (1)...(1841): n = a,t,c or g
ttttgtgttttaaaattcaaaaataaaaaaccatgggtttttttttctccatattcctggtttaataatgacttgtttattttgaggaaaaaaggtcccaaacatcaggctgttcacaaaaataacccacagtatcaactttagaaaacaaatcttaagactataacactaattatttttctagaggatgcatttgacattgccaactctcattcacaaaaatacattgttacatttgtgttgaactgccccacacagcacactaatgtgaggggggtaacacacatactttttacttaaaggtgtgttttaaaggctactccacctaatggagattgcctttgcagttaggggagccactactggactttatgtatgaatgaaaagaactgtactccctggcataacaagagattattttgggagacagtttggataaaaaccattacatccttttttaattggttaagtccttaaaggaggtatcaaaattaaaagcaaaaattacaggggtaagacttaacaaaactactatggagcgtcacagtgaagttgaaaatgtgactatgcgctgtgtgcatattgaattaatgaacatgggaaggacaaggatggggagaacagtgagcatgtgctgaagatactaggggagaggatctggtgaaaaatttgatcttagacaagcgcctaggtaaagaaataatgggataagatttctaaaccccactatgtgcttaagagtcattcctcgccattggcgctgttctccgtcatcctctccttcctcagcctctttttcatcatccttgatcaactccagctggtcatccccccgatcttcattatcattcattcatcccagtaggtccccctcctcagcagagtcatctgcacccccctcagactccatcttcacattagtctcatctttcttcacggagctgctgctctgctcctcttctgacttatcattcttcatctctactgcttgtttgctctgttccttttccattttttccaggttttcccagaagagaatccacttttttgttttatctggcgtcagctccttcttaatggcctgaaggtcatctcctttcaactttccagactttgaaagatccccgctgtccactcttagaattgaagccacttttgccccttttgtaaagtgtttcctgacacacgtgaccgttcgaggggcactacaacccgaagcaatagaaggaggaggaggttacacgtgctggggtaactgtacatcctatcataatagtcccgttgaaaagtcatagtccaagtcaaaaggggagcccgtaacatctcccgctggcagaatcgtttcaacacctggcttttccctcgggttncactttttggctcctgcaagcccaggttaaacatcctaaaaccctggcccagccaatcattctgccatccctctccctgctacagcaaccccgggcatttctctcattaacatactgaacgaaaggcaaagcccttatgaacagagcagcccacaattttgccatacttcgaaaagattgcctccacatcagatttcttgaccacaagagtgttgagattcccaatgaatacacgggagttcatggagcgaggatctgtcttgttggtaacgttgctggccatcgtgtttgatggtaaggtttctcacaaagccgaaaatgtagctgaagatcaaaaaaatctcacaagaaggggagggagaagagattcgattctgagtctcctactcccgggttctgcgtagagaagccgactgcttgctggaggtcggcaacgcggccacaaccgctcaagtcttcgtctcttccccc

SEQ ID NO: 133098 - DNA, 1492 bp, Homo sapiens
tgtgaagagacgaagactgagcggttgtggccgcgttgccgacctccagcagcagtcggcattctctaacgcagaaacccgggagtaggagactcagaatcgaatctcttctccctccctcttcttgtgagatttttttgatcttcagctacattttccggctttgtgagaaaccttaccatcaaacacgatcggccagcaacgttaccaacaagacagatcctcgctccatgaactccccgtgtattcattgggaatctcaacactcttgtgggtcaagaaatctgatgtggaggcaatcttttcgaagtaatggcaaaatttgtgggctgctctgttcataaagggctttgcctttccgttcaagtaatgttaatgagaagaaatgccccgggcttgctgtaacagggagaagaatggcagaatgattgcctgggccaggttttagatattaacctggctgcagagccaaaaagtgaacccgagaaaaaagcagtgtgaaacgatctgcagcggagatgtacggggtcagtaacagaacacccttctccgtcccctctacttcagctcctcttttgacttggactatgactttcaacgggactattatgataggatgtacagttacccagcacgtgtacctcctcctcctcctattgctcgggctgtagtgccctcgaaacgtcagcgtgtatcaggaaacacttccacgtagtggcccacgtggcttcaattctaaggagtggaacagcggggtatcttccaagttctggaaaaggtgaaagggagatgaccttcagggccattaaggaagagctgaccccagataaatcaaaaaggtggattctctcctggaaaacctggaaaaaattgaaaaagcgaccggggcaaacaagcagttagagatgaaggaatgattaagtcagaagaggagcagagcagcagctcccgtgaaggaaagatgaggactaatgtgaaagatggagtctgagggggggttccagatgactctgctgaaggagggggacctacctggatgaatgatgataatgtaaaatcggggggaatgaccagctgggagttgatccaaggatgatgaaaaagaggctgaggaaaggagaggatgacaagagacaagcgccaatggcggaggatgactcttaagcacatagtcgggcttaagaaatcctaatcccattattttctttacctaggcgcttggtctaagaacaaaatttttcaccaagatcctctcccctagtatcttcgagcacatgctcactggttctccccatcccttgtccttcccatgttcattaattcatattgccccgcgcctaagtcccattttcacttcctttgacgctcctagtagttttgttaagtcttaccctgtaatttttgcttttaattttgatacctctttatgacttaacaataaaaaggatgtatggtttttaaaaaaaaaaaaaaaaaaaaaagggcggccgct

SEQ ID NO: 133099 - DNA, 446 bp, Homo sapiens
  misc_feature (1)...(446): n = a,t,c or g
ttntcctcggttcaactttttggctctgcagccaggttaantatctaaaacctggcccagcaatcattctgccatccttcttcctgttacagcaagcccgggcatttctctcaattaacatactgaacgaaagcaaagcccttatgaacagagcagcccacaattttgccatacttcgaaaagattgcctccacattcagatttctttgaccacaagagtgttgagattcccaatgaatacacgggagttcatggagcgaggatctgtcttgttggtaacgttgctggccatcgtgtttgatggtaaggtttctcacaaagccgaaaacaagaaggggagggagaagagattcgattctgagtctcctactcccgggttctgcgtagagaagccgactgctgctggaggtcggcanacnggccacaaccgctcagtcttcgtctct

SEQ ID NO: 133100 - DNA, 462 bp, Homo sapiens
cccacgcgtccgcccacgcgtccgcccacgcgtccggaagagacgaagactgagcggttgtggccgcgttgccgacctccagcagcagtcggcttctctacgcagaacccgggagtaggagactcagaatcgaatctcttctccctccccttcttggtaagtggagagggcggacgcagggaaggcgctgggtttttcgggaagcgagagggggtgtgggagagaagatgtgggaatccttccccctaactaaccgggccctcatttattctgcttgttttgggggattaggttgaagccgggggcagttttataggcctcagcctctgtataggtttaacctggtgtcctctaggccacgatcgccagggaaaatggccttttttcgctcttcctgtgttaacggctgctttcctttcattttctacgaccgcgaggactacgggatcatgaaaatgaagg

SEQ ID NO: 133101 - DNA, 512 bp, Homo sapiens
tggaggcaatcttttcgaagtatggcagaattgtgggctgctctgttcataagggctttgccttcgttcagtatgttaatgagagaaatgcccgggctgctgtagcaggagaggatggcagaatgattgctggccaggttttagatattaacctggctgcagagccaaaagtgaaccgaggaaaagcaggtgtgaaacggatctgcaagcggagatgtacgggctcctcttatgacttggactatgactttcaacgggactattatgataggatgtacagttacccagcacgtgtacctcctcctcctcctattgctcgggctgtagtgccctcgaaacgtcagcgtgtatcaggaaacacttcacgaaggggcaaaagtggcttcaattctaagagtggacagcggggatcttccaagtctggaaagttgaaaggagatgaccttcaggccattaagaaggagctgacgccagataaaacgaaaaagtggattctctcctggaaaacctgg

SEQ ID NO: 133102 - DNA, 2396 bp, Homo sapiens
gtgaagagacgaagactgagcggttgtggccgcgttgccgacctccagcagcagtcggcttctctacgcagaacccgggagtaggagactcagaatcgaatctcttctccctccccttcttgggcagcaaggcgaaccccatccctactcactggagctcagctttgatttttaacctcccttccccacccttccagaacacacacattccattccaaaactgattttataaagacattttaaacataatgatgcaacttggtgtgcactacagcaaatgtacaggtgttttttttttaattgtttccaaaaccgggacctggatttaagatgtaatttttaaaatttctatttctattttttctgcagcagttgggttagaggaggaggagccttttagcctctcataaactgacctctctacttcctcgtgtatttttaagattgattgatgatgtggaaagggctttgcttgtctgctactgaaaactttatccttgcggtttttgtggaaactgcttttggaaagagaaaagaaatgaactttactgacttgacatttttgcacctcccgtttttctaatctgggctatttttatttttgtttttttacagtgagatttttttgatcttcagctacattttccggctttgtgagaaaccttaccatcaaacacgatcggccagcaacgttaccaacaagacagatcctcgctccatgaactccccgtgtattcattgggaatctcaacactcttgtgggtcaagaaatctgatgtggaggcaatcttttcgaagtaatggcaaaattgtggggctgctcttgtttcataaagggctttgcctttccgttcaagtaatgttaatgagaagaaatgccccgggcttgctgtagcgggaggagggtgggcagaattgatttgctgggccaggttttagatatttaacctgggcttgcagagccaaaaagtgaacccgagggaaaagccaggtgttgaaacgattctgccagcgggagatgtacggggtcagtaacagaacacccttctccgtcccctctacttcagctcctcttttgacttggactatgactttcaacgggactattatgataggatgtacagttacccagcacgtgtacctcctcctcctcctattgctcgggctgtagtgccctcgaaacgtcagcgtgtatcaggaaacacttcacgaaggggcaaaaagtggcttcaattctaaggagtggaacagcggggtatcttccaagttctggaaaaggtgaaagggagatgaccttcagggccattaaggaagagctgaccccagataaatcaaaaaggtggattctctcctggaaaacctggaaaaaattgaaaaagcgaccggggcaaacaagcagttagagatgaaggaatgataaagtcagaagaggagcagagcagcagctcccgtgaaggaaagatgaggactaatgtgaaagatggagtctgagggggggttccagatgactctgctgaggaggggggacctacctggatgaatgatgataatgtaaaatcggggggaatgaccagctgggagttgatccaaggatgatggaaaaagaggctgaggaaaggagaggatgacaagagacagggcccaatggcgaggaatgactcttaagcacatagtggggttttagaaatccttatccccaattatttctttaccctaggcgcttggtctaagatcaaattttttcacccagatcctctcccctaagtatcttcgagcacatgctcactggttctccccatcccttgtccttcccatgttcattaattcatattgccccgcgcctaagtcccattttcacttcctttgacgcctcctagtagttttgttaagtcttaccctgtaatttttgcttttaattttgatacctctttatgacttaacaataaaaaaggatgtatggtttttatcaactgtctccaaaataatctcttgttatgcagggagtacaagttcttttccattacacataaagtcaggaggtggttccccaaccgcaaaggccatctcaattaggtgagtagcctttaaaacacacctttaagtaaaaagtatgtgtgttacccccctcacattagtgtgctgtgtggggcagttcaacacaaatgtaacaatgtatttttgtgaatgagagttggcatgtcaaatgcatcctctagaaaaataattagtgttatagtcttaagatttgttttctaaagttgatactgtgggttatttttgtgaacagcctgatgtttgggaccttttttcctcaaaataaacaagtcattattaaaccaggaatatggagaaaaaaaaacccatggttttttatttttgaattttaaaacacaaaa

SEQ ID NO: 133103 - DNA, 1815 bp, Homo sapiens
  misc_feature (1)...(1815): n = a,t,c or g
aggggctagaaaagagcgtcgatgccggcgagatgaatagaggcctaggaggcgctggctctttggcggctcggaggagccgctgcttgctgctgctgctgctgctggtggcccctttgcaagatgtattgctgtccttgaatattagcccatttgaaaacgcctcggaagttcagccatcagtatgtccaagtacaaacttattatgttaagacaatggagagggtgcttggaataaggagaaccgtttttgtagctgggtggatcaagaaactcaacagcgaaggaatggaggaagctcggaactgtgggaagcaactcaaagcgttaaactttgagtttgatcttgtattcacatctgtccttaatcgggccattcccaccgcccggcttgatcctgggaagagctaggccaggaatgggtgcctgtggaaagctcctggcgtctaaatgagcgtcactaatggggccttgaatcggtctcaacagggagcagaatggcttttgaatcatggtgaaagaacaagtgaggctcctggagaagaagctacaatgtaacccccgcctcccattgaggaagtctcatccttacctaccaagaaatctacaaccgacccggaggtataaaagtatgcgatgtgcccttgggatcaactgccacggtcggaaagctttaaaggatgttctgggagagattccttccctattgggaatgaaaggattgctcccgaagtatttacgtgggcaaaaccattctgatatctgctcatgggaaataggcagtaggggcactcctaaaacacctgggaaggtatncttcaggattgaagacatccatcaacatttactctttcctactgggagtccccattcttctgggaattggatggaaaacctgcgtgctgttgggcctcactcaattcctgggtgaccaagaggcgatccaagcagccattaagaaagtagaagatcaaggaaaagtgaaacaagctaaaaaatagtctttctcaactgttggctaagaagaaatgcaaaagaagtggcataggagtgtgttatgggtgctgaactctctctctttttccccgattttccagagctaggctgtggagtaaagtccgcataggttacttagggaacctattgtgtcccaagataacgcttttaggatgcctcagtgcttatgtcatagccttatgagttagctttcttgctagcccccttagtcggtcacaacatagttacctagtggggcttaatgaaggtccataagtttctgagatgggagaagcaacaaagtagagatgacagttaaagggtatttatcattcaagaaattcattattgagtcaccaattgacaggcactattctaatccagtagtccacctttaatatttaataaaaatttttctgggataaccagtaagggatattgggataatatccccgtatgtatttattacctagtcctttccccctaggaaaagggatactttgataattaaggccagaggccccattagttgaggaaagtcacagattctattttctcccaagaaagcccaacaacccacccacccacaatgacagaaatgacaacaaggccctttaacttgtcttcctagtttagagacatcccttcatttgacatttagtagaattcctctttggccacaagaataaggcagcaaataaacaactatggctgttgaggttctcattttggtttgttttaattttttgaactttgggtacctgtaattagtttaaaaataaagttcctgataataaagtgactgaaaatggcatcccc

SEQ ID NO: 133104 - DNA, 721 bp, Homo sapiens
  misc_feature (1)...(721): n = a,t,c or g
agtgcatcctgggttggcgtagccatggcgtctcgtgtcctttcagcctatgtcagccgcctgcccgcgcgctttgcgccgtagccccgggtccggatgctggccgtggctcggcatcgtcagcaccgctctctgctccgaggggacccagacgaggctcgggactttgcagccggccttagtgctcgcgacaggttccgtggtaggagttacacatgttgtgccgccagtatagcgacatgcctcgcgtttgacgttagagggcatccagggaccgtgttcgtttagcgtagttgaaaactcttagtgacaaggttgaccccagagaagctttccagtaaattctccattttatgaaagacctgggcctagacagtttggaccccaagtggaagattatccatggccctggaagaccgaatttgggtttgaaattccctgatataggatgctgaaaagttaatggtntccaccaaggaaattggtagatttacattgccaggataagaaggatggtatatgaattaaagtatcagacccctttggctttgctgagagaggactcagatgatagtgacgaatgtctggcagtgaggacacattttggcattcttgctgaactctgacaggagtgattctgatggacttgtatttaaattgtatgtgttttactctttgaaaataaatctataaaaccaacaaaaaaaaaaaaaaaacaaaa

SEQ ID NO: 133105 - DNA, 684 bp, Homo sapiens
atccgggctctgaccatgatttggcgccgcgcgttgctggcggggacgcggctggtttggagcaggagcggctcggcaggctggcttgacagggcggcgggagctgcgggagctgcggcagctgcggcctctgggatggagagcaatacatcatcatctttggagaatttagcgacggcgcctgtgaaccagatcccaagaaacaatttctgataattgtgtggtgattttctcaaaaacatcctgttcttactgtacaatggcaaaaaaagcttttccatgacatggaatgttaacctataaagtggtggaactggacctgcttgaatatggaaacccagttccaagatgcttctttacaaaaatgactggttgaaagaactgttccaagaatatttgtcaatggtacttttattggaggtgcaactgacactcataggcttcacaaagaaggaaaattgctcccactagttcatcagtgttatttaaaaaaaaagtaaaaggaaagaatttcagtgatgtttatactaataagtttgctagtacagtgtcagttatctaaagtggtaatgcccgataatgtcttttaaatgttttgagggatgttttaaaatacatgcattgtcttcacgaagaagatgtaaaaataatgaacaataaattgcggtggaaacctcttcttaa

SEQ ID NO: 133106 - DNA, 1092 bp, Homo sapiens
aagtcagaggccactgaagctttattcaggcgagtgacagatttacatcttcaattcttaagagtgtggaataaatttgaggaaagaagactggaagcaggaaaacattagggtgttcttggaataatcctcttgagaaaattgcctactctaagatggtagcagtaggtatggggaaagtgggcacacacaacataattagaaagtggtataaaaattttattttagatggggaaaggtagaaaatactaggttaagtataaagggatttctttacctatagtacttgtcagaaattttatggtgctgtttttgagtaaaagaaagtcacacagtaacacaaaatggcttccaaacatttgatttttttttttcttttttttagaagactttatgagacactagcattccacaggaaacactatgggagaaactgttctcccacaaaaataatctcttcttcctttctgttcttgcagctgtcaatatagatgaagcatcccaaatctgaaatctgaaatgctccaaaatatgaaactttttgagtgccaaatacaggatgtgacactcaggggaaaaggcccattggagcactgtgggatttccggacctgggatgctcaactggcaagcattaatgcaaatattccagaacccaaaaacacttctcaagccattttgaataagggatgctcaaaccctgtactttctgagttgtctcaccaactatattcaattttttaaggctgtcttgtcctgtccctttacacaatacatggtatttaagttttggttactttcagctcactgaaaagtgaaaggtgaaaaaggaagattcaccagaactttcacaagctttccctcaaaaaggccattgaaaaagattattctgagtcagggtcatctgttaaccaatataaaaggatccgacccacagataacgttgtaataaagcagtattaggccaggcgcggtggctcacacctgtaattccagcacctcggtaggccaaggtaggtggatcacttgaggtcaggagtttgagaccagcctggccaatgtggtgaaaccccatctctactaaaacctgtgc

SEQ ID NO: 133107 - DNA, 429 bp, Homo sapiens
ctaacttccacaggtctgcgcccctgcaagagcctggctttgtttactttctgcacctccacagctgtggtgctcctgaaggcaggtgccatttcctttttctagaaggtgctcatcccctttgatctgcgctggcctcttcaccacctccttcaccagctgcagcactgagtctgtctgcagggtgctgagagcacagaccaggtcgacgagggtgtgctggacgtgtttgccacggggaccattgggcttgtgggtggcacccctggtggctgtgtacgctgtagccacgccgtttgtaacgccagcccttcgaaaagtctgtttgccgtttgtacctgcaactacgaagcagattgaaaatgttgtgaaaatgttgcgatgccgaagaggatcccttgtggacatcggtagtggggacggacgcat

SEQ ID NO: 133108 - DNA, 1509 bp, Homo sapiens
  misc_feature (1)...(1509): n = a,t,c or g
tttttaaaaacgctgttggaaatctcgcgatggagggaggaggaggtatacccctagaaacacttaaagaagaaagtcagtcaagacatgttctacctgcaagttttgaagtcaacagtttgcagaaaagcaactgggggttcttacttactgggcttgtgggtggcaccctggtggctgtgtacgctgtagccacgccgttttgtaacgccagcccttcgaaaagtctgtttgccgtttgtacctgcaactacgaaggcagattgaaaatgttgtgaaaatgttgcgatgccgaaggagggatcccttgtgggacatcggtagtgggggacgggacggcattgttcataggcggctgcgaagaaagggtttcacagcagttgggtttatggaatttaaacccatgggctagttttgggtatttcccagatacccgcgcttggcgagaaggtgtgcatggatctgccaaattttatatttcagatttgtggaaggttactttttcgcagtactcgaacgttgttattttcggtgtgcctcagatgatgctgcagttggagaagaaacttgaacgtgaacttgaggatgatgcacgagttattgcttgccggttccctttcccacattggactccagaccacgtcacggggaaggggatagacacagtgtgggcatatgatgcaagcacttttagaggccgtgaaaagaggccctgtacatcgatgcatttccagctgcccattcaagcataaacttgactggggagtgtttttntctgaaatattgtagtcttccctgatcttgtagagacttacagctgtgtncccttagcaaaaggagcataattgtctttggtttggaatgagaaattactattactttccttaactgttggagaaaacaaacgaaggaaaaacaggtagatttaaaatctgcttttgatgctattttcttaaaaattgtacttactgcctttccatgcacctgggatgcatgaaaagatgaataagtgatggtcatggttatgggtagggaaaataagatgccaatagctccttcacattataaacaatatgggcttaatggcctcgataaggaggaantgattttttaaagacagtatatattaccaactgtttgtagtatcctattaactttgttcatacttaagttgtatctctttcactaaatctacttcagggccaaaattaattttctaaaggattcagagggggcgtttatattttataacatttattaggaaataatttgttccaccactagattactgtattttatggaatctaagctgtatatgtgtacatttgtatacatgtatgtgtaaatgtaagcctgacgtgggttcagattccagttttgtcatcagcaagaggcctcggacccatgacttactgcctctgagccttggctttctgtgtatctctgccactgcgataatggtacacataacagtggagtggggaccaatttctaaaactcatggcacct

SEQ ID NO: 133109 - DNA, 1591 bp, Homo sapiens
tgtggtggaattccggagagagtgaggaggctgcgtctggctcccgctctcacagccattgcagtacattgagctccatagagacagcgccggggcaacgtgagagccggacgggcacatgggcgactctgtgcctcgctgaggaaaaataactaaacatggggcaaaggagatcctaagaagccgagaggcaaaatgtcatcatatgcattttttgtgcaaacttgtcggggaggagcataagaagaagcacccagatgcttcagtcaacttctcagagtttttctaagaagtgctcagagaggtggaagaccatgtctgcttaaagaggaaaggaaaatttgaagatatggcaaaagcgggacaaggcccgttattgaaagagaaatgaaaacctatatccctccccaaaggggaagacaaaaaagaaagttcaaggattcccaattgcacccaagaaggcctccttcgggccttctttcctcttcttgctctgagtatcgcccaaaaatcaaaaggagaacatccttggcctgttccattggtgatgttgcgaagaaactggggagagatgtgggaattaacactgctgcagatggacaagcagcccttatgaaaagaagggctgcgaagctgaaggaaaaatacgaaaaggatattgcctgcatatcgagcctaaaggaaagcctgatgcagcaaaaaaagggagttgtcaaggctgaaaaaagcaagaaaaagaaggaagaggaggaagatgaggaagatgaagaggatgaggaggaggaggaagatgaagaagatgaagaagatgaagaagaagatgatggatgatgaataagttggtttctagcgcagttttttttttttcttgtctataaagcatttaaacgcccctgtaccacaactcactcccttttaaaggaaaaaaatggaaatgtaaggctgtgtaagatttgtttttaaactggtaccagtgtctttttttgtatagttaacacactaccgaattgtgtctttaggatagccctgtcctggtggtattttcaatagccactaaccttgcctgggtacagttatggggggttgtaaattggcatggaaatttaaagcaggttcttgttggtgcccagcccaaattagttatatatggggatggtagtttttttcatcttcagttgtctctgatgcagcttatacgaaataattgttgttctgttaactgaataccactctgtaattgcatcagagacaactgaagatgaaaaaagttgcagcgtgttttgttgacattctgaatgcttctaagtaaatacaattttttttattagtattgttgtccttttcataggtctgaaatttttcttcttgaggggaagctagttttttgttttggccctttttgattcacaggatttattacggggttttccttttcttatagtgggcaaaaaaaaagcttttgtttaccccccctgcttataatacggggggaaaggtaatttggaaaaagttttcttccatatgggaacatcaaaaatttgagtgagtaaaaaaatttcacttggcccctttacttttacaaactgaaaag

SEQ ID NO: 133110 - DNA, 421 bp, Homo sapiens
  misc_feature (1)...(421): n = a,t,c or g
ctctctccaagtccttcctttaatgtcaggtagtgcttcaacccaaacacaagcagtatacataccatagagaaagggacctgagggcatctgagtcatgcatggtgtggtacatacaaaccttggcccagcccaaaggagcagtcaagggcctggaagaaagatggtttgctctttccccctcctcctctctctttcctaccgggcttaaagtccgtggaagagaaagtttttaatcagtggaactgataaggcctcagggcgtnggagggtagatttggttgttcagtaatatcagcctgacctctacatctagacaaggaagtgaggagggtgattgctgggcattggtgtaggtttatgacggagcagcataagattttccgtgccctgtgaacacgtatacaaacattcatagccc

SEQ ID NO: 133111 - DNA, 1161 bp, Homo sapiens
atgaagaccctgcccaacatctctgacctgtgtttgagagatgtgcccccagtccctaccctggctgacatcgcctggattgctgcggatgaagaggagacatatgcccgggtcaggagtgatacgcgccccctgaggcacacctggaaacccagccctctgattgtcatgcagcgcaatgcctctgttcccaacctgcgtgggtccgaggagaggcttctggccctgaagaagccagctctgccagccctaagccgcactactgagctgcaggacgagctgagccacttgcgcagccagattgcaaagatagtggcagctgatgcagagctgcagtggaatgggaaacagaggccaccccatggcaccagggagtgtgaagagaagaggatgaaggaagacttcactgattgctcctgctgctgcaagaagcacttgaggcagctggtgtgggagccccaaatcacccatcttcatattcatgcagaagacactctcctgcctttctatcttggggaaaaggacgatgtcacttatgcaataaagcccacttgctggccggggcttgacattattccttcctgtctggctctgcaccgtattgaaactgagttaatgggcaaatttgatgaaggtaaactgcccaccgatccacacctgatgctccgactggccattgaaactgttgctcatgactatgatgtcatagttattgacagcgcgcctaacctgggtatcggcacgattaatgtcgtatgtgctgctgatgtgctgattgttcccacgcctgctgagttgtttgactacacctccgcactgcagtttttcgatatgcttcgtgatctgctcaagaacgttgatcttaaagggttcgagcctgatgtacgtattttgcttaccaaatacagcaatagtaatggctctcagtccccgtggatggaggagcaaattcgggatgcctggggaagcatggttctaaaaaatgttgtacgtgaaacggatgaagttggtaaaggtcagatccggatgagaactgtttttgaacaggccattgatcaacgctcttcaactggtgcctggagaaatgctctttctatttgggaacctgtctgcaatgaaattttcgatcgtctgattaaaccacgctgggaagatagataa

SEQ ID NO: 133112 - DNA, 654 bp, Homo sapiens
atgcgctggttctccagaggccaggcaaagagacaaaagattggtggtttggaagtacacccaccccccggcttgaaagaaaaaagccttaaggtgcattacaatgacatcaccgaggagacagaggtggaggtccctgagcttccatcagtccccctgctttgttctgccagccctgaatgttgcaaaccagaacacaaagctgcctgcagttcgtctgaagaggatgactgcgtctctttgtccaaggccagcagctttgcagacatgatgggtatcctgaaggactttcaccgaatgaaacagagtcaagatctggattttgccgatttcggaaccaccatcaaacaggattttcgcttggtggggcaaaccagcgtggaccgcttgctgcaactctctcagggccaggcggtgaagggcaatcagctgttgcccgtctcactggtgaaaagaaaaaccaccctggcgcccaatacgcaaaccgcctctccccgcgcgttggccgattcattaatgcagcggcacgacaggtttcccgactggaaagcgggcagtgagcgcaacgcaattaataaagtggaatactttcgggcatcgatggtacgggactcgggggatgtggaaaagataaaaatagagttacattggtag

SEQ ID NO: 133113 - DNA, 2220 bp, Homo sapiens
acgccaagcttggcacgaggctggccggcccaaggtggaatgaggggccgtgaggtgagagagtccgggagcccgagcttgagatggcctgatatgaaggagtcacgacctcccgcctcccggagctgcccaggggctgccttgtccttcaagagcaggagctggttcaaatgtcaggaatggaagccactgtgaccatcccaatctggcaaaacaagccacatgggtgctgctccgaagtgtagtaagaagaattgggaccaacctacccttgaagccgtgtgcccgggcgtcctttgagaccctgcccaacatctctgacctgtgtttgaagagatgtgcccccagttccctaccctggttggacttggcttggatttcttgcggaatgaaaaggaagccaaaaggcccgggtccaggagtgatacgcgccccctgaggcacacctggaaacccagccctctgattgtcatgcagcgcaatgcctctgttcccaacctgcgtgggtccgaggagaggcttcttgccctgaagaagccagctctgccagccctaaagccgcactactgagctgcaggacgagctgagccactttgcgcaccaagatttgcaaagatagtggcaagctgatgcagcttcggcttcattaacgccagatttcttatctccaggaagttcaaatgtctcttctccctttaccttgttttggatcctcattccactctacaacttccttttgccattagtgacatcaccgaggagacagaggtggaggtccctgagcttccatcagtccccctgctttgttctgccagccctgaatgttgcaaaccagaacacaaagctgcctgcagttcgtctgaagaggatgactgcgtctctttgtccaaggccagcagctttgcaggacatgatgggtatcctgaagggacttttcaccggaatgaaacagagtcaagatctgaaccggagtttattgaaggaggaagaccctgctgtgcttatctctgaggtcctaaggaggaagtttgctctaaaggaagaagatatcagtagaaaaggaaattgacaaccctcagctctgcaaactcagtctcatgctcctggaataccttcaatagctgccttcctcaccgcagatgtttctgcctcttaaggatagatcttctgcaacagtcttgcttgacaagctaggagcttgggactgaaagagaagagctggattattatatttcccagactttcaaaccctaggcagaagctaaggcttgtgatttgacctgagacatttgtttcaggtaatcgtgtaggaatgaagtatcttagtttaaagggtaaggagagaagttgtttctggtttttccttggcccctgtgtgaaaatagggtcctaaatgactgactttcactgcattaggaccctataggctgggtctcacaagacactttgtggccccagctgttcactcactctcaggcagctttccttggcaggcaggagcaggggctgaggggaaggggctatgaatgttggaatacgttgttcaacagggccccggaaaatcttatgcctgcctccgtcataaacctacaccaaatgccccagccaatcaccctcctcacttcccttgtcttagatgtaagaggtccaggctgctgaaccagcccaacacatgggcttactgctgggaaagcctgggctgtttttttttcttaaacaccattttatattactgaacaaccaaatctaccctcccaacgccctgaggccttatcagttccactggattaaaaactttctcttccacggactttaagcccggtaggaaagagagaggaggagggggaaagagcaaaccatctttcttccaggcccttgacttgctcctttgggctgggccaaggtttgtatgtaccacaccatgcatgacttcagatgccctcaggtcccttttctctatggtatgtatacttgcttgtgtttgggttgaagcacttaccttgacattaaaggaaggacttggagagagaatgcaaaaaaaaaaaaaaaaaaaaacgtttgcggccgccgcagccggccccggcccttgggcagcttggcgggccgcacgggctgcgggaactcgtcggccaggcacacgaagtgcggcatcaccgcctggtaactggagcagatgcccatcagctcgccgggcttggcggccatggcgcctccggcgtc

SEQ ID NO: 133114 - DNA, 1413 bp, Homo sapiens
atgcatgaaaagtcaaaggggaagatggagggttatcccactgagggctgtccatcattcagcctccaggcaaggctgcaactgaaatgcagcaaagacatggtgccatatgatggcaaagagctgcctccagggatccagatcaactactatgatcttagggccaagcttcgtgtccccctcctgctctgggccagcagaccccggcttcctcgtacacagtccagatccaaacgtatgctccatcctcacctcacccccgccagggtcccggacagggatcttcggaccctcgagggctcagaggtgccattccgaggggcaggcaaggacagggagtgtagcagcaaggcccccgctgccgtcctccatcctcccctgttctgccacacatcccccaactcagctgctgtggccacgatggcagggatcctgaggaagggcttggcatcttggagctcactctgctacatcatgcacacccctggtctccaaattcctggtgaaaggactcttccttcgccccatggagagttccctgcacactctgagcctcacagtcgagatcaaacaagccccatggccactaccaagcatgaggtccaaccacttccccaggcatctctctcccagccttcactggggatcgggtgtttggtggactggctgaggcagctcaggaccacacaggggtctctcaagatgccgcccaggattctacatgggaaagaccctgagatgcttctgcaagccttggctgctctgacctggggttccaactcccggccccccttgccaggccaaagagaggaagcctcccttcatggggaactgccccctgtgatccagggtcccttggccctcaaggcttccagaggagctgctgccatgccacttgctccccctgtggctggggaggcagctggccctgcatccagtcaccaatcactttccccttcacaggaccctactcccttacctggtgcagataggagggaaaaggaaaggggtggagaggagggctcgtcctggcctcagacaccccgactgaccactcacaccacctcaccaccacctgagaaacaacagcaaatcgaatctcctccaattcgtctctcctctttcaaaactggcttccacctggcctcctctgggcattcttatgcaatcaagcccaattcaaagaccaaggcagagaaagtggggcaggtgagggtgcctaggagccatacaatacgagaacagcgccagggaaagagacctggggaacatcacagacgaacagagagggacgccaagccacagggagaggaggaccaccaggcgactgtggtatcacagaagctgggtacagacagaaggttgatcaagaagcagagaacgtccgtgctgtcagccacagctgagtcgtga

SEQ ID NO: 133115 - DNA, 475 bp, Homo sapiens
  misc_feature (1)...(475): n = a,t,c or g
gggtctgtgggttctggcaccaccttgaaccaactgggcttctggtcatcccctggcacctctcctttggagccaccttgtccctggctagacagtcacattttcccagtgccgttttggaaagatgttgcctttggagaaggcgtttgcctccccccaggagctccccagccccgccggatctgcccacgccggggtcagcagccggagttccagcaggaagaacccgagaccatccctgagaggacccctgctgaccctggagttctcccgcctgcgtttccgggaatttgtctacccaggaggctgcgggccccaccagaccctggcccggctgcatgagctgtgncgccagtggctgatgcctgaggcgcctccaaggagcagatgctggagctgctggtgctggagcagttcctggcatcctgcctgataaggtccggccctgggtggtggcacagtaccctgagagctg

SEQ ID NO: 133116 - DNA, 396 bp, Homo sapiens
tcattcctctggcttccttacatctggctcttccaggacatcagcgaggccctccaccagggaggctgccttcttgcagctctcagggtactgtgccaccacccagggccggaccttatcaggcaggatgcccaggaactgctccagcaccagcagctccagcatctgctccttggagcgcgcctcaggcatcagccactggcggcacagctcatgcagccgggccagggtctggtggggcccgcagcctcccacctgctcgtgcccacccacctgctcggtgttggcagggccgtcctcttcggtctttgcttctctgaccctcctctgttccagaaacagggggtccggagaaagccaggcttgtaaaggccctgtctccaaatacagccccat

SEQ ID NO: 133117 - DNA, 1652 bp, Homo sapiens
tcaatgaaaagatcaccttatgtagcccaaggagtttagtctcctttggctcagacaagacaagatctttattaagtgttttcaacttattttgcgtcacaagcttcccagcaagaaatgtcttacattgcaaccagttctcacatttaagatgtatgggttaaaagtttcacaaaacaagtatttgcctttactacatgatgcattctggcctactttattctgcttcattgctgtgtaatgctggtgaccacttgctaaattgattttccccattttacctaaaatggggctggggaccccacgggtctgaaaaacccctgccttaaggctgcaaagcattttctggtggatctctggcgaggctactcccatataggggtaaacacacggcgaggggtaaactagggggaacaggcttctggcttttggcaggattaggaaggtggaggttggacattcacggccaggtacgggaaaggggcttaaacagctggacaaatttccaacttgagcaacccctgggggagcgcaaaacaggagggaatcggggcaagggtgacttgaagaaagcactggcagaatcacgcactttaaggcaactctacactgcacaatgtcaaataacctagcatggggcggcactaaatggctgcaggaaagccgagtcttcttccacatccggcggctcccctcggatgcgagcgctggcccagggtgtgtttacagagtggtgcccgacgggggatcgcaagggcgtccccagggggcgcctccgtaggcagctcaggcagcaccccgcgggggcggcctcctcgcaggcgcacccagcgctctcctgccgcctccgccttctggaacaagtgtgggacctggaggcctccaacaacggaggccaccgacaggacaggaagacagccccactgagcccgggttctggaaaccgcgcctttggaggtctcacctggccactagcttggccacaagatgcacgatgcaaggagagcctgccagagcgcaccctcctggagggaggggcccggctgccagcgaagagagacatcagcgaggccctccaccaggaggctgctttgcagctctcaggtactgtgccacacccaggccggacttatcaggcaggtgcccaggaactgctccagcaccagcagctccagcatctgctccttggacgcgcctcaggcatcagccactggcggcacagctcatgcagccgggccaggtctggtggggcccggcagcctcctggtagacaaattcccggaaacgcggcgggagaactccagatccggcgggctggggagctcctgggggaggcaaacgccttctccaaaggcaacatcttccaaaacggcactggaaaatgtgactgtctagccagggacaaggtggtccaaaggagaggtgccagggatgaccagatgcccagtgggctcagtactatggacatttggggctggatcatttttgttgtggaagtccatcctgtgcattataggatatttagcagcatccgtgctcctaggaacatctgccccctagtcagactgacaaccaaaatcatctcagatattgccaagtatcttctggaagtagaaacatccctggttaaaaatactgctctgtgggcttag

SEQ ID NO: 133118 - DNA, 1161 bp, Homo sapiens
atggagctgaaagccaaggctcgagaactacgtgaagaatgcagaagcctcaggagccgatgcgatcaactggaagaaagggtatcagtgatggaaaatgaaatgaatgaaatgaagcgagaagggaagtttagagaaaaaagaataaaaagaaacgaacaaagccttcaagaaatatgggactatgtgaaaagaccaaatctacatctgattggtgtacctgaaagtgacggggagaatggaaccaagttggaaaacactctgcaggatattatccaggagaacttccccaatctagcaaggcaggccaacattcagattcaggaaatacagagaacgccacaaagatactcctcgagaagagcaactccaagacacataattgtcagaatcaccaaagtggaaatgaaggaaaaaatgttaagggcagccagagagaaaggtcgggttccccacaaagggaagcccatcagactaacagcggatctctcgtcagaaactctacaagccagaagagagtgggggccaatattcaacattcttaaaagaattttcagctttccacagcgcgggggaacgggaggccgcaggatggtcaagctgacggcggagctgatcgagcaggcggcgcagtacaccagcgcggtgcgcgaccgggagctggacctccgggggtataaaattcccgtcattgaaaatctaggtgctacgttagaccagtttgatgctattgatttttctgacaatgagatcaggaaactggatggttttcctttgttgagaagactgaaaacgttgttagtgaacaaaacagaatatgccagtactggatttccagaaagtgaaactaaagagcgtcaggaagcagagaaaatgttcaagggcaaacggggtgcacagcttgcaaaggatattgccaggagaagcaaaacttttaatccaggtgctggtttgccaactgacaaaaagaaaggtgggccatctccaggggatgtagaagcaatcaagaatgctatagcaaatgcttcaactctggctgaagtggagaggctgaaggggttgctgcagtctggtcagatccctggcagagaacgcagattggggcccactgatgatggtgaagaagagatggaagaagacacagtcacaaacgggtcctga

SEQ ID NO: 133119 - DNA, 431 bp, Homo sapiens
caggaaactggatggttttcctttgttgagaagactgaaaacattgttagtgaacaacaacagaatatgccgtataggtgagggacttgatcaggctctgccctgtctgacagaactcattctcaccaataatagtctcgtggaactgggtgatctggaccctctggcatctctcaaatcgctgacttacctaagtatcctaagaaatccggtaaccaataagaagcattacagattgtatgtgatttataaagttccgcaagtcagagtactggatttccagaaagtgaaactaaaattttaatccaggtgctggtttgccaactgacaaaaagaaaggtgggccatctccaggggatgtagaagcaatcaagaatgccatagcaaatgcttcaactctggctgaagtggagaggctgaaggggttgctg

SEQ ID NO: 133120 - DNA, 584 bp, Homo sapiens
cctgggatcccctccttggagctaggagaatgaactttcttcagggagctctaccaaagaaagaagaccactgtgtcttctcttaatttgaaattgctttttggtattttcaccagcccggagtactgtaggagagttcgcttccatgtcttctgaggaatgcatctaaatgcatgtggtattcctatttccattaactctgtgtgtggtgtcgctgtatgagcgtcaggaagcagagaaaatgttcaagggcaaacggggtgcacagcttgcaaaggatattgccaggagaagcaaaacgtaagacacggatatccaacttaactctacttcaccttcagaaacatgatctgatctgtctggcagttcgtctcctacaaaattaaccaaaaactctgacatattaatgtggtattaaatttgagtgcttatagtccatgtacatcaatggtccacacatcacaagaaatttctaccagcttagcagagcaaatatttcagtagtcagtcttcatgtgataccatgtacatcctattttctatataggaagatgaactggatggtgtttctgaaggagagagtt

SEQ ID NO: 133121 - DNA, 517 bp, Homo sapiens
attttgaaatctttgtgacccttttcctttgaaattgagcatcccttccagtacctgccaaagacagactagaccgtccctggacgataagctcctcaaaggcaggtgctgcttttgatctttttgtacctacttcagtgtgtaacaaacagtggccacagaacaaacacttgcatgctaagggaatggattctctaaaattgataactacttttgctttggtggtttcctttagggcccactgatgatggtgaagaagagatggaagaaagacacagtcacaaacgggtcctgagcagtgaggcagatgtataataataggccctcttggaacaagtcttgcttttcgaacatggtataatagccttgtttgtgttagcaaagtggaatctatcagcattgttgaaatgcttaagactgctgctgataattttgtaatataagttttgaaatctaaatgtcaattttctccaaattataaaaataaactcccctccctatgctaaaaaaaaaaaaa

SEQ ID NO: 133122 - DNA, 1155 bp, Homo sapiens
  misc_feature (1)...(1155): n = a,t,c or g
atagattagcgattgcatcnggcccggaacccttggtcgacccacgcgtccggctggcgggaggccacgggctttccacagcgcgggggaacggcaggctgcacgatgggcaagctgacggcagaggctgatcgagcaggcggcgcagtacaccaacgcggtgcgcgaccgggagctggacctccgggggtataaaattcccgtcattgaaaatctaggtgctacgttagaccagtttgatgctattgatttttctgacaatgagatcaggaaactggatggttttcctttgttgagaagactgaaaacattgttagtggacaccaccagaataatgcggtataggtgagggacttgatcaggcttctgccctgtctgacagaacttattctcaccaataatagtctcgtggaactgggtgatctggaccctctggcatctctcaaatcggttgcttaccctaacatacctaagaaatccggtaacccataagaagcattacagattgtatgcgatttataaagctccgcacgtcagagtactggatttccagaatgtgaaactaaaaagagcgtcagaaagcagagaaaatgtccaagggcaaacggggtgcacagcttgcaaaggatattgcccaggagaagccaaaactttttaattcccaggtgctggtttgcccaactgaccaaaaaggaaaggtgggcccatcttccaggggatgtagaagcaatccaagaatgcccatagcaaaatgctttcaactctgggctgaaagtggagcggctgaaaggggtttgctgcaagtctgggtcagatcccctggcagagaacgcagatccggggcccactgatgatggtgaagaagagatgggaagaagacacaagtcaccaaacggggtcctgagcagtgaggccagatgtataataatagccccctcttggaacaagtcttgcttttcggaacatggtataatagccttgtttgtgttagccaagtggaattctatcagtcattgttgaaatgcttaagactgctgctgataattttgtaatataagttttgaaatctaaatgtcaattttctacaaattataaaaataaactccgactcactatgcaaaaaaaaaaaaaaaaaaaaaaaaaaaagtcgtatcg

SEQ ID NO: 133123 - DNA, 455 bp, Homo sapiens
gccatcaactataatgaaaagatctacgaactgcgtgtgatggagaccaaaccccgacaaggcagtgtccatcattgagtgtgacatgaacgtggactttgatgctcccctggctacaaagaacccgaaagacaagtccagcatgaggagtcgacagaaggtgaagccgaccacagtggctatgctggagagctggcttccgcgctttctctggatctggcaatagactggatggaaagaagaaaggggtagagcccagcccctccccaatcaagcctggagatattaaaagaggaattcccaattatgaatttaaacttggatgaagctggaggcagattcgtcgctttctctggagaaggacagtcattgcgtaaaaagggaagaaagccctaagtgaggactgttggctgattggaaaataataaaagaatcatttgcaacaaaaaaaaaaa

SEQ ID NO: 133124 - DNA, 1156 bp, Homo sapiens
ggcacgaggaagagcggtcggcggggtttcttcgttgcattgcctgagaggagcggagtctgccaggtggtgtccatcatgttctctttcaacatgttcgaccaccctattcccagggtcttccaaaaccgcttctccacacagtaccgctgcttctctgtgtccatgctagcatggcctaatgacaggtcagatgtggagaaaggagggaagataattatgccaccctcggccctggaccaactcagccgacttaacattacctatcccatgctgttcaaactgaccaataagaattcggaccgcatgacgcattgtggcgtgctggaatttgtggctgatgaaggcatctgctacctcccacactggatgatgcagaacttactcttggaagaagacggcctggtccagttggagaccgtcaaccttcaagtggccacctactccaagagtaagttctgctacctcccacactggatgatgcagaacttactcttggaagaaggcggcctggtccaggtggagagcgtcaaccttcaagtggccacctactccaaattccaacctcagagcgctgacttcctggacatcaccaaccccaaagccgtattagaaaacgcacttaggaactttgcctgtctgaccaccggggatgtgattgccattaactacaatgaaaagatctacgaactgcgtgtgatggagaccaaacccgacaaggcagtgtccattcatgagtgtgacatgaacgtggactttgatgctcccctgggctacaaagaacccgaaagacaagtccagcatgaggagtcgacagaaggtgaagccgaccacagtggctatgctggagagcttggcttccgcgctttctctggatctggcaatagactggatggaaagaagaaaggggtagagcccagcccctccccaatcaagcctggagatattaaaagaggaattcccaattatgaatttaaacttggtaagataactttcatcagaaattcacgtccccttgtcaaaaaggttgaagaggatgaagctggaggcagattcgtcgctttctctggagaaggacagtcattgcgtaaaaagggaagaaagccctaagtgaggactgttggctgattggaaaataataaaagtttcatttgca

SEQ ID NO: 133125 - DNA, 696 bp, Homo sapiens
atggaacagtttcatcccaaaaccatccccaccaccctgtccgtggaaaatttgtcttccacgaaactggttcctggtgccaaaaagatatattgggttgggcccatcataggagctgtcctcgctggtggcctttatgagtatgtcttctgtccagatgttgaattcaaacgtcgttttaaagaagccttcagcaaagctgcccagcaaacaaaaggaagctacatggaggtggaggacaacaggagtcaggtagagacggatgacctgattctaaaacctggagtggtgcatgtgattgacgttgaccggggagaggagaagaaggggaaagaccaatctggagagttaggggagcctgttcctggtaaaaaggagggaacccgaaagaaagtccagcacgaggagttgacagaaggtgaagccgaccacagtggctatgctggagagctgggcttccgtgccttctccggctctggcaacagactggatggaaagaaagaaagcccctccccaatcaagcctggagacattaaaagaggaattcccaatcatgaatttaaacttggtaagacacctttcatcagaaatgcatgtccccttgtcaaaaagtttgaagaggatgaagctggaggcagattcgttgctttctctggagaaggacagtcgttgagtaaaaagggaagaaagccctaa

SEQ ID NO: 133126 - DNA, 1488 bp, Homo sapiens
ccggcttggcgcggcggcagcggcagcggcggctgggagagcggtcggcggggtttcttcgttgcattgccctgagaggagcggagtctgccaggtggtgtccatcatgttctctttcaacatgttcgaccaccctattcccagggtcttccaaaaccgcttctccacacagtacccgctgcttttctttgtccagtgctagcagggcctaatgacagggttcgattggggaaaaggaggggaagataattatgccacccctcggccctgggaccaaactcagccgactttaacattaccgtatcccaatgctgttcaaacctgaccaataagaattccggaccgcatggacgccattgtggcgttgctgggagtttgtgggcttgatgaggggcatctgcttacctcccacactgggatgatggcagaacttactctttgggaaggaaggcggcctgggtccagggtgggagaagcgtcaacctttcaagtgggccacttatttcaaatttccaacctcagagcccttgactttctgggacatcaccaaccccataagccgtttttgaaaaccgcacttaggaactttgccctgtcctgaccacccggggatgtgattggccatcaactataatgaaaagatcctacggaactgcgttgtgatggagacccaaaccccgacaaggccagtgtcccatcattgaagtgtgaaccattgaaccgtggaactttgattgcttccccctggggctaccaaagaaccccggaaagaccaagtccagccatgaggagtccgaacagaaggtgaaagccgaccccacagtggcctatgcctggaagagcctgggcttcccgcgcttttctcgtggatctgggcaatagacgtggatggaaagaagaaaggggtagagcccagccccttccccaatcaagccctggagatattaaaagaggaattccccaattatgaatttaaacttggtaagataactttcgatcgagaaattcacgtccccttgtcaaaaaggttgaagaggatgaagctggagggcagattcgtcgctttctctggagaaggacagtcattgcgtaaaaagggaagaaagccctaagtgaggactgttggctgattggaaaataataaaagaatcatttgcaacatcttggcttttagttactggcactgacagggacgagcctcatcagagaatactctgttacttaagatttatttagagttacctaagaattataagttgacttgaaagtggacagcagactttgtagtgtatgttgattgggaaagacaagagctgtccctgagggccctgtgtgggggtttaaaaaagggaaaaaatttaaagctgcctcctcacctcttcacgctttcagcttgaggggagctcccactgcctcagcaggagcaattctgcatccctaattctgtcaaaacctatgaaggtgactaaattgtctaacatgaaaaaa

SEQ ID NO: 133127 - DNA, 415 bp, Homo sapiens
agcggaggaggcaggaaccggagcgcgacaggtagctgggtgggcaccatggctgggatcaccaccatcgaggcggtgaagcgcaagatccaggttctgcagcagcaggcagatgatgcagaggagcgagctgagcgcctccagcgagaagttgagggagaaaggcgggcccgggaacagaggtatgaaggttattgaaaaccgggccttaaaagatgaagaaaagatggaactccaggaaatccaactcaaagaagctaagcacattgcagaagaggcagataggaagtatgaagaggtggctcgtaagttggtgatcattgaaggagacttggaacgcacagaggaaccgagcttgagctggcaagagtctaagtgttcttgagctggaggaggagctgaagaatgtcaccac

SEQ ID NO: 133128 - DNA, 421 bp, Homo sapiens; identical to SEQ ID NO: 125684

SEQ ID NO: 133129 - DNA, 388 bp, Homo sapiens; identical to SEQ ID NO: 112984

SEQ ID NO: 133130 - DNA, 1335 bp, Homo sapiens
atgaatgctgggagacgtggattctggtgtttagctcagggagcttctgcacgacagaggaaagttggtggggaaatggaaaagtacagagacacctgggagagggagaagtggctcagaggagacgtggagggcaggtatgtaatgcaagaaagccaggcgagagtgacagaggtgcaaggaggcaaaagaggcagaaacagaaatgccagagaggcgtttacagagattgacaaacaaagagggagaagctgcaagaaagaagcaggagtggagaaatggacagagacaatgggaagggaaagaagagagaggaaagactggaacagtttggagagcttagaagaagacaggaagatgagagaaagtttggaacatgctagagacttgttaaattgttgtgaccaaaatgctgatcatcatatggacagtgaagtccaggctgaggtggtctcagaaggagatgaagaacttattgggaaatggagtaaagcatactgccataggtgtgagcaaaaagatgatctgaaatgggaacttatatttaaaagggaagcagagcataaaagtttggaaattttgcagcctgaccatgtggtagaaaagaaaaacccgggaggaggcaggaaccagagcacgagcagtagctgggtgggcactgtggctgagatcaccaccatcgaggcagtgaagtgcaagatccaggttctgcagcagcaggcagatgatgcagaggagcgagctgagcacctccagcgagaagttgagggagaaaggcaggcccgggaagaggctgaggctgaggtggcctccttgaaccgtaggatccagctggttgaagaagagctggaccatgctcaggagtacctggccactgccttgcaaaagctggaagaagcggaaaaagctgctgatgagagtgagagagaagctaagcacattgcagaagaggcagataggaagtatgaagaggtggctcataagttggtgatcattgaaggagacttggaaggcacggaggaacgagctgagctgggagagtcccgttgccaagagatggatgagcagattagactgatggaccagaacctgaagtgtctgagtgctgctgaagaaatgtactctcaaaaagaagacaaatatgaggaagagatcaagattcttactgataaactcaaggaggcagagaccagtgctgagtttgctgagagatcggtagccaagctggaaaagacaattgatgacttggaagataaactgaaacgcaccaaagaggagcacctctgtacacaaaggatgctggaccagactctgattgacctgaatgagatgtag

SEQ ID NO: 133131 - DNA, 630 bp, Homo sapiens
  misc_feature (1)...(630): n = a,t,c or g
ccccttctttcttgccccagtctccagttctccagtgttcacaggtgagcctaccaacagccactgctcatgatggaggccatcaagaaaaagatgcagatgctgaagttagacaaggagaatgctctggatcgggcagagcaagctgaagctgagcagaagcaggcagaagaaagaagtaaacagctggaggatgagctggcagccatgcagaagaagctgaaagggacagaggatgagctggacaagtattctgaagctttgaaggatgcccaggagaagctggaactggcagagaagaaggctgctgatgctgaggctgaggtggcctccttgaaccgtaggatccagctggttgaagaagagctggaccgtgctcaggagcgcctggccactgccctgcaaaagctggaagaagctgaaaaagctgctgatgagagtgagagaggtatgaaggttattgaaaaccgggccttaaaagatgnnnnnnnnnnnnnnnnngggggccgttttaaaggatcaagttttacttcccggggcgggcaaggagaaaatttttttttggggccccctaaatccatttccggggccggggtttaacaacgtcgggaggggaaaaacccgggggtc

SEQ ID NO: 133132 - DNA, 2586 bp, Homo sapiens
  misc_feature (1)...(2586): n = a,t,c or g
ggcacgaggagtgacggtgccaccgcggcgcgtgagtttcgccctgtcttgtattaagtctgctcttccaggttcctggcgcttctgtacctgggacttgggatccccacaaacctggaaattctcagccgtcttccttcactcagagcaaattgagacgaccccgtgagaggccgtggagaggagtctgcaatgccgagtggaggaaggaggaaccggagtgtgagcagttagctgggtgggcaccatggctgggatcaccaccatcgaggcggtgaagcgcaagatccaggttctgcagcagcaggcagatgatgcagaggagcgagcttgagcgctcccagcgagagtttagggaagaaaggcgggcccgggaaccaggcctgaggctgaggtggcctccttgaacccgtaggatccagcgtggttgaagaagagcttggaccgtgctcaggagcgccttggccactgcccctgcaaaaagctttgaagaagctgaaaaaagcttgctgatgagagtgagagaaggtattgaaggttatttgaaaacccgggccttaaaaagattgaaggaaaagattggaacttccagggaaatcccaacttcaaagaagcctaagcaccattgccggaaagaggcagattaggaagtatgaagaggtgggctcgtaagttgggtgatcatttgaaggaagacttggaacgcacagagggaacgagctggagctggcagagtcccgttgctgagagatcgatgagcagatcagactgatcgaccagaacctgcagtgtctgagtgcagctgaagataagtactctcaaaaagaagacaaatggtgaggaagagatgaagattcttactgataatctcaaggaggcagagacccatgctgagttggctgagagatcagtagccaagctggaaaagacaattgatgacttggaagataaactgaaatgcaccaaagaggaacacctctgtacacaaaggatgctggaccagactctgcttgacctgaatgagatgtagaatgccccagtcccaccctgctgctgctccttcctctgaccctgactctgcctgaggccagcctgcccgaagctggacctttaactgagggctgatctttaactgggaaggctgctttctccctttcaccaccccctcctttccctgtgtcttttttcgcccaaactgtctcttgccttcttcccgggagaaatccagctggggntagaggctggagcacctttgggaaacaacattttaaggggaatgttgaggcacaatggcattaatgtttttaaaaaggcatgttgttgatgtacacattttgtaaattacctttttttgttggttttgtaggcaaccatttgtaaaaacattcccaaataattccacagtcctggaaggcaggcaatcgaaatcccctttcttaactttttggaaggtgacttttcaccttaaatgcatattccccctnttcccatagaggagaggaaaaggtgtaggcctggcttaccgagagccaaacagagccaaggggagactccggctgtgggaaacctcattgttctgtacaaagtactagctaaaccagaaaggtgattccagggaggagttagccaaacaacaacaaaaacaaaaaatgttgctgtttcaagtttttcagcttttaagatatctytyggataatgttatttctatttttttatttttttcattagaagttaccaaattaagatgggtaagacctctgagacccaaaattttgtcccatctctaccccctcacaactggcttacagaatggatcatggtcccccttatggttgagggtgacccacttaattggctttcctggcctccttgaaaagaaaagaaaagaaagaagactgtggtttttggccactggatttagcccatgtggaaactccatctccatcaccccttttctggggtttggaagctggctgttcttctaggaaggtggccatctcaattggtggctttgtatccagtccagtgctgggagaaaatcttcgaatagccttatgtaccaaaacctttttaaattttatattatttttgaaaactttggctttggggtttgtgggcaccctgggccaaccccagtctgggctgtgacaagcctctggcagtccctgggggcttgggcagttttgttggatcttttaagtttccttccctaccccagtcccccatttttctgggtaaggggttctaggggaggtcgtgttaggtgtacaatcctgcagcttattggcttaaaatgtactctccttttatgtggtctctttggggccgattgggaggaagaggaattcaatagtgcaactggttttgatactgaatattgacaagtgtccttttgaaataaagaaccagtccctccnnnnnnnnnnnnngggggggccctttaaagggaacaaattttaattcccgggggtgggaaagaaaaattttttttaagggggccccaaaattaaattccggggccggggtttaaaaaccggggagggggaaaaacccgggggtaccccaaaaaaatcccttttgaaaaaa

SEQ ID NO: 133133 - DNA, 2048 bp, Homo sapiens
gtcgccgctgccgggttgccagcggagtcgcgcgtcgggagctacgtagggcagagaagtcatggcttctccgtccaaaggcaatgacttgttttcgcccgacgaggagggcccagcagtggtggccggaccaggcccggggcctgggggcgccgagggggccgcggaggagcgccgcgtcaaggtctccagcctgcccttcagcgtggaggcgctcatgtccgacaagaagccgcccaaggaggcgtccccgctgccggccgaaagcgcctcggccggggccaccctgcggccactgctgctgtcggggcacggcgctcgggaagcgcacagccccgggccgctggtgaagcccttcgagaccgcctcggtcaagtcggaaaattcagaagatggagcggcgtggatgcaggaacccggccgatattcgccgccgccaagacatacgagccctaccacctgcaccctgaggaaacacaagaccaatcggaagccgcgcacgccctttaccacatcccagctcctcgccctggagcgcaagttccgtcagaaacagtacctctccattgcagagcgtgcagagttctccagctctctgaacctcacagagacccaggtcaaaatctggttccagaaccgaagggccaaggcgaaaagactgcaggaggcagaactggaaaagctgaaaatggctgcaaaacctatgctgccctccagcttcagtctccctttccccatcagctcgcccctgcaggcagcgtccatatatggagcatcctacccgttccatagacctgtgcttcccatcccgcctgtgggactctatgccacgccagtgggatatggcatgtaccacctgtcctaaggaagaccagatcaatagactccatgatggatgcttgtttcaaagggtttcctctccctctccacgaaggcagtaccagccagtactcctgctctgctaaccctgcgtgcaccaccctaagcggctaggctgacagggccacacgacatagctgaaatttcgttctgtaggcggaggcaccaagccctgttttcttggtgtaatcttccagatgcccccttttcctttcacaaagattggctctgatggtttttatgtataaatatatatatataataaaatataatacatttttatacagcagacgtaaaaattcaaattattttaaaaggcaaaatttatatacatatgtgctttttttctatatctcaccttcccaaaagacactgtgtaagtccatttgttgtatttcttaaagagggagacaaattatttgcaaaaatgtgctaaagtcaatgatttttaccgggattattgacttctgcttggaaaaacaaaagaaaacagacacaatgcagcagccagaaaatattagatatggagagattatcaaagtgaaggggaccacatcatatttctgcattttacttgcattaaaagaaacctctttatatacagttgttcctatctctcccgccccaccacacacatatttttaaagtttttcctttttaagaatatttttgtaagaccaatacctgggatgaagaatcctgagactgcctggaggtgaggtagaaaaattagaaatacttcctaattctcaaggctgttggtaactttatttcagataattggagagtaaaatgttaaaacctgttgagaggaattgatggtttctgagaaatactaggtacattcatcctcacagattgcaaaggtgatttgggtgggggtttagtaattttctgcttaaaaaatgagtatcttgtaaccattacctatatgctaaatattcttgaacaattagtagatccagaaagaaaaaaaaaatatgctttctctgtgtgtgtacctgttgtatgtcaaacaggccattaaggtccctgggatttcaccttcctgtccatctctcccctccctccggtatacctttatccctttgaaagggggttgtacaatttggtatattttattggaggggtatctcttattctggattaaataaggatttgtttattgc

SEQ ID NO: 133134 - DNA, 1017 bp, Homo sapiens
atgtgggatgctgagttggagtatatatggtctcctgaaggacattgtctcacccctgcaaggtgttgcgaccgagctggcactgtaactagatcttcaaaaggccattccgcctttctatcaagccagctgcttcggtatgatggagaacatgaaggccatggccctgggcccctcctgtcagtgcctgtggggcctgtggacactgaagcagatgtctgtgtgtcagtgtctctgtgtaggggagctcacggggctcatgacctatgtccccagctagcgtgttcctcagtgggtcatgcctgtatctatatctatacctggcccttcaccccattcctcatggacaaggctgtgtccatcagctacacagtcatgacccccatgctcaaccccatgatctacaccctgagaaaccaggacatgaaagcagccatgaggagattaggcaagtgcctagtaatttgcagggagttaaactttaaagtccagggcagttcccaagatggttgggacctctgggtctgtggccaggatcggaaaaaacaggtctttccccgtccagtctgcttggtgggaaggcctgttctcgagtccgcgcttttcgtcaccgccatgtcgggaggtggtgtgattcgtggccccgcagggaacaacgattgccgcatctacgtgggtaacttacctccagacatccgaaccaaggacattgaggacgtgttctacaaatacggcgctatccgcgacatcgacctcaagaatcgccgcgggggaccgcccttcgccttcgttgagttcgaggacccgcggagactgagctctgcaatcagggccaagagagaagagccatttctgttcacaggaactagtggacatggcatctctgctcaccagaaggctagtgttggggctcacaccctgcaagaggcctcaggaaagttagcagaacctcctcgatcctctttgggagtggggaagactgagagcaaagatgtcatcaagtgcaaaacaaaataa

SEQ ID NO: 133135 - DNA, 1653 bp, Homo sapiens
atggggtttcaccacgttggccaggctgctctcgaactcctgacctcagggttttcacagacccaagagctccagaaattcctgttccttctgttcctgttagtctatgttaccaccattgtgggaaacctccttatcatggtcacagtgacttttgactgccggctccacacacccatgtattttctgctccgaaatctagctctcatagacctctgctattccacagtcacctctccaaagatgctggtggacttcctccatgagaccaagacgatctcctaccagggctgcatggcccagatcttcttcttccaccttttgggaggtgggactgtcttttttctctcagtcatggcctatgaccgctacatagccatctcccagcccctccggtatgtcaccatcatgaacactcaattgtgtgtgggcctggtagtagccgcctgggtggggggctttgtccactccattgtccaactggctctgatacttccactgcccttctgtggccccaatatcctagataacttctactgtgatgttccccaagtactgagacttgcctgcactgatacctccctcctggagttcctcatgatctccaacagtgggctgctagttatcatctggttcctcctccttctgatctcttatactgtcatcctggtgatgctgaggtcccactcgggaaaggcaaggaggaaggcagcttccacctgcaccacccacatcatcgtggtgtccatgatcttcattccctgtatctatatctatacctggcccttcaccccattcctcatggacaaggctgtgtccatcagctacacagtcatgacccccatgctcaaccccatgatctacaccctgagaaaccaggacatgaaagcagccatgaggagattaggcaagtgcctaaaggggccagcggtggcggtcgggccaggtccggggcctggggacgccgaggcggccgcggaggagcgccgcgtcaaggtctccagcctgccctacagtgtggatgcgctcgtgtcggacaagaagccgcccaaggaggcatccccagtgccggccaaaagcgcctcttccggggccaccctgcggctactgctgctgccggggcacggcgctcgggaagcgcacagccccgggccgctgatcaagcccttcgagaccgcctcggtcaagtgggaaaactccctaagacggagcggcgtggatgcaggaaccctgctgataattcgccgccgccaagacacaaaacacaagaccaatccgaagccgcgcacagcctttaccacgtcccagctcctcgctctggagggcaagttgctccagaaacagtacctctccattgcagagggtgcggacttctccagctctccgaacctcacggagactcaggtcaaaatcttgttccagaaccgaagggccaagacgaaaagactgcaggagtcagaactggaaaagctgaaaatggctgcaaaacctatgctaccctccagcttcagtctccctttccccatcagctcgcccctgcaggcagcgtccatatacgcagcatcctacccgttccatagacctgtgcttcccatcccgcccgtgggactctatgccacgccagtgggatatggcatgtaccacctgtcctaa

SEQ ID NO: 133136 - DNA, 2226 bp, Homo sapiens
gtcgccgctgccgggttgccagcggagtcgcgcgtcgggagctacgtagggcagagaagtcatggcttctccgtccaaaggcaatgacttgttttcgcccgacgaggagggcccagcagtggtggccggaccaggcccggggcctgggggcgccgagggggccgcggaggagcgccgcgtcaaggtctccagcctgcccttcagcgtggaggcgctcatgtccgacaagaagccgcccaaggaggcgtccccgctgccggccgaaagcgcctcggccggggccaccctgcggccactgctgctgtcggggcacggcgctcgggaagcgcacagccccgggccgctggtgaagcccttcgagaccgcctcggtcaagtcggaaaattcagaagatggagcggcgtggatgcaggaacccggccgatattcgccgccgccaagtgagtgcgcgccggggcaggagtaggaggacatacgagccctaccacctgcaccctgaggaaacacaagaccaatcggaagccgcgcacgccctttaccatttttttagctcctcgccctggagcgcaagttccgtcggaaacagtacctctccattgcagagcgtgcagagttctccagctctctgaacctcacagagacccaggtcaacaatctggttccagaaccgaaggcccaaggcgaaaagacctgcaggaggcagaactggaaaagctgaaaatggctgcaaaacctatgctgccctccagcttcagtctccctttccccatcagctcgcccctgcaggcagcgtccatatatggagcatcctacccgttccatagacctgtgcttcccatcccgcctgtgggactctatgccacgccagtgggatatggcatgtaaccacctgtcctaaggaaggaccagattcaattaggacttccatggatgggatgcttgttttcaaagggtttcctctccctctccaagaaggcaggaccagccaatactcctgctctgctaaccctgcgtgcaccacccctaagcggctaggctgacagggccacacgacatagctgaaatttcgttctgtaggcggaggcaccaagccctgttttcttggtgtaatcttccagatgcccccttttcctttcacaaagattggctctgatggtttttatgtataaatatatatatataataaaatataatacatttttatacagcagacgtaaaaattcaaattattttaaaaggcaaaatttatatacatatgtgctttttttgtatatctcaccttcccaaaagacactgtgtaagtccatttgttgtattttcttaaagagggagacaaattatttgcaaaatgtgctaaagtcaatgatttttacgggattattgacttctgcttatggaaaacaaagaaacagacacagtgcacacagaaaatattagatatggagagattattcaaagtgaaggggacacatcatatttctgcattttacttgcattaaaagaaacctctttatatactacagttgttcctatctctccccccgccccccaccgccccaccacacacatatttttaaagtttttccttttttaagaatatttttgtaagaccaatacctgggatgagaagaatcctgagactgcctggaggtgaggtagaaaattagaaatacttcctaattcttctcaaggctgttggtaactttatttcagataattggagagtaaaatgttaaaacctgttgagaggaattgatggtttctgagaaatactaggtacattcatcctcacagattgcaaaggtgatttgggtgggggtttagtaattttctgcttaaaaaatgagtatcttgtaaccattacctatatgctaaatattcttgaacaattagtagatccagaaagaaaaaaaaaatatgctttctctgtgtgtgtacctgttgtatgtcctaaacttattagaaaattttatatacttttttacatgttgggggggcagaaggtaaagccatgttttgacttggtgaaaatggggttgtcaaacagcccattaagctccctggtatttcaccttcctgtccatctctcccctccctccggtatacctttatccctttgaaagggtgcttgtacaatttgatatattttattgaagagttatctcttattctgaattaaattaagcatttgttttattgcagtaaagtttgtccaaactcacaatt

SEQ ID NO: 133137 - DNA, 914 bp, Homo sapiens
atggagactgaggctctaatgcctggcctaggggtcgctgtggctggggcacaggtaaccttgggatttctggccctggagacccagctgccctttactggacacaagaggatccttcgcctctttttcagcagcccccgggatcccccccacgtcccctccaaaggtttgaagcggaaatggggcgcgcggcggggacgaactttcgccctgagagaggcggagcctcagcgtctaccctcgctctcgcgagctttcggaactctcgcgagaccctacgcccgacttgtgcgcccgggaaaccccgtcgttccctttcccctggctggcagcgcggaggccgcacgagccgcggccacgtgcgagcggcaggcccggacatgcccgatgcctggagttactgtaaaagacgtgaaccagcaggagttcgtcagagctctggcagccttcctcaaaaagtcttaggtccgggaagctgaaagtccccgaatgggtggatacccgtcaagctggccaagcacaaagagcttgctcccgtacgatgagaactggttctaccacgcgagctgcttccacagcgcaggcaccatgtaccatccggggtggcgctgggggtgggctccatgaccaagatctatgggggacgtcagagaaacaggcgtcatgcccaagccacttcagcccgaggctccaagagttgtggcccgccgggttcctccaaagccctggaggggttgaaaaatggtggaaaaagggaccaagaattgcgggccgcaaaacttgacaccttcaagggacaaaagagattttgggacagaattcgccggacaggtggcagctgccaacaaggaggcattagaacaaatccattgctttgggttaattaaattggctcattcgtaaaaaaaaaaaaa

SEQ ID NO: 133138 - DNA, 673 bp, Homo sapiens
  misc_feature (1)...(673): n = a,t,c or g
gcagggccggacgccgaagcctcagagcgcgtgcctgagggccccgaggcgcccggcgcgggcccgtcccgccccctagagccgcggccacgtgcgagcggcaggcccggacatggccgatgccttggagttactgtaaaaagacgtgagaccagcaggaggttcgtcatgagctctgggcagcctttctctcaaaaagtcttaggtccgggtaagctgaanggtccccgaatggttgggataccgttcaagctggccaagcacaaaagagcttgctcccgtacgatgagaagctggttctaccacgccgagcttgcttccacagcgcaggcaccatgtaccatccggggtcggcgctgggggtgggctccatgaccaagatctatggggggacgtcagacgaaacggcgtcaatgcccaagccactttcagcccgaggcttccaagaagtntgggcccgccgggttcctccaaagccctgggaggggcttgaaaatgggtggaaaaagggaccaagaattgcgggccgcaaaacttgacaccttcaagggacaaaagagattttgggacagaattcgccggaacaggttggcagttgcctacaaggaggcattagaacaaaccatggctggggttaataaattgcctcaattcgtaaaaaaaaaaaaaaaaa

SEQ ID NO: 133139 - DNA, 587 bp, Homo sapiens
catcctgtccggttttttgtacatagagggccccatgtgatttctccttggaagtggtgagccagtggtacgagctggtggtgtttacagcaagcatggagatctatggctctgctgtggcagataaactggacaatagcagaagcattcttaagaggagatattacagacagcactgcactttggagttgggcagctacatcaaggacctctctgtggtccacagtgacctctccagcattgtgatcctggataactccccaggggcttacaggagccatccagacaatgccatccccatcaaatcctggttcagtgaccccagcgacacagcccttctcaacctgctcccaatgctggatgccctcaggttcaccgctgatgttcgttccgtgctgagccgaaaccttcaccaacatcggctctgactgggacacaggcggaagcctaggagagccgaatcagtgtttgtgaagaggcaggactggccagagtgacagacatacggtgatccaggaggctcaaagagaagccaagtcagctttgttgtgatttgattttttttaaaaaactcttgtacaaaactg

SEQ ID NO: 133140 - DNA, 1469 bp, Homo sapiens
gtggaattcggcggagctgggccgcgggggccccggggccggcggtgccggggtcatcgggatgatgcggacgcagtgtctgctggggctgcgcacgttcgtggccttcgccgccaagctctggagcttcttcatttaccttctgcggaggcagatccgcacggtaattcagtaccaaactgttcgatatgatatcctccccttatctcctgtgtcccggaatcggctagcccaggtgaagaggaagatcctggtgctggatctggatgagacacttattcactcccaccatgatggggtcctgaggcccacagtccggcctggtacgcctcctgacttcatcctcaaggtggtaatagacaaacatcctgtccggttttttgtacataagaggccccatgtggatttcttcctgggaagtgggtgagccagtggtacgagctggtggtgttttacagcaagcatgggagatctatggtctctgctgtgggcagattaaactgggacaatagcagaagcattctttaaggagggagatatttacagacagcactgcactttggagttggggcagctacatcaaggaccctctcttgtggttccacagtgacctctccaggaattgtgatcctgggataactccccaggggcttacaggagccatccagggtacgggggaaggtgacaatgccatccccatcaaatcctgggtttcagtgaccccagcgaacacagccattctcaacctgctcccaatgctggatgccctcaggttcaccgctgatgttcgttccgtgctgagccgaaaccttcaccaacatcggctctggtgacaagctgctccccctccacctgagttggggtgggggggaaagggagggcgagcccttgggatgccgtctgatgccctgtccaaatgtgaggactgcctgggcaggagtctgcccctcccaccccgtctctgcccctggggagccatacactccacttgggagtctggatggacacatgggcccaggggctctgaaagcagcctcactccttaacttcgtgttcacactcccatggaaacccccagactgggacacaggcgggaagcctaggagagccggaatcaggggttggtgaagaggcaggactggccaggagtgacagacatacgggtgatcccaggaggctcaaagagaagccaagtcagctttgttgtgatttgattttttttaaaaaaactcttgtaccaaacttgatctaaattcttcactcctgctccaaagggctgggctgtgggtgggatactggggatttttgggccactgggattttccctaaatttgtccccccctttactctccctctatttttctcgtccttagacgtccctcagacgctgtaaccaggctttgtgtcttttttcccttttctctcttttaccccatgcattacaactttgaaaccaaaaaaaaaaaaaa

SEQ ID NO: 133141 - DNA, 400 bp, Homo sapiens
  misc_feature (1)...(400): n = a,t,c or g
acaagagcaggcccatattcacccacctcatccaggccttataaaagaagaggcttatatgagatcaaatggctgcctttccccacaagattatatttttcctggaatgctctactttgacacatgtggctttctcagagggaggcaggagggcccaagtcagagaagatgtgacaatggaagcagaagttagaatggtgcagtaaaannnnnnnnnnnnnnnnnnnnnnnnnnnnnnnnnnnnnnnnnnnnnncaggaattttcaataaacgtgacttcactaggtggcctaagccccgatgtaaaatgtatatcccactggaccctgattacaatgcagactgccccaatgtgacagcacctgtttgtgcctcanatggccacactttccagaatgag

SEQ ID NO: 133142 - DNA, 438 bp, Homo sapiens
  misc_feature (1)...(438): n = a,t,c or g
catcgaccgccctgcgattgagaccgtattcccgggccgacccacgcgtgcggtgacaagagcaggcccatattcagccacctcatccttgccttatcaaataagagtcttatatgagatcaaatggctgcctttccccacaagattatatttttcctggaatgctctactttgacacatgtggctttctcaaagggaggcaggagggcccaagtcagagaagatgtgacaatggaagcagaagttagaatggtgcagtaaaannnnnnnnnnnnnnnnnnnnnnnnnnnnnnnnnnnnnnnnnnnnnncaggaattttcaataaacgtgacttcactaggtggcctaagccccgatgtaaaatgtatatcccactggaccctgattacaatgcagactgccccaatgtgacagcacctgtttgtgcctcaaatggcc

SEQ ID NO: 133143 - DNA, 945 bp, Homo sapiens
atggccgaatacgaacagctctggctgcagctctcagtgagaccaacacagaagttgcacctggaacatcagcaagacagaaacgttcactcccctggaaagggggctgaagccagggagccaagtggtcttgctcagcagatcccaaccccacagagcccagcaagaaggtgggtaataacaaactcctctgaggtaaaggagcatgttctaacccaatgcaagaaagctaagaaccttgaaaaaaggttagaggaattgctaactagaataaacagtttagagaagaacataaatgacccagtggagctgaaaaacacagcacgagaacttcgtgaagcatacacaagtatcaatagccaaactgatcaagtggaaaaaagtgacagggagaatgcaaccaagttggaaaacacacttcaggatattatcctggagaacttccccaacctaacaagacaggccaatattcaaattcaggaaatacagagaacaccacaaagatactcctcgagaagagcaactccaagacacataattgtcagattcaccaaggtcgaaatgaaggaaaaaatgttaagagcagccagagagaaaggtatggttacccacaaagggaaggccatcagactaacagtggatctctctgtggaaatgctacaagccagaagagagtgggggacaatatttaatattcttaaagaaaagtattttcaacgacgaatttcatgtgaagccaaactaagcttcataagggaaggagaaataaactcctttacagacaagcaattgctgagggattttgtcaccaccaggcctgccttagaagaactcctgaaggaaccactaaatatggaaaggaaaaatcactaccagccactgcaaaacaaaccaaaatgtaaagaccatcagtactatgaagaaactgcatcaactattgggtga

SEQ ID NO: 133144 - DNA, 675 bp, Homo sapiens
atggaagaaatagaagatgcaattaagaaacaaatggaggatttgctggcaagatggccaaataggaacagctccaggctgcagctcccaaccaagagattccctctggtgcctacgccaccaaggtcctgggttttaagcacaaaactgggtggccgtttgggcagacaccgagctagctgcaggagttttttttctataccccggtggcacctggaatgtcagcaagacagaaccattcactcccctggaaagggggctgaagcccagggagccaagtggtcttttctcagcaggtcccaaccccatggagcccagcaagctaagatccactggctggaaattcttcactaccagcacagcagtctgaagtcaacctgggacacttaggcttgatgggggcaggggcatccactcttcactgatgcctgagtaggcggttttctcctcacagtgtaaataaagccgctgggaagtttggagctggcagagcccactgcagtgtggcaaagctgctgtagccagactgcctctctagattcctcctctctgggcatctctgaaagaaaggcagcagtcccagtcagggccttatagataaaactcccatctccctgggacggagcacctgggggaaggggcagctatgtgtgtagtttcagaagatgtaaatgt

SEQ ID NO: 133145 - DNA, 779 bp, Homo sapiens
atgaaaagaatgaatgaaggtgtagatccccaagatccacaaccagaaatcacaagtacagaacctccaggtctgtctcttcctgctggaacaggacacatcagaggggttggttccggagagggatcaaactcagaaacagccattaaaactcctggaacagcagctcttctcaaggctagttgtgacagactcctggaacagcagctcttctcaaggctagttgtgacatccaaagtgacaagagcaggcccatattcagccacctcatccagcaagaatttcaagccagtggatcttagcttgctgggctctgtggggatgggacctgctgagcaagaccacttggctccctggcttcagccccctttccagccccgatgtaaaatgtatatcccactggaccctgattacaatgcagactgccccaatgtgacagcacctgtttgtgcctcaaatggccacactttccagaatgagtgtttcttttgtgttgaacagagggaatttcattatcgtataaaatttgaaaaatatggaaaatgtgattaatgggtaccagagtaactacacttgcttattctttttctacttaattcagaatagtatttcttttagagtgtgagaatgtaaattaaataacatccctatgctggacttaaatgtcgaacaaaatgagagacaaaaatgaaggaatcaaactgacaagaaccaaatatcacatttgttacaaataaacaacaaaaaagcccaaaaaaaaaaaaaaaaaaaaaaaaaaa

SEQ ID NO: 133146 - DNA, 410 bp, Homo sapiens
aaaaagtagtgtaagttctgtccatgattctttacctagtgaatgggaaagtaatagaaacaattttcttcttaaaaaggaaggtttgttattgcactgacttttacaacctgacatagtaatttagaaaaatcatgtagtaaaatctgtaaaattaaaatataaaagtctggtttgtaaacatcagttggccaagtctattcagagtccttcatgatagtggaatggaatgaataattaattcactaccttatttatttgctgtcataatacagaaaaaacatttatccactgtggaaagagaccctgaagagaatgtggcaaaggcatagagaacaagttggatcttttgaaaaagttaatgatatcaaaatacttttccatcactggtaaaccaagctaggtcaagt

SEQ ID NO: 133147 - DNA, 613 bp, Homo sapiens
  misc_feature (1)...(613): n = a,t,c or g
ataaantatcactcccactgagcccgggatataactcatggactacagatacatgaggttcctacctgtcaaacaatgctttaaatattttttctgggaaaaaaggaaaaaacacaatatatgagaagatgcaaaggaaaggcagaaatgtgaatttatgcatctagttccacaatttaaaataaatatcaaactgacaatataaagctaagtgacaatgacttaaccattgggcaccaaacaggcaatacaactgctcactgtaatacataatgctcttcaggagtttccagcagatggccatcacaacaatactgtcataatacagaaaaaacatttatccactgtggaaagagaccctgaagagaatgtggcaaaggcatagagaaaaagttggatcttttgaaaaagttaatgatatcaaaatacttttccatcactggtaaaccaagctaggtcaagtatatgtcccaaagcagcactgaattcagagtaagaggttggcagaaaagtttggaaaactgcagtttttaaaaattggcaatttctccatgcttaataaaactatcagaagaggtataatgtttgttcgtttgtggaatgttgactgctt

SEQ ID NO: 133148 - DNA, 639 bp, Homo sapiens
atgctccagcgggcgtgcccggccgcggagggggacccccggagcgtcgtcccttcccggagcggggccgcggcagcgctcaccgtcttcgtggtgaagggggagcttcagcgggttctccagcagggacctgagcacgccgtagggaggcgggataaagatgaacaaaggaagtgctttcctgagatggaatctactcctagtgatgatgctgtgttcattgttgaaacgccagcaaaggatttagaatattacataaacttagttcgtatagcagtggcaggctttgagaggatcgactccaattttgaaagaggttctactgtgagtaaaatgctatcaaataacaccgcgtgctacagaaaaatgtttcctgaaacgaagagtcaattgatgcagccaacttcattgtcgtgttattttaagaagactgccacaaccaccccaagcttcagtaatcaccaccctgatcgattagtagccaccaacattaagtcaagacccatcataagtaaaagtggcccactaaaggctcaggagtttccagcagatggccatcacaacaatactgtcataatacagaaaaaacatttatccactgtggaaagagaccctgaagagaatgtggcaaaggcatag

SEQ ID NO: 133149 - DNA, 352 bp, Homo sapiens
aatttgcatagccaaatgctatggaaccaaagaataagatgactcacatctgtttaacttgaactcttatgcaaaaatcctaatcgtgtcgcaacacgggaccagttactgtgtctatcgggtcatttgggaatgggcaggatactggagctgggaggctaatggggtccagagctgcataatggggatcggatgttggtactcctcccagggagctctcaggacagctgtttgtcgtgggctcccaagtgcctaggccatgccttacgactgctgcacttaccatttgtcatatgatggcacttgactacatatggctttagaaataaaataaccctcaaaactaaaaaaa

SEQ ID NO: 133150 - DNA, 748 bp, Homo sapiens
atataaaaataccatcacagactactacgaacacctctatgcacacaaactagaaaatctagaagaaatgaataaaagaagagctagtaccatctgtactgaaactattccaaaaaaactgaggaggagggactcctccttaactcattctatgagagccaggagactgagtgtggacgtgaaacctcaggacaggtcacggggtccatctgaatgcactatattcagggcaggtgtcccagagggaacaagaggggccttgtggctgcctcacttccaaacagaaagtgacccaggctccaagcctgcaatcacgcttcttgttattcatccagatgaattgcaaatttatgtccgcacaaaaacctgcacagatgttcatagcagctttattcataattgccaaaacttagaagcaaccaagatatccttcatgtttgataacaagcacctgacgcgtggcgtgatgccagcctccccagggcgctttggtctggaaacagctgtgagtaatctggagcacccagagcagaaagctttatcagtcagcctgccccaaaagctgctgcgaaaactatctgctggtgcagtcatgcctccaactgccctatttttagtgaaacgcactttccagggctgtgcttctgatgaaggagcaagccgacttggtcttaagacatacatagtcagtgacaaccaagccacttccactcgtctgcctgatttagggttttctgcaggtttatga

SEQ ID NO: 133151 - DNA, 1544 bp, Homo sapiens
ggcacgagttttttacattaagcaaaataatggttactaataagtttcttaatttagcagtctgaaacacaattagatatacaattttggtctgcagtgggaagggggctggtaatctgaatctgattttcagatagctctgtttttttggccaacatgctccaatttactgcagtctccgccactccctattgtcctacactaggcctgcttcactcatttgttgcctacctggctctcataggtatcttgagtttgtacttcttttactaaagcatcaccggctccatgaagacctcaaccactgccccattggcagcaggtctggcagagatgtcagatcccagacaactcaggaacagcatgtcattgccatgccattcccactcaggaaactcgagcctcttcattcagggttgtatagccacagctgctgttcacggtacctggcaggctggttggctcttgccacaggcggggcagccaggagccctcctgctatttccatccttcagcctcaggagccatcagtcactcccagtgatactcagagagcctgtggaaggagcactgaggcgtttgagagcaaagagcagaaagccagcgtcagagtggaaacaaccgtgtccttcagctgttccatcaaggtcgatgggggcctcctagaacctaaaagagcagatacagggtggcatgggcatcactgccgccctgcatccataacacctgctggctgggtaccagccaggtatcttctctacgtatttttcagcagacaatgtgtactttctatggtctgtggtccacagtataccaggggagagattcctggtgctgtactgaaggaagaatgcctgccctccttgctcacagggaggtttgatttgagtggcagagccaggagactgagtgtggacgtgaaacctcaggacaggtcacggggtccatctgaatgcactatattcagggcaggtgtcccagagggaacaagaggggtcttgtggctgcctcacttccaaacagaaagtgacccaggctccaagcctgcaatcacgcttcttgttattcatccagatgaattgcaaatttatgtccgcacaaaaacctgcacagatgttcatagcagctttattcataattgccaaaacttagaagcaaccaagatatccttcagcaaataccttacttctctaaagcctgtttctctcgtctttaaaatggaaataacagtatatcagtctcataagattcgctgctgcctggaacagtgtaagaactcaataaatggtagttttgagggttattttatttctaaagccatatgtagtcaagtgccatcatatgacaaatgtgcccaacaccaaatagtggaagcagaaagaaatgtcaatggctgcaagggcacggggggaaccatcactgctatatgccttccactggaagtgagactggaagggtatcaggctggatttgttgacacctttgatgattctgtaggaggctttgccaatgtcttatattttgaaattcatggcaagacataa

SEQ ID NO: 133152 - DNA, 509 bp, Homo sapiens; identical to SEQ ID NO: 121686

SEQ ID NO: 133153 - DNA, 1213 bp, Homo sapiens
  misc_feature (1)...(1213): n = a,t,c or g
atgcagctcaagccgatggagatcaaccccgaggtgagcgccaggtgcaccgctacccggagagcgcgaggccgagggagggggagccgagtcgctgatcggttcggttttgcctttttctttgcatttgcctttcagatgctgaacaaagtgctgtctccggctgggggtcgccggccagtggcgcttcgtggacgtgcctggggctggaagaggagtctctgggctcggtgccagcgcctgccctgcgcgctgcctgcctgcctgtttcccctcacggcccaagcatgagaactttaaggaaaaagcagattgaagagcctgaagggacaagaagttagtcctaaagtgtacttcatgaagcagaccattgggaattcctgtggcacaatcggacttattcacgcagtggcccaataatccaagacaaacttgggatttgaaggatggatcagttcttgaaacagttttctttctgaaacaaaaaaaaatgttcccctgaaagacagagcaaaatgcttttgaaaagaattgaggccatacaagcagccccatgaatgccgtggaacaaggaaaggccaatgtcgggtagatgacaagggtgaatttccatttttattctggttaaccaaccgtggatgggccaccttctatgaacttggatggaccgaatgccttttccccgtggacccatggcccccagtncagggggacaccctgcttgaaggacgcttcccaaggtcttgcaggagaatttcaccgaggcgtgagcaaaggagaagtcccgcttcttctgcccgtggcttctcctgcaaaggcagccttaatgctctgtggggagggacttggctgatttcccccctctcccctcaacatgaaaatatattacccccccatgccagtctaaaatgcttcagtacttgtgaaacacaggctgttcttctgttctgccagacacgcccttcccctcagccacaccccaggcacttaagcacaagcagagtgcacagctgtccactgggccattgtggtgtgagcttcagatggtgaagcattctccccagtgtatgtcttgtatccgattatctaacgcctttaaatggctactttggtttctgtctgtaagttaagaccttggatgcgcgtttaattgtttgtcctcaaaaggaataaaactttttctgctgataagataaaaaaaaaaaaaaaaaaa

SEQ ID NO: 133154 - DNA, 450 bp, Homo sapiens
  misc_feature (1)...(450): n = a,t,c or g
tatggcagcnccagcaacaagacagagctggcctggagtccgcggctggccngnangtaggtgattgtctgacaagcagaggcatgagctgggtccaggccaccctactggcccgaggctctgtagggcctggggaggcacctgcggggcgccctcacaggaacctccatctctcaggtccctcgcctggctccctcggggcctccactgcagcgcantccnatnagctctgaacagtccctggttcccagcccaccggaaccccggcagaggcgcctggtggggaacgggacaaggcgagcttcctgcagacggtgcagaaatttgcggacacaagcgtggtaaanggnggccacattgacttcatctacctggccctgcgcaagatgcgggagtatggtgtcgagcgggacctggctgtgtacaaccagctgctcaacatcttcccca

SEQ ID NO: 133155 - DNA, 430 bp, Homo sapiens
  misc_feature (1)...(430): n = a,t,c or g
atatggcagcgcccaccaacaagacagagctggcctggagtccgcggctggccgcgtgagtaggtgattgtctgacaagcacaggcatgagctgggtccaggccaccctactggcccgaggcctctgtagggcctggggaggcacctgcggggccgccctcacaggaacctccatctttcaggtccctcgccggctccctcggggcctgcactgcagcgcatctgcccatagctctgaacagtccctggttcccagcccaccggaaccccggcagaggcccaccaaagctctggtgccctcataagacctgtttgagcaggcgcctggtggggaacgggacaaggcgagcttcctgcagacggtgcagaaatttgcggagcacagcgtgcgtaagcggngccacattgacttcatctacctggccctgcn

SEQ ID NO: 133156 - DNA, 1377 bp, Homo sapiens
atggaggagtccatcaggaacctggagcaagagatttcttttgactttggccccaacggggagtttgcttacctgtacagccagtgctacgagctcaccaccaacgagtgcgtcccaggaatgcaggggcccccactggcaggcacttggggctcatggattggccccgaccacgacaagttcagtgccatgaagtatgagcaaggcacgggttgctggcagggccccaaccgctccaccaccgtgagtgcctgcaaggcaggggagctggggcgggaagacccaggcctggcccagccgaaccctcttgagcacccgtgtgcccatccccaggtgcgcctcctgtgcgggaaagagaccatggtgaccagcaccacagagcccagtcgaaggcggcgacgcaacgtgaactgcctgaagaacgtggtgatctggtacgaggaccacaagcaccgctgcccgtacgagccgcacctggcggagctagaccccacttttggcctgtacaccacggccgtgtggcagtgcgaagctggccaccgctacttccaggacctgcattcgcccctgaagcccctcagcgactcagaccctgacagtgacaaaggttcctttgcccaaagactcaacaggtgcagcagatcccccccagccccacatcgtagggcacagggcatgtatgtctccacaccaggaatccagagtcccgatcagcaggccgccctggcccgccacaatccagcccggcctgtctttgttgagggccccttctccctgtggctccgcaacaagtgtgtgtattaccacatcctcagagctgacttgctgcccccggaggagagggaagtggaagagacgccggaggagtggaacctctactacccgatgcagctggacctggagtatgtgaggagtggctgggacaactacgagtttgacatcaatgaaggtaaagaacagcacgtcactatccctgctcatcaggtgaatgctgaattcttcgaagaaggcaaaatgtttgacggctcctcgattggcggctggaaaggcattaacgagtccgacatgcgcgccgaagattacctgcgttccactggcattgccgacaccgtactgttcgggccagaacctgaattcttcctgttcgatgacatccgtttcggatcatctatctccggttcccacgttgctatcgacgatatcgaaggcgcatggaactcctccacccaatacgaaggtggtaacaaaggtcaccgtccggcagtgaaaggcggttacttcccggttccaccggtagactcggctcaggatattcgttctgaaatgtgtctggtgatgggactgcaggacagcagattcattaaatgggggttctag

SEQ ID NO: 133157 - DNA, 2558 bp, Homo sapiens
  misc_feature (1)...(2558): n = a,t,c or g
tttttttttttttgcgcacaaccaacagcgctcccgccccgtttttatttgaattcggagaaccaaaggggcctggaaattccggggggggcccccccggccaaccgctggaagcccgagatcctggggaggggatgccatactgctagagatgagggaagagagccccaagcaggaaaaccattgttttgctgtacactcaaagggcatctcatgccttcagtccaccgcctcctcgggccacagcccgtgccctcgcgccggctcagcctagctctggccctgctgctgtcgcttgcaggttgtcgtcttcttcctggtgggtcctcgggcaggggcgggctcctccagccctgcagaaggatgtctggaagctccccgggttggacccggcgaagcgggaagaccacgggggattttgggccaaggtttggggttggtctcctgcaggccctggaatccacttaagccatcgtcgcctggtcatgagcacccgccatgcacatggccnaagacagggccttcctccacttcattgatgtcaaactcgtagttgtcccagccactcctcacatactccaggtccagctgcatcggggtagtagaggttccactcctccggcgtctcttccacttccctctcctccgggggcagcaagtcagcttttgaggatgtggtaatacacacacttgttgcggagccacagggagaaggggccctcaacaaagacaggccgggctggattgtggcgggccagggcggcctgctgatcgggactctggattcctggtgtggagacatacatgccctgtgccctacgatgtggggctgggggggatctgctgcacctgttgagtctttgggcaaaggaacctcccccaggaagccccacctgcccactcggctcccacagcaccccgggcttctccatctcagaaccactggctcttaaggaaactgttatctggtagatggtgaccctggcactaaggtcaggctccatgtgccgcaggccaaacatggccagctccacagggtcctggggcaggtcccggggcactgggaaggggttgacgttcatgaatcgagggaaccacagcttcaggcgcaccaacttgagcatggggtagcttttgcgtccaaagatctgaatcagcaggaactccgtctccttgttgggcatcacacctgtgaacagctttgaaaccggctgccaggattctgggtctcttgggggaaaaaggcagacgcggattccaaatcctgcccggttgccgacttgcggcgtgacctctcgcgaggtcatcccttcatccccccacccatactgaccaaaaaacttgtccttggaagtggcaaggggcagggcgatgcgggtgttgtattcgggcagccttccctctaagctggcgaggaactcgcggttagcgatgtggcacagcatctcctgcacgtcgtggccctggagctgcgcctgcagtttcagcagcttttcctccacgaggcccagcaggtttggcacatagttatctgcctggggatccagctcctttcccgcgaagcggccgtcctccacagtgatgtggatcagcttgctggccaggtgctccaggctgtccttggccacttgcatcgcccgcaaggcgcgctccagctggtccttggcctcggcgtgccgccgctcctccttcttgagacgctcctgcgcctcggcttgcagtttctgctggctcaccagcgtggcctcccccgagtacttgaggtcttccagctcccgctgcagttgttgcttctcctgcttcagcctcaccaacgtctgctcgttctcgctcttgagcgtctccaactgcgcgaaggtgtcgccctgggccaggaaccgccgcaccaacgagtgcgtctcgtcagtgccagtggcgtccttgaccttgccaaagatcacctccatctggtacatgctccagcgctgccgcagctcctcctccttggcatgcaggctgtcctggatggtgtcgtcggactgtagcagcaggtgctcgcggtgggtctgctcgtgggttgaggtcagagccagggtcagctggtggacagcgctcttgacgccgtaggccatgttgagcaaattgtccagccggaaacgctgggtctgatggtgtatggggcctgcgtaacgccgggcggatgactggtagaggtgggtgagcagcgcctgccccgtcttctgacttgggttgttcgcgaacttgactgtgatgggctcagctgcgcccagcggcttctgcccattcagtcctttgatagcctcttcggcctcaatcctcttgtcaaagcggatgaatcccacaccccgagagacacctgtgacctggtccaccaggatgcgggacgtgatgatgcggccgtactgggagaagagctgctccatctctttctggctcatggtcttggggagcccgctgacgtacaggttagcatcccggatggatgctgaactgggtctggcataggacaccatgttggccaggatggtcttgacctcttgaccttgtgatccgctcat

SEQ ID NO: 133158 - DNA, 1649 bp, Homo sapiens
  misc_feature (1)...(1649): n = a,t,c or g
agggggatttgagaccatagtccatgtgcaggaattcgcgcccagcaacaagacagagctggcctggagtccgcggctggccgcgtgagtaggtgattgtctgacaagcagaggcatgagctgggtccaggccaccctactggcccgaggcctctgtagggcctggggaggcacctgcggggccgccctgcacaggaacctccatctctcaggtccctcgccggnctccctcggggcctccactgcagcgcagctgcccatagctctgaacagtccctggttcccagcccaccggaaccccggcagagggcccaccaaggctcttggtgccctttgagggacctgttttggggcagggcgctgggttgggggaacggggacaagggcgagctttcctgcagacggttgcagaaatttgcggacgactagcgtgcgtaaacgggggccacattggatttattttacttggccctgcgcaaaatgcgggaagtatggtgtcgagcggggaacctggctgtgtacaaccagctgctcaacatcttccccaaggaggtcttccggcctcgcaacatcatccagcgcatcttcgtccactaccctcggcagcaggagtgtgggattgctgtcctggagcagatggagaaccacggtgtgatgcccaacaaggagacggagttcctgctgattcaaatctttggacgcaaaagctaccccatgctcaagttggtgcgcctgaagctgtggttccctcgattcatgaacgtcaaccccttcccagtgccccgggacctgccccaggaccctgtggagctggccatgtttggcctgcggcacatggagcctgaccttagtgccagggtcaccatctaccaggttcctttgcccaaagactcaacaggtgcaagcaagatcccccccaagccccacatcgtaggaatccaagaagtcccgatcaagcaaggccgcccttggcccgccacaatccaagcccggcctgtcttttgttgagggccccttctccctgtggctccgcaacaaagtgtgtgtatttaccacatcctcagaagctgacttgctgcccccggaggagagggtgagggcttaaagcaaagcatgtgttggggctggggagtgggctggcactaccctgagggtgcatgggagaggctggaggagggagaccgagagagccctggcctctgaccccgcctgcactccccaccttggagtaggaagtggaagagacgccggaggagtggaacctctactacccgatgcagctggacctggagtatgtgaggagtggctgggacaactacgagtttgacatcaatgaagtggaggaaggccctgtcttcgccatgtgcatggcgggtgctcatgaccagggcgacgatggctaagtggatccaggggcctgcaggagaccaacccaaccctgggcccagattccccgtggtctttccgccttcgccgggtccacccggaagctccagacatcctctgcagggctggaggaaccgccccttgcccgaggaccaccaaggaagaagacgacaacctgcagcgacagagcagggcccagagctagtctgagccggcgcgagggcacggtctgtggcccgaggaggcggtggactgaaggcatg

SEQ ID NO: 133159 - DNA, 2876 bp, Homo sapiens
gaattcggggcgctacggcggacccggctgggcagttccttccccagaaggagagattcctctgccatggagtcctacgatgtgatcgccaaccagcctgtcgtgatcgacaacggatccggtgtgattaaagctggttttgctggtgatcagatccccaaatactgctttccaaactatgtgggccgacccaagcacgttcgtgtcatggcaggagcccttgaaggcgacatcttcattggccccaaagctgaggagcaccgagggctgctttcaatccgctatcccatggagcatggcatcgtcaaggattggaacgacatggaacgcatttggcaatatgtctattctaaggaccagctgcagactttctcagaggagcatcctgtgctcctgactgaggcgcctttaaacccacgaaaaaaccgggaacgagctgccgaagttttcttcgagaccttcaatgtgcccgctcttttcatctccatgcaagctgtactcagcctttacgctacaggcaggaccacaggggtggtgctggattctggggatggagtcacccatgctgtgcccatctatgagggctttgccatgccccactccatcatgcgcatcgacatcgcgggccgggacgtctctcgcttcctgcgcctctacctgcgtaaggagggctacgacttccactcatcctctgagtttgagattgtcaaggccataaaagaaagagcctgttacctaatccataaacccccaaaaggatgagacgctagagacagagaaagctcagtactacctgcctgatggcacgcaccattgagactggtccttcccgattccgggcccctgagttgctcttcaggccagatttgattggagaggagagtgaaggcatccacgaggtcctggtgttcgccattcagaagtcagacatggacctgcggcgcacgcttttctctaacattgtcctctcaggaggctctaccctgttcaaaggttttggtgacaggctcctttgttatagtgaagaaactagctccaaaagatgggaggatcaggatatctgcacctcaggagagactgtattccacgtggattgggggctccatccttgcctccctggacacctttaagaagatgtgggtctccaaaaaggaatatgaggaagacggtgcccgatccatccacagaaaaaccttctaatgtcgggacatcatcttcacctctctctgaagttaactccactttaaaactcgctttcttgagtcggagtgtttgcgaggaactgcctgtgggggagcgcgttgcgtgaatatagagtgagtgcgcacaaagcgaaggccgtgggggcccgtgggacccctgggcccagaaaggacgatgaactacccgcagtggtgatgatgcctgaggcctggggttgaccactaactggctcctgacagggaagagcgctggcagaggctgtgctccctcctcaggtgcgctctggctggctgtgggggactggctgtgggggactccgtttactaccacagggagacagagggaggtaagccatcccccgggacaccttgctgctgaccatcctaggctgggctggccccaccctcacccccacccccagggtgccctgaggccccaggcagctgctgcctccactatcgatgcctcctgactgcacactgaggactgggactggggttgagttctgtctggttttgttgccattttggtttgggaggctggaaaagcaccccaagaagctattacagagactggagtcaggagagagcaggaggccctcatgttcaccagggaacaggaccacaccggccactgaaggagggcaggagcagtcctccctctgaatggctgcagagttaatgttcccagcccagtcccctttcgggggccttgggagagtttaaggcacctgctggttccaggacctcgctttccatctgttcttgttgcaatgccatcttcaaaccgttttatttattgaagtgtttgttcagttaggggctggagagagggagcttgctgcctcctgccttgctacactaatgtttacagcacctaagcttagcctccagggccccacctctcccagctgatggtgagctgacagtgtccacaggttccaggaccatttgagattggaagctacactcaaagacactcccaccaggctctttctcccttttcctcttctcactgccctggaatcaacaggctggttgctggttagattttctgaaacaggaggtaaaatttttctttggcagaggcccctaagcaagggaggggtgttggagagccagtgcccttaagactggagaaagctgcaatttaccaagttgccttttgccactgtagctgaccaggggactaggttgtagaggtgggaaggcccctctgggctgatcttgtgccattcttgaccttggacctgcttggttaaggagggagtgggccagaccagagtgccaggagctaatggagccaggcctgacacctaggagtggtccaaaggccttcagcctagatggtgcaaagctggggccagcctgttttcaccggcaccctcacctgtgacaccaagacccaccccaatcccagacttcacacagtattctcccccacgccgtcctatgaccaaaggcccctgccaggtgtgggtccacagcagcaggtatgtgtgaaagcaacgtagcgccccgcggactgcagtgcgcttaaccaactcacctcccttctcttagcccaagcctgtccctcgcacagcctcgcacaaaccacattgcctggtggggcccagtgtactgaaataaagtcgttccgatagacacgtcaaaaaaaaaaaacccgaattc

SEQ ID NO: 133160 - DNA, 3291 bp, Homo sapiens
atgccgtcgggaggtgaccagtcgccaccgcccccgcctccccctccggcggcggcagcctcggatgaggaggaggaggacgacggcgaggcggaagacgccgcgccgcctgccgagtcgcccacccctcagatccagcagcggttcgacgagctgtgcagccgcctcaacatggacgaggcggcgcgggccgaggcctgggacagctaccgcagcatgagcgaaagctacacgctggaggatcaggactgtggctacctcgagggctttttggtcaccccgggcattgcacaggactcctgttgttgttgcgatccgggtgtgttaggtcgcagccttcggacagggcttgcagatgagaaaaatggccattctagccacttaatcgaattttttaataagatgaagaagtgggaagacatggcaaatctacccccacatttcagagaacgtactgagagattagaaagaaacttcactgtttctgctgtaatttttaagaaatatgaacccatttttcaggacatctttaaataccctcaagaggagcaacctcgtcagcagcgaggaaggaaacagcggcgacagccctgtactgtgtctgaaattttccatttttgttgggtgctttttatatatgcaaaaggtaatttccccatgattagtgatgatttggtcaattcttatcacctgctgctgtgtgctttggacttagtttatggaaatgcacttcagtgttctaatcgtaaagaacttgtgaaccctaattttaaaggcttatctgaagattttcatgctaaagattctaaaccttcctctgaccccccttgtatcattgagaaactgtgttccttacatgatggcctagttttggaagcaaaggggataaaggaacatttctggaaaccctatattaggaaactttatgaaaaaaagctccttaagggaaaagaagaaaatctcactgggtttctagaacctgggaactttggagagagttttaaagccatcaataaggcctatgaggagtatgttttatctgttgggaatttagatgagcggatatttcttggagaggatgctgaggaggaaattgggactctctcaaggtgtctgaacgctggttcaggaacagagactgctgaaagggtgcagatgaaaaacatcttacagcagcattttgacaagtccaaagcacttagaatctccacaccactaactggtgttaggtacattaaggagaatagcccttgtgtgactccagtttctacagctacgcatagcttgagtcgtcttcacaccatgctgacaggcctcaggaatgcaccaagtgagaaactggaacagattctcaggacatgttccagagatccaacccaggctattgctaacagactgaaagaaatgtttgaaatatattctcagcatttccagccagacgaggatttcagtaattgtgctaaagaaattgccagcaaacattttcgttttgcggagatgctttactataaagtattagaatctgttattgagcaggaacaaaaaagactaggagacatggatttatctgtgatagaagtattcattagagcagaagatggcctttgtagagaggtggtaaaacaccttaatcagattgaagaacagatcttagatcatttggcatggaaaccagagtctccactctgggaaaaaattagagacaatgaaaacagagttcctacatgtgaagaggtcatgccacctcagaacctggaaagggcagatgaaatttgcattgctggctcccctttgactcccagaagggtgactgaagttcgtgctgatactggaggacttggaaggagcataacatctccaaccacattatacgataggtacagctccccaccagccagcactaccagaaggcggctatttgttgagaatgatagcccctctgatggagggacgcctgggcgcatgcccccacagcccctagtcaatgctgtccctgtgcagaatgtatctggggagactgtttctgtcacaccagttcctggacagactttggtcaccatggcaaccgccactgtcacagccaacaatgggcaaacggtaaccattcctgtgcaaggtattgccaatgaaaatggagggataacattcttccctgtccaagtcaatgttggggggcaggcacaagctgtgacaggctccatccagcccctcagtgctcaggccctggctggaagtctgagctctcaacaggtgacaggaacaactttgcaagtccctggtcaagtggccattcaacagatttccccaggtggccaacagcagaagcaaggccagtctgtaaccagcagtagtaatagacccaggaagaccagctctttatcgcttttctttagaaaggtataccatttagcagctgtccgccttcgggatctctgtgccaaactagatatttcagatgaattgaggaaaaaaatctggacctgctttgaattctccataattcagtgtcctgaacttatgatggacagacatctggaccagttattaatgtgtgccatttatgtgatggcaaaggtcacaaaagaagataagtccttccagaacattatgcgttgttataggactcagccgcaggcccggagccaggtgtatagaagtgttttgataaaagggaaaagaaaaagaagaaattctggcagcagtgatagcagaagccatcagaattctccaacagaactaaacaaagatagaaccagtagagactccagtccagttatgaggtcaagcagcaccttgccagttccacagcccagcagtgctcctcccacacctactcgcctcacaggtgccaacagtgacatggaagaagaggagaggggagacctcattcagttctacaacaacatctacatcaaacagattaagacatttgccatgaagtactcacaggcaaatatggatgctcctccactctctccctatccatttgtaagaacaggctcccctcgccgaatacagttgtctcaaaatcatcctgtctacatttccccacataaaaatgaaacaatgctttctcctcgagaaaagattttctattacttcagcaacagtccttcaaagagactgagagaaattaatagtatgatacgcacaggagaaactcctactaaaaagagaggaattcttttggaagatggaagtgaatcacctgcaaaaagaatttgcccagaaaatcattctgccttattacgccgtctccaagatgtagctaatgaccgtggttcccactga

SEQ ID NO: 133161 - DNA, 6795 bp, Homo sapiens
  misc_feature (1)...(6795): n = a,t,c or g
gggcgggcgcttcgccgtttgaatggctgcgggcccgggccctcacctcacctgaggtccggccgcccaggggtgcgctatgccgtcgggaggtgaccagtcgccaccgcccccgcctccccctccggcggcggcagcctcggatgaggaggaggaggacgacggcgaggcggaagacgccgcgcccgcctgccgagtcgcccacccctcagatccagcagcggttcgacgagctgtgcagccgcctcaacatggacgaggcggcgcgggccgaggcctgggacagctaccgcagcatgagcgaaagctacacgctggagggaaatgatcttcattggttagcatgtgccttatatgtggcttgcagaaaatctgttccaactgtaagcaaagggacagtggaaggaaactatgtatctttaactagaatcctgaaatgttcagagcagagcttaatcgaattttttaataagatgaagaagtgggaagacatggcaaatctacccccacatttcagagaacgtactgagagattagaaagaaacttcactgtttctgctgtaatttttaagaaatatgaacccatttttcaggacatctttaaataccctcaagaggagcaacctcgtcagcagcgaggaaggaaacagcggcgacagccctgtactgtgtcctgaaatttttccattttttgttgggtgctttttatatgtgcaaaaggtaatttcccccattgattaagtgatgatttggtcaattcttatcacctgctgctgggtgctttggacttagtttatggaaatgcacttcagtgttctaatcgtaaagaacttgtgaaccctaattttaaaggcttatctgaagattttcatgctaaagattctaaaccttcctctgaccccccttgtatcattgagaaactgtgttccttacatgatggcctagttttggaagcaaaggggataaaggaacatttctggaaaccctatattaggaaactttatgaaaaaaagctccttaagggaaaagaagaaaatctcactgggtttctagaacctgggaactttggagagagttttaaagccatcaataaggcctatgaggagtatgttttatctgttgggaatttagatgagcggatatttcttggagaggatgctgaggaggaaattgggactctctcaaggtgtctgaacgctggttcaggaacagagactgctgaaagggtgcagatgaaaaacatcttacagcagcattttgacaagtccaaagcacttagaatctccacaccactaactggtgttaggtacattaaggagaatagcccttgtgtgactccagtttctacagctacgcatagcttgagtcgtcttcacaccatgctgacagggcctcaggaatgcaccaagtgagaaactggaacagattctcaggacatgttccagagatccaacccaggctattgctaacagactgaaagaaatgtttgaaatatattctccagcatttccagccagacgaggatttcagtaattgtgctaaagaaattgccagcaaacattttccgttttgcggagatgctttactataaagtattagaatctgttattgagcaggaccaaaaaagactaggagacatggggtttatctggtattctggaacaagatgcgttccacagatctctcttggcctgcatgccttgaggtcgtcactttttcttataagcctcctgggaattttccatttattactgaaatatttgatgtgcctctttatcatttttataaggtgatagaagtattcattagagcagaagatggcctttgtaagagaggtggtaaaacaccttaatcagattgaagaacagatcttagatcatttggcatggaaaccagagtctccactctggggaaaaaattagagacaatgaaaacagagttcctacatgtgaagaggtcatgccacctcagaacctggaaagggcagatgaaatttgcattgctggctcccctttgactcccagaagggtgactgaagttcgtgctgatactggaggacttgggaaggagcataacatctccaaccacattattacgatagggtacagctccccaccagccaggcactaccaggaagggcggctatttgttgagaatgatagcccctctgatggagggacgcctgggcgcatgcccccacagcccctagtcaatgctgtccctgtgcagaatgtatctggggagactgtttctgtcacaccagttcctggacagactttggtcaccattgcgacccggcatgtgccacagccaacaatggcaaaacggtaaccattcctgtgcaaggtattgccaatgaaaatggagggataacattcttccctgttccaagtcaatgttgggggggcaggcacaagctgtgacaggctccatccagcccctcagtgctcaggccctggctggaagtctgagctctcaacaggtgacaggaacaactttgcaagtccctggtccaagtgggcccattcaaacagattttcccccaggtggcccaacagccagnaagcaaggcccagtcctgtaacccagcagtaagtaaatagaccccaggaagacccagctctttatcgccttttcctttagaaaggtataccatttagcagctgtccgccttcgggatctctgtgcccaaactagatatttcagatgaattgaggaaaaaaatctggacctgctttgaattctccataattcagtgtcctgaacttatgatggacagacatctggaccagttattaatgtgtgccatttatgtgatggcaaaggtcacaaaagaagataagtcctttccagaacattatgcgttgttataggacttccancggcaggccccggagcccaggtgtatagaagtgttttgataaaagggaaaagaaaaagaagaaattctggcagcagtgatagcagaagccatcagaattctccaacagaactaaacaaagatagaaccagtagagactccagtccagttatgaggtcaagcagcaccttgccagttccacagcccagcagtgctcctcccacacctactcgcctcacaggtgccaacagtgacatggaagaagaggagaggggagacctcattcagttctacaccaagcattctacatcaaacagattaagacatttgccatgaagtactcacaggcaaatatggatgctcctccactctctccctatccatttgtaagaacaggctcccctcgccgaatacagttgtctcaaaatcatcctgtctacatttccccacataaaaatgaaacaaatgctttctcctcgagaaaagattttcttattacttcagcaacagtccttcaaaagagacttgagaggaaattaatagtattgatacgcacaggagaaactcctactaaaaagagaggaattcttttggaagatggaagtgaatcacctgcaaaaagaatttgcccagaaaatcattctgccttattacgccgtctccaagatgtagctaatgaccgtggttcccactgaggttagtctcttgtattaaactcttcacaaaatctgtttagcagcagcctttaatgcatctagattatggagcttttttccttaatccagctgatgagttacagcctgttagtaacatgaggggacattttggtgagaaatgggacttaactccttccagtgtccttaggaacattttaattcatcccaactgtctgtttcttccctaccattcagtggattactgtccaggctgctttaggaatccaaacttgggatttttgactctgggcaaagctttttaggaaatactgcaagaaaatgatgtggtacccccaaacgtgagccatagggaggctttctgttggacgtactcccaacagaagaactgtgtttccaagttcaatcctaccctgttttgtggtcagctgtagtcctcataaaaagcaaaacaaaaattaggtattttgtcctaaaacacctggttaggagtgtgtgatttttttgcattcctgacaaaggagagcacacccacggtttggaggtcctaggtcatatagccctcgtctcccgttccctttgtgcacatcttccctctccccattcggtgtggtgcagtgtgaaaagtccttgattgtttgggtgtgcaatagtctgagcgaacctgtataagtggaggcactttagggctggtaaaatgcatgattttgtaacccacattttgctgtatatttggtggatagcactttctaacaatggggaacttttattaaattccaaaacttccaggctaaacatccaatattttctttaatgcttttatatttttttaaaatgttaaaacccctatagccaccttttgggaatgttttaaattctccagttttttgttatatagggatcaaccagctaagaaaagattttaagtcaagttgaattgaggggattaatatgaaaacttatgacctcttcctttaggagggagttatctaaaagaaatgtctattaaggtgatatatttaaaaatatttttgggtgttcctggcagttttaaaaaaattggttggagaatttaggtttttattagtaccatagtaccatttatacaaattagaaaatgttatttaaacagctggaattatcgtatacatatctttattaatcactattgttccagcagttttcaagtcaaattaataatcttattagggagaaaattcaattgtaaattgaatcagtataaacgaaagttactaggtaacttcatattgctgagagaaatatggaacttacattgttcaattagaatagtgttctgcaaaaatatttataaaacttctcaagatactgctacgtgtaattttatatgaagataagtgtatttttcaataaagcatttataaattagcctttggttgggttatattgagaaaagggtagtttcctgcataaatggcaaagaacaatcatttattggtttattttgtctctactaaacacattagtcatttatcatttaaatacccggacttcattagaaaccgttgtaacactttttctccctcctgccataaaaatacagtaagtaagtaatttgcttaaaaaaaaacaacacaacactagggaacaagtgttctggtttcttctcactggaactaaaggacatttctcagtggatttcagtttgtaaatcaggtaagagagtgcagggctacaaatcagtggcagggctggaaggactgaggattcaaatgatcttcccacttaaaaggtggctgagctatggggacctggctctctctatacctctccctttcctaacatatatacaactgaaaccactgatttataaactattaagtagtgctgaattctgtctgctctattagtttaaatgaatgcaacttaccttaaggcattatattcagaaaattacttacttaagcctcaaggtcccccaataattttggagtactgaactagataaccacccgagagacacttctgacagaagtaatgcattacttagagacaggtttcccaaaccctgctgttagaacctatgcatacatggaaaacactggcagtcaagtcattgttcacacagttttacctcttcaggcagtcctctgccattggtcagcttgaactaggccagagtctagcaggaaaagtgcatggtgcaccagattcaccatctcttaagtcgccactgttttctcttctttactgaaaggctgtactgagccaggctttacccatgacaggccagcaacatgaacacttttattgtgctgttcttcaggcttctttttctgagtcagcatcttttctctggcttcatcatgtacagaggaattccatggagaaaagttaattgcataggggtcttctattataggttggtcaaacaagcgagcagtgcacgctataacactgtcaacaactttacttttaaaaagctgaatatctttttcatacagtactgcagcttgtgggttcagggggctcgctgtatcaatcttgtagaaaactctccttgcatacattaatgcctgccaaatatgattatggttccgcctccattttgcaaatgctctcttcacatgcagctcacctgaggtggggatcaaactaacgggtgaaaagaacgggaaatatcgaacacccaaccgtggacagtcacccatctggatagttatccagggatgtaaactgtaatacttaaatacgcccatccttggtaaagtcccatgccgtatgaatattactccaaaccacattaatgcagagcgataagatggctgcacatagacgcctggtagcttctgcttcacaaccaaggtaaattctgcaaagaagagagtattcccaggtagaagggtccataggacgcatgcgtgcccatttgttgactgtgctgctggggcaggagatgtaggcttagttatgggcaaagcatttttgggaatagaaggcagctgtttctttggtgcagttcgtggaggactggttttcacgtcccctgttaatgtcttctcttcaccttcagatcgtttgcgtacagagcttgtagacatgctccagaaagggttcataacgtgtattccaaacaaagaaagtcagtggtgtatcatccaaatcttctgtcttcggcattcactttaccccagtgccttcaatgcagagctcctggctgccaagcgccgccgcggcccgacagcatctcccaccgcagcgccagccctgcccctgcttgat

SEQ ID NO: 133162 - DNA, 1400 bp, Homo sapiens
ggacggagaaggagattctggtggaggaagaggattggggggggcgggggcgggatggcaatgccagcagaggccccttggatggcctccagctttaatggcttcctcagcctcccaccgggctggctgctgctaccaccaccatctgatcgcaatccccccttgcagccgtcatcaaggcctccactgtgtgtcaggatgtggatgaatgccttcacccccttaattagtttattcttctgggcatccctggtgagctcgggagccaggaggctgcacccaatccagccacagccttgcagagagcaggcacccatgccagcacctggagctgcccgctctgcagtagcagccagcatgtctgactgcacagtggctgggccctgcactggctcacacaccccttgccactccacatctgactcgcagtctcccttggaggcgtgggatccagcctggtggtatgagctgagcgcagctgtgcccagtgcagaatgagccctcggaaaggtcattgattgttgctgttgctgctgctgctgctgttgctgttttgctgctgttattgccactactgttgttgctattgttgttgctgctgctgttgctgctgttgctgttgttgttgctgctgttgttgctgctgttgctgctgctgttgttgttgctgctgctattgctgttgtcgctgctattgctgctgttgttgctgctattgctgctgttgttgctgctgtcgctgctgctgttgttgctgctgtcgctgctgctgttgacactactgttgttgctgttgctgctgttttgctgctgttgttgccgctactgttgctgttgtcgctaccgtcgttgctactgtttttgctgttgctgctgctgctgttattgctattgttgttgttagcgtacagcacatgcatggccttcaatgaataagtctcagtgtgtgctgccattatctgtaaagtgccattaggcagattggctgtgaccacaggctgccctggctttggttgaggtggctgctgggaagattgcatgtttccagccaaaggcccttccatcagactagagcagtggttctccaccacggcgattttgctgccctctggccctggggacttttggcaatatctggggacacttttggttgtcacaaccagggaagaggtgcttctagaatctggtgggtagaggcacaggatgctgcccgccacgacgatctcaaagtccccatcatggtccacatcagtaactgccacaccatagttgagctgggtgggattactgtcatagtcaggaggcagaactgagttggtgactgcagtgaacatgggttcagcccgctgggacccctcagtgatgggcagaaaccagagcagcagcaggaacggtaacat

SEQ ID NO: 133163 - DNA, 980 bp, Homo sapiens
ggcacgagggacgccaccgccgaggaaaaccgtgtactattagccatggtcaaccccaccgtgttcttcgacattgccgtcgacggcgagcccttgggccgcgtctcctttgaggtaaggggcctggataccaagaagtgactgctcatctaatccataaagctatgttaacagattggaggtagtagcattttcattacaagtgactaaaagaacagctgtttacccctgatcgtgcagcagtgcttgctgttccttagaattttgccttctgtttgcagacagggtcccaaaggccagccagaaaattttcgttgctctgagccactggagagaaaggattttggttataaggggttccctgctttcacagattatttcccagggttttatgtgtcaaggggtggtgactttcacaccgccataaatggcactgggtggcaagtccattctatggggagaaaatttgaaagatgagaacttcatccctaaagcatacggggtcctggcatctttgtccatggcaaatgctggaccctaacacaaatggttccccagtttttttaacatcttgcactgcccaagactgcagtggttggatggcaagcaatgtggtgtttggcacaagtgaaagaaggcatgaatattgtggaggccatggagcgctctttgggtcccaggatgggcaagacctagcaataagttcaccattgctgactgtggacaactccgaataaagtttgaccttgtgttttatctttaaccaccaagatcattcccttctgtagcttcaaggagagcacccctccaccccatttgctcgcaagtatcctagaatctttgtgctctcgcttgcagttcccttttgggttccatgttttccttggttcccttcccatgcctaggtggattaaaaagttcccctttatgattattgaaataaaaactaaataacaattgtcaaaaaaaaaaaaaaaaaa

SEQ ID NO: 133164 - DNA, 240 bp, Homo sapiens
ggatccggttgcagtgagccgagattgtgccactgcactccagcctgggcaacaagagcaaaactctgtcccccttgttgatttcttcatttaactgcattcagagattacagtttgtctcttgtgatgcatattgattgtgcttatagggctcagaacatcatttctttgaaaatggtacctatatacctcataggagctgccatgatcctctggaggccagggctgaggatttcttgg

SEQ ID NO: 133165 - DNA, 1647 bp, Homo sapiens
atgaagcctaaactgatgtaccaggagctgaaggtgcctgcagaggagcccgccaatgagctgcccatgaatgagattgaggcgtggaaggctgcgggaaaagtgctggtggaaagcattcctgagggcctggacttccccaatgcctccacggggaacccttccaccagccaggcctggctgggcctgctcgccggtgcgcacagcagcctggacatcgcctccttctactggaccctcaccaacaatgacacccacacgcaggagccctctgcccagcagttttgtagccgaattattttagtcaccggctatcgtggtaatgaactgcacgaacgttatgcgaaccagagcaatatcactattattcacaacccagattatgcgcagggtttactaacatccgtcaaggccgcagtacccgcagtgcaaacagaacattgttttctcacccacggtgacatgccaaccctcaccatcgatatttttagaaaaatctggtcgttacgaaatgatggcgcaatactgccactccataatggcatccccggccatccgattttagtgtcaaaaccatgcctgatgcaggcaatccaacgacccaatgtcaccaatatgcgtcaggcactccttatgggagatcattattccgtcgaaatagaaaatgcagaaataattttagatattgatactccggacgactttattacagcgaaggaaagacaagagtctgggccctggaagctcgaagacgtcgcggcacccggaggcaatggagggcggggctcggcaggcgccggcagctggacgtccaggttcccttcccccacccgcctgtgcccctgtgcgcatgccctgagggagagcggggtgaggggggtggctcgtcccctggacgggcggagccctctggggattgtagtgcgtgctcgacgtcaattcgtgtacctggcggctgttggcccccgtttcccagaagcccctgggccaaattggggcgttcctggatgctctgtcaaggagctgggcgtggtcatgtacaactgcagctgcctggctcgagacctgaccaagatctttgaggcctactggttcctgggccaggcaggcagctccatcccatcaacttggccccggttctatgacacccgctacaaccaagagacaccaatggagatctgcctcaatggaacccctgctctggcctacctggcgttcaaaacaggagagaaaccctatgtgtgtgccgagtgtgggaaagcctttagtggcagttcaaatctcagtaagcaccagaaaactcataccggagaaaagccctacatttgttctgaatgtgggaagacctttcgacagaagtcagagttgattacacatcacagaattcatactggagagaaaccttatgagtgcagtgactgtgggaagtctttcactaaaaaatcacagctccaagtgcatcagcgaattcacactggagagaagccttacgtgtgtgctgagtgtgggaaggcctttagcaacaggtccaatttgaataaacatcagacaacacacactggagacaaaccctacaagtgtggcatctgtgggaaaggcttcgttcagaaatcagtgttcagtgttcatcagagcagccacgcttga

SEQ ID NO: 133166 - DNA, 632 bp, Homo sapiens
tttttttttttttttttccttttcatttagatttttttattcatttgcatgagataaattattttctaaaattattttttagtacagttttgctatatacccagagctcctgatatatatataccatttttattgtttttgagatattttacaattttagttttgactttggctttggagtgggttgctgagaacatagcagttgtttcactaatccccagtaaaaaccctactaggctattggttttccttcctactcttcaatgcagttagttaacatatttggacttctgaatctattttcaataatttccagttctttcaggcatcaaggttaacactcataggagctgccatgatcctctggagccaggcgctgaggatttcttgaggtgaggtccaattagctgggcatggccacactgggtctcaaccctttttctgtagggtgtctgaagccttggcagtcatctggtgaactcaagcagagctgctctgaagagatgggctggagtctagaggaaaatctggcccaggggctccccagagacacccagaaacctcaaagatttatcggtattggaatatgaaaatactcctgacaccagcggcaaaaaagccttggaagacca

SEQ ID NO: 133167 - DNA, 3524 bp, Homo sapiens
  misc_feature (1)...(3524): n = a,t,c or g
taatgttgccgctggtgtcaggagtattttcatattccaatatcgataaatctttgaggtttctgggcgtctctggggagcccctgggccagattttcctctagactccagcccatctcttcagagcagctctgcttgagttcacagatgactgtcaagcttcagacaccctacagaaaaagggttgagacccagggtggccatgccagctaattggaccttacctcagaaatcctcagtcctggctccagaggatcatggcagctcctatgagggatcagcgtccttcacggatgcggctatcgatttcagccgaggggaatggcggcacctggacccttctcagagaaacctgtaccgggatgtgatgctggagacctacagacacctgctctcagtagctggacccagacctttatcatttcccatgaacagggtatcaagttcctaaaccagaggtggtcatgttggagcaaggaaaggaaccatgggcactgcagggtgagaggccacgtcacagctgcccagtgtgacttatttggaaatggcttgaagcataatttagatctacacattcatgatagaaacgatgcttcaaagaatgttaagaagagtactaactatggtaaaatgtctttctatacttactgtgaatgtactccaacaggagagaaattatgggaccataatcaacatagaaaaatcatcggttataaaccagcttcctctcaagatcaaaaaatttattctggggaaaaatcctatgagtgtgctgaatttggaaagagcttcacctggaagtcacagttcaaggtacatctgaaagttcctacaggagaaaaactctatgtatgtattgaatgtgggagggcttttgtacagaagccagaattcatcacacatcagaaaacccatatgagagagaagccctataagtgcaatgaatgtggaaaatccttttttcaagtatcgtctcttttcaggcatcacagaattcataccggagaaaaactatatgaatgtagtgaatgtgggaaaggtttcccttataactcagatctcagtatacatgagaaaattcatactggagagagacaccatgaatgcactgactgtggcaaagcgttcacacaaaagtccacactcaagattcatcagaaaatccatacaggcgagagatcctacatctgtattgaatgcgggcaggccttcatccagaaaacacaattgattgcacaccgaagaattcatagtggagaaaaaccatatgaatgcaataactgtggcaaatccttcatttccaagtcacaacttcaggtacatcaacgtgttcacacaagagtgaagccctatatatgtaccgaatatgggaaggtcttcagcaataattccaacctcattacacatgagaagattcaaagtagagagaaatcttccatatgtactgagtgtgggaaggcctttacctacaggtcagagttgattattcatcagagaattcacactggagagaaaccttatgaatgcagtgactgtgggagagccttcactcagaagtcagcactcacagtgcatcagagaattcatacaggagaaaaatcgtatatatgcatgaaatgtggactggccttcatccggaaggcacacttgattacacatcaaataattcatactggagagaaaccttataaatgtggtcactgtgggaaattgtttacttccaagtcacaactccatgttcataaacgaattcacacagggagaaaagccctatatgtgcaataaatgtgggaaggcattcaccaaccggtcaaatctcattacacatcagaaaactcatacaggaggagaaaatcttgtatatgttccaaatgtggaaaggccttcacccagaggtcagacttgattacacatcagagaatccatactggggagaagccttatgaatgcaatacttgtggaaaagcctttactcagaagtcaaatcttaatatacatcagaaaattcacactggagagagacagtatgaatgccacgaatgtgggaaagccttcaaccagaaatcaatactcattgttcatcagaaaattcatacaggagagaaaccctatgtatgcactgagtgtggaagagctttcatccgcaagtcaaactttattactcatcaaagaattcatactggagagaagccttatgaatgcagtgactgtgggaagtcctttacctccaagtctcaaatgactgcagcactgagcctgttcactcaggatagaaaccctatgtgtagtgccgagtgcgggaaggcctttagtggcaggtcaaatctcagtaagcaccagaaaactcataccggagaaaagccctacatttgttctgaatgtgggaagacctttcgacagaagtctgagttgattacacatcacagaattcatactggagagaaaccttatgagtgcagtgactgtgggaagtctttcactaaaaaatcacagctccaagtgcatcagcgaattcacactggagagaagccttacgtgtgtgctgagtgtgggaaggcctttagcaacaggtccaatttgaataaacatcagacaacacacactgggagacaaacccctacaagtgtgggcatctgtggggaaaggctttcgtttcaggaaattcagtgtttcagttgtttcttcagaggcagccacggttttgaggaggaaacagtgtgagaaaacccccctgagggttggggtcctgattgtaccacctgttgccaccncatgccagccagaaaaatatgtatattattgtaaatagaaatgaccccacatcagaatgtccaccacatggcctgttcctggagagggccctctgagaaggcacctgaatgaggcgagggaccccttccctacattgtcacccatcccccagtaaaccttgggtcattattcatactgacaaggaaccgagtcaatttggtgaataggaaaagccttctcatgaaaactacaatagaatactgttaccaaattcttcataagaaagatcatattatgggaatgataatcctgtttactgtggattaggtatagtgccaacagtttgaatggtaagacaacataatacgtagttattttgatagtgatgaatcctaagttatgtgagttgttcgttgtggaacacattgtgtaacagactcctgggtgtttttctttctcattcgaatctaccacagttggtcatatccaaccctcattcagtatttctatcaagaaagagatgctacaaaaaaaaaaaagaaaaaacctttatgtatacagacgtaaacctcagaatgtatgttgagtccccactgtcatctaccaagacttgcacccccctcattatctaccatgactgtctctcagcctcacgggccctcagcactttgtgttttgacccccagcaccgtgtcttgtgaactcccatcaccttcaagaaagcttccgaggtaagaattttatggtcatctgggacaacttaaatctccctt

SEQ ID NO: 133168 - DNA, 484 bp, Homo sapiens
  misc_feature (1)...(484): n = a,t,c or g
ctgatcctctcgccgttgcttctgctcttcgctctgctatgctgggactcatgtatgtctactggactcagctcaacatgttccagaccttgaagtacctggccatcttgggcagtgtgacgtttctggctggcaatcggatgctggcccagcaggcagtcaagagaacagcacattagttccagaagaaagatggaaattctgaaaactgaatgtcaagaaaaggaggtcagganccattcccagtatgagaagaaaaatggaaaaaaaaaanctttatttaaaaaagaaaaaagtccagattgtagttatacttttgcttgtttttcagtttccccaacacacagcagatacctggtgagctcagatagtctctttctctgacactgtgtaagaagctgtgaatattcctaacttacccagatgttgcttttgaaaagttgaaatgtgtaattgttttggaataaagagggtaacaatagga

SEQ ID NO: 133169 - DNA, 433 bp, Homo sapiens
cccacgcgtccggcaaggccctgtgagcgttaggactgggatcccggccgcggctgctggaagcgtcgaagctcaccggggccgcggacactgacctgtgcttagaactcatcctggcccgcaaagcctgccgcgagtccctggcgtgccctgtggcgggctcttggagccactttcccgagcggaagtcagtccgcggctcggactccggcgggacctgctcggaggaatggcgccgtcgggttcaagcacgtgtcttccatgttggccctgacaatcatagccagcacctgggctctgacgcccactcactacctcaccaagcatgacgtggagagactaaaagcctcgctggatcgccctttcacaaatttggaatctgccttctactccatcgtgggactcagcagccttggtgctcaggtgccagatg

SEQ ID NO: 133170 - DNA, 706 bp, Homo sapiens
tcagcatcttttcacatgggagtgttgtaccgaagttttgcaaacatttcatcctggtgtctggggattagagggggatgagcatgtgcgaggcggaggtgactttggcagctgctccgcattctgtctttgccatgcctgccacaaattgccaagacctgttctaaaactctgtgtctgccaattctttcttagatctctatttcaaatgagaccaaagatctgcttctggcagctgtcagtgaggactcatctgttacccagatctaccatgcagttgcagctctaagtggctttggccttcccttggcatcccaagaagcactcagtgcccttactgctcgtctcagcaaggaggagactgtgctggcaacagtccaggctctgcagacagcatcccacctgtcccagcaggctgacctgaggagcatcgtggaggagattgaggaccttgttgctcgcctgggatgaactcgggggcgtgtatctccagtttcgaagaaggactgggaaacaacagcgttatttgtgggctgccacctacaagcttcatggatcatgtggggactgagccatccattaaggaggatcaggtcatccagctgatgaaccgcgatcttcagcaagaagaactttgaagtccctctccgaagccttcagcgtgggcctctgcagctgctgtgctctcgcataatcgctaccacgt

SEQ ID NO: 133171 - DNA, 2535 bp, Homo sapiens
  misc_feature (1)...(2535): n = a,t,c or g
tggtgtcgcaaggctgctggaagcgtcgaagctcagcggggccgcggacactgacctgtgcttagaactcatcctggcccgcagagcctgccgcgagtccctggcgtcccctgtggcgggctcttggagccatcgcccgcgggaggttactagtcgccgctcgagagccggccaggcgggatccccttcccctgcgggacaggggcatgggcacaagctctggatcatcattgggactgtgtatagcaccttggaagagtgtagagtgtactgaatggttgtttccccccaaggttcaagcactgtcttcctgttggccctgacaatcatagccagcacctgggctctgacgcccactcactacctcaccaagcatgacgtggagagactaaaagcctcgctggatcgccctttcacaaaacgcctttgcttttcctggttcactacatgtgtcaccacttaacattgacttttccccactgtgtagaaagcatgtacctacatcagatctaagtctttgccatgcctgccacaaattgccaagacctgttctaaaactctgtgtctgccaattctttcttagatctctatttcaaatgagaccaaagatctgcttctggcagctgtcagtgaggactcatctgttacccagatctaccatgcagttgcagctctaagtggctttggccaagtacgggaaggggtgagtggatgaaacaagacttgccattcattggggttctactctttaccttccagaacagttgacagtggttcgtgcatctcatttctgctgttacttgacatccagcatatttctgttttgttatggcaggaccttgttgctcgcctggatgaactcgggggcgtgtatctccagtttgaagaaggactggaaacctctacagcagtggccctcccaccttcccagcagaggaagagaaacagctgcatttcgcatttctttcaggatcaggtcatccagctgatgaacgcgatcttcagcaagaagaactttgagtccctctccgaagccttcagcgtggcctctgcagctgctgtgctctcgcataatcggcaccccagaaacaaaattctctgctcctgtagcctttgttgtaacaaataattttttatttatttccagttgcaagtcaccaatgttctgtctcagcctctgactcaggccactgttatagctcctgtttgttatatccatgactttcctacctgagttcttgctaagcccattgtcattcttaacagggatgtttttgaactaaatttcatgaacgtcaaattttatatctgcatgtgaattcctgaacacccaccaattgacctggcaactgtcttctctattttcctctagctcagagtcaagatctccactgatatattttctgcctgttctcagagatatactgatcctctctgaagactaactctatatgcctctttcagggtgacatacccagccaaagccaagggcacattcatcgcagacagggattcaatgttaggcccagggagaatcttgaaattatcagatgaaagattgtattattcttccatctagacatttgtccgactccataaccagaagactggccaggaagtggtgtttgttgccgagccagacaacaagaacgtgtacaagtttgaactggatacctctgaaagaaagattgaatttgactctgcgaatattatctattgagtttcacccacttctctgcccctgtgcttttacagactgtccttatttttctaggctgatgtggtcatcaaccccggtatacatggctgcccctactgggaagggcacattcttaagtcttcttggtgtgtctttcggcagcacctgttccgcgagcctgagaagagttggcatggcttgtgttgcttcccttttaagttctaatgcctttttaatttatttctccccatcattcagtggatcctaactttcctcaaccgcagggcatcattatgtttcatttaattggatgtcatgacacctcttcttgcagctatgctgggactcatgtatgtctactggactcagctcaacatgttccagaccttgaagtccctggccatcttgggccantgtgacgtttctggcctggcaatccggatgctggccccagcaggcagtcaaggaggatcgctgcagagcagagcagtagattggcaaaatataggacactacgaacagcacattagttccagaagaaagatggaaattcttgaaaactgaatgtcaagaaaaggagtcaagaacaattcacagtatgagaagaaaaatggaaaaaaaaaactttatttaaaaaaagaaaaaagtccagattgtagttatacttttgcttgtttttcagtttccccaacacacagcgagatacctggggagctcagatagtctctttctctgacactgtcgagagacgctgtgaatattcctaacttacccagatgttgcttttgaaaagttgaaatgtgtaattgttttggaataaagagggtaacaatagg

SEQ ID NO: 133172 - DNA, 879 bp, Homo sapiens
tccctaggaaagaagctccctcgacgttcttgtcccagaccttttcactccaaaacaggaaattcagccacctgttcccgcgagcctgagaagagggccccccaccgtggttgtccaatacattcactgccctgatcctctcgcccgttgcttctgctcttcgctctgtggatccggattggtgcccaatgtctccaacttcacttttggcctccctagcacgattaattttccactggggaccatgctgctatgctgggacctccatgtatgtttactgaactcaggctcaaccatgttcccagacccttgaagtcccctggcccatcttgggccagtgtgaccgtttcctggctggccaatccggaatgctggcccaacgcacggcagtccaagagaaccagcacaattagttcccagaagaaagatggaaattcctgaaaactgaatgtcaggaaaaaggagtcaagaacaattccccagtatgagaagaaaaatggaaaaaaaaaaaactgtatttaaaaaagaaaaaagtcccagattgtagttatatttttgccttggtttttcagtttccccgaacacacagcagatacctggtgagactcagatagtctctttctcctgacactgtgtaagaagctgtgaatattcctaacttacccagatggttgctttttgaaaaagttgaaatgtgtaattgttttgggattaaaggagggtaacaaataggaacaaaaaaaaatttaaaaaatgggggccctctttaaaggataccttcagggggcccactttcccctgggtatgccaaaccaatcttactccctttttcgaggcttatttacacgacgagactgtgcccctactcacaaacgcggg

SEQ ID NO: 133173 - DNA, 679 bp, Homo sapiens
cggccgcgtcgacccgaaagcgaagaaggaagctcctgcccctccgtaaagcttgaagccaaaggcgtaggcctttaaagggccaagaaaggcagtgttgaaaaggtgtcccacagcccacaaaaagctggaagatcccgcacgtcgaccccacctttccgggcgggccgaaagacaactgcggactcccggagaccagcccccaaaatcatcctccggaagagccgcgtcccaggaggaaacaagcttgacccactatgcgtatcatcaagtttcccgctgaccactgatctgcctctgccgtgaagaagatagaagacaaccaacacactttgtgttcattgtggatggttaaaagccaacaagcaccacgattaaacagggctgtgaaagaagcttgtatgacatttgatgtgggccaaggtcaacacccctggattcggcctgattggagagaagaaggcatattgttcgacttggctcctggattacgatggctttgggatgtttgccaaccaaaattggggatcaatctaaacttgagtccagcttgcctaatttctgaatatatatatatatatatatatccttttcaccatatacatgcctgtctgttcatttctggttgggctgggaaggcacacacacacactgacatgacaggggctttggcaagact

SEQ ID NO: 133174 - DNA, 1144 bp, Homo sapiens
  misc_feature (1)...(1144): n = a,t,c or g
tttctgaggcgttcgagctccatcggctcccatccgggctatcctgccgtcttatcggctgcttctcccacaggatgcgggcagggggcctctctcccactccccacacagggatttctgagtagcgacaggggctggaggcttattttatggggtagggggccgctggtaggcgaagattgcccgagggagagggggaggatgaagccagtgcgtggcggagacttgccagatgtttgatgcctaagaagaaccggattgccatttatgaaactcctttttaaggaagggagtcatggtggccaagaaggatgtccacatgccctaagcacccggagcatggcagaagtcaagaatgtgccccaacccttcatggtcatgaaaggccatgcaggtctctcaagtccccgaggcctacgtgaaaggaaccagttttgccctggagacatttcctaactggtacccttacccaatgaggggtatcccagtattctccgtggattacccttcatcttgcccccgggagatttgtgccctgcccacccctacggcccgtagcccgtcccaggaggatgggcaggccttcggcctaaaaaggtcttgggaggggttgaggcgacctggcgaggatttcacaagaggggggaagtttgacagaggttaccttacaagacggagtgcttgttgccaacttggtgcccgacaagaaaagccgaggctgggggcttgggtcaagcaacccgaatttccagtttagaggcaggatttgtgttgtggacgtggtcaagccacctcagtagtaaaatttggagagagattctttttgcatttgaattaaactttacagccaaaacgccttatggggggccccctttaaggagcccacttttatccccccggggtggccgacgaaaaatttttttataggggccccaaaaataaatcccggggccccgttttaaaaccgctgggagggggaaaacccgggggtacccacatttaatccccttgggacaagaattnaaacagnntntgtnaaccctatttacttcttaattgtactttgcgcatttggaggaaaaacccgcctggggagctacacactcacatgaaaactgtgcaaacgagtactaggcttgactct

SEQ ID NO: 133175 - DNA, 1226 bp, Homo sapiens
tcagtgcggtggaattccccacgcctcgttggcagtgggtgctggacctgcgacgcaactacaaatggggcggagctttcggcactggagcagctaatttgcatataggaatgaggtgcggctcggcttccatgggcctaatttacagatagggcggtatttctgccccttaaccgaaagtgggatacagaggacgacggtgttaggcgcctgtgtaggagtaaaatgtgtttattttgcattcaacgagagctcctgcattgcagctattttgcatatgatttgcatcttacgaagaatttgtggcaaaaaaaagctgggcgtgcgccgtaggaacctcctgctgagacgcttccggtagcggcgcgtgacccgacaggtctttcacctacctacctcagctcccacaaacacgagaagttccagcaagttcgccactttccggttcttctgggttatccaatagcatcgagtggagcatccccggaagtgaggcagcggaggacgacctttttccggttccggcctggcgagagtttgtgcggcgacatgaaactgcttacccacaatctgctgagctcgcatgtacccgccggcggcagtcttcccttttcgggcgggatggtgggccggggtccagtgcttgcctaaactcctccgccctgcaggccaccgagggtcggtatctgccctgtggaaatcaacccccaacttcgtgggcgcgtaatgataccctaaaagtggaagtggtcgggcgttccctggaagccggccccgataaacttgccgtctgaatcccaggtgcccgaaaggggccgggttgaggggatatgagggagaatgaggagttttcttgaggaccatggcaccaccttgcttgctgggaggttggaagtgattaggagggcacccttgcaggtccccggaaatcttggacgttatttttccccattcaagccgcggggatcccccaacatgcttgctgagtgaaagaggaaacttgagaatttgattgtgccaaggcgccaagtttttccttgttaatgactgtgaaatatattgttgatctatacccggttttccgaaattctgccgtgtgtaatccccaacccttgacccaattgacaccaaacacaagtgttttttgaagctccggtattatatatttttttcctcattaaaaggtttaaaaccaaaaaaaaaaaaaaaaaaaaaaaaagtcgacg

SEQ ID NO: 133176 - DNA, 422 bp, Homo sapiens
  misc_feature (1)...(422): n = a,t,c or g
agaatcactacaagaaaaactccttgtggtgaaggttctaagacgtgggatcgtttccagatgagaattcacaagcgactcattgacttgcacagtccttctgagattgttaagcagattacttccatcagtattgagccaggagttgaggtggaagtcaccattgcagatgcttaagtcaactattttaataaattgatgaccagttgttnnnnnnnnnnnnnnnnnnnnnnnnnnnggggggggccgttttaaaggatccttgggggggccaaagtttacgggggctgggaaggtaatatttttttccttttggggggccgtattaaaacctacctgggaattttgggaaaggacccttattttgggggggggacttattgggccaacctccctacagaattttaaggctttagggaaaa

SEQ ID NO: 133177 - DNA, 383 bp, Homo sapiens
  misc_feature (1)...(383): n = a,t,c or g
ntttatattttccctaaagcctttaatttctgtagggaggttggcccaatatgtcccccccccaaagtaagggtcctttccaaaaattcccaggtaggttttaattcggccccccataaggaaaaaactatttccttgccagccccggtaaactttggcccccccaagggtcctttaaaacggccccccccnnnnnnnnnnnnnnnnnnnnnnagttaaacaatcattttattgcttgagtacacagacaaatttatgcgaccagggcagaggctgtagatgattcatatttccaattgggagggaggactcgcttggtcttataatatcgagccaaacggtgaatccggctctctattagaatcagacggcggacgcgtggg

SEQ ID NO: 133178 - DNA, 2187 bp, Homo sapiens
tcaatgctgtagtgagttatgatggtgccattgcattccagccccaataacagagcaagtctctttgccaagactaaagacaaatggttcatttctatcatgactggaatcaaacttctttccatttgacaattttcctttgtaatggacataaactttgtctccaatcatcggcgtttcctcaccattccccactcttttgacaatctttaatactcccctgtcttttttggaggtaatatcctctccctgctcagcaacagtggctgtggggctttcttcattgttcttggcaccttcatcagtagtcattgtcgaagaacaaatcacaccaatgcagcgatcaacgccttctcgttcttcagtgctgaaaaaatcctcttcggtaagaacatgagtacattgctcatcagcataggtcggaaatacatgctcaatgcaatccgggtgttttaaaccaagctgatcggcaagctcgaaagcacgacggtattgttcagatcctggccgtccaagaaagaggcttctggtcagcacagtagcattgctgaggctgagatcaggtgaaagggccagcagccaggtgcagagccgcaggagaccgaggtctgagagctgagggagctgcagctgggcacacagcaagtccatcttttttctgagcatgaacgcccgcaccccacatgtagtctgaagcattagggcgattagcagcatgatatcaaaacgctttgagctgctcgttcggctatggcgtaagcctagtccgtaggcaggacttttcaagtctcggagggtttcttcaatctgcattcgcttcgaatagatattaacaagttgttggggtgttcgaatttcaacaggtaagttagttgctagaacccatggctcctttgccgacgctgagtagattttaggtgacgggtggtgacaatgagtccgtgtcgagcgctgattttttcggcctttagagcgagatttatacaatagaatttggcatgagattggattgcttttagtcagcctcttatagcctaaagtctttgagtgactagatgacatatcatgtaagttgctgataggtttccagttttccgctcctaggtctgcatattgtacttttcctcttactcgacttaaccagtaccaacccagcttctcaacggatttataccatggcactttaaagccagcatcactgacaatgagcggtgtggtgttactcggtagaatgctcgcaaggtcggctagaaattggtcatgagctttctttgaacattgctctgaaagcgggaacgctttctcataaagagtaacagaacgaccgtgtagtgcgactgaagctcgcaataccataagtcgtttttgctcacgaatatcagaccagtcaacaagtacaatgggcatcgtattgcccgaacagataaagctagcatgccaacggtatacagcgagtcgctctttgtggaggtgacgattacctaacaatcggtcgattcgtttgatgttatgttttgttctcgctttggttggcaggttacggccaagttcggtaagagtgagagttttacagtcaagtaatgcgtggcaagccaacgttaagcccagcattagaacctgtgcatctggctccagggactccatcttcacaaggcaacacagtaactctgtttgagcaggacctgggtagaggacagcagaaggggaagtcgcaccgaggcaaagtgttaatgagaaggggacagtgatggagttgggtaacggtgagtacgggtgcaggtagcgagtggcaactgtgcggaggaccgctccgggctcgaggccctctgtggttctggttgtctgtatgcatgtctgctctgtccgtcggtcctgctcctcactccgagtactgtatgtaaacctccgaagatccggagttatacaagtaccccagaatagctccagacggccgtcaggcccctgcacgaccggctcctcccggcacagggcctcgagcaagcgaccccagtcgaagggctcccagccgcggctgcccagcgcccggagcacccccaggccgcgccgcgccccctcaggccccgcctgcagcgcctgcagcaggaggcgggcgggggcctccagctgcgcccagggcgccggctccacgccctcagccccagggagccccgcgtccggtgtcgccat

SEQ ID NO: 133179 - DNA, 471 bp, Homo sapiens
ggccgcactagtgaatatcccgggtcgacgatttcgtggcgtgagaagccatgaggtgagttggtcctgaaagccctatccgcgttcatccgcgccttcaggtgccccgccgagggttcggatcctgtaggccgcgccgcggacccttgcgccacctgcgccgcggggcatttctcaaggcgggtcggcctgcgggtcgcccttcctaccaggtccgatcactgagagcctccctcttccaccggggcttgggtctgggtctgagctcccgtcgctctacttggtgtccggaatctacgggggagtccgccgtgggccgcccgcccgtctcgaagcctagacctcggaggcttccaggcagtccgagcgtgtggactccgcggccctgagcgccctgtcgcttctctcccgcagcagcaaagtctctcgcgacaccctgtacgaggcgggcgagatccaatcactgatggg

SEQ ID NO: 133180 - DNA, 2447 bp, Homo sapiens
  misc_feature (1)...(2447): n = a,t,c or g
ccagccccggggaaaaaaattttcaaaaatcaaaccccggaagcaaaactttcaagcagccagcgtatgcaggttgttttcccccttttaccctttaaaattttattttttccctaaaggctttaaatttttgtagggaggttggcccaatatgtcccccccccaaaataagggttctttccaaaaattcccaagtaggtttttattcgcccccccttaaggaaaaaaatttaaacttgccaagccggggtaaacttgggcccccccaagggttctttaaaacggcccccccnnnnnnnnnnnnnnnnnngaactggtaatagaattgtattcaaatgatgaccttaatattaggcgctgggggcttgccccatgggtgctccttggaaataataaggcccggacatttctgcccagtttttccttggagcaatgacacccaagaaggttgacagcccaggtgaatgttatacacaagctcatcggtctgtcatcattcacgtgaccaacagctacagcccngacagtaacaccttcttcatttgggaacttggattgggggaccttnaccatcatccactttgggccaccatcgttttccgttgtgtgtgaggcaggggaaggggaacttttcctgccttattttaaaccttgggccgaaggattccgtggaattctgctttgatcagaagaactctgaggggccaaaaacggcattcatacttccttgggccagcttccttgacccagttttttaatccctggttgagtttttttcaggcgccttcgatgtaccatgtgggggggaaatccacggccttagcctcgtcacagtgctgctggtcccccaaggacacacaccagagaacttagggcggggagtggacttaagcctgcgttttgggggacagcaccaacaggttacgcctagccctgggtcccaagggccggtgaagggtcccgtctccaggaaccttcgagagaggaggggggttaagcacccgccggccctcgccacccgcgccgtgccccagggtcggcctttgctgctgcgggagagaagcgacagggcgctcagggccgcggagtccacacgctcggactgcctggaagcctccgaggtctaggcttcgagacgggcgggcggcccacggcggactcccccgtagattccggacaccaagtagagcagcccctttttacagagcttctccattaagacactgaacttctcaggggtcatctccacctgcacacattgggagatggagcagtaatcacaagaaaggcttgggctcttcattcagccagtcctgctgcaaagcagaggccctagtgaaaaatgcctggcctcccacccaagcctgagtatctatctgctgctttgagcaggacctgggtagaggacagcagaaggggaagtctggggggaaatggcagaagacagcagaaagcagggaggcggtaacagaatgcccagcctgttacagagcagccaggtgcagagccgcaggagaccgaggtctgagagctgagggagctgcagctgggcacacagcaagtccatctgcttacagagtgcggggggagagaggacaccgggacatgcactctgcctctgctaggctgtctcaccctggggagacaaatctcatgttagggctggcagagccctcagtgacaagtcactgaagccacccctttcgccagtcttaactgccatgacaggctggtccttaataggagatgcacttcctccatctgccagggattccagtgacttatgttcgggtctctccttctcatgatcttcttcctcttcccaacaccgtaatcttttggggaccctcttcccctcaggactggcagcctcttcctctgagtcctttctgcgtttcccaggctgctgggagtccctgttctcctcttcttcagggtctggagcctggggggatttcaacctcctgccccccaggcccagccccctacatagactttggagctgtctctggtgctgggcaatctgcagcacagagaggagcccactttccggcagcgatggccgaacggccatcagcagggacatcaggttcctctggcatatccggggcaatcgcagcaacagtggtttcctgggtagcagagggagagcaagcagttaagtgtttggctgaagggagcacaaggcagactgggcagcccagtcgaagggctcccagccgcggctgcccagcgcccggagcacccccaggccgcgccgcgccccctcaggccccgcctgcagcgcctgcagcaggaggcgggcgggggcctccagctgcgcccagggcgccggctccacgccctcagccccagggagccccgcgtccggtgtcgccatgccggggcacgggtgccgcgccgccccctactctggtgtggggcctcagctcagaggctgaggggaa

SEQ ID NO: 133181 - DNA, 1243 bp, Homo sapiens
  misc_feature (1)...(1243): n = a,t,c or g
atgggaggctccggcggctcgtgctcgcgcacgcagggtggaggcagggagcgcacgacgtgcgcgcaccctctgccctggtccatcgctgccgcgctccttcttctgcagctcctggtgctgcttgtgtgcctcgtttggtgcggacctgcgtacctcttyttgtgaagcggcactaaagggagactccggcggctcgccatggcccgacgaaaagcccaaggaaggagtcaagactgagaacaacgatcatattaatttgaaggtggacggggcagrgatggttactgtggtgacagtttaagattaaggaggcatacaaccactttagtaaacttaattgaaagcctatttgtgaaccgacaggggattgtcaatgaggcagatcagattccggatttgaccgggcaacccaatcaactgaaaacagacacacctgcaccagttgggaaatgggaggattgaagattacaatttgatgtgtttccaacaagcaagaccgggaggtgtctacttgaaaaagggaacctgcttcttttactccaagaactctgtttctttttaaaggacccaagattacatttcttcaattaggaaaacttgcaatttgggttccacccacatccctgacttacttaccctattagttttctcttattcttttcatttccccctttcccccattccctttatttgttacataaagtaactgggtatatgtggcaccaagccatattggcattttttttttttttttttaactaaacagcccaatgggtaggtttggattgaccatccaagtgggagacccgggatgggggaaaaattactgattctgtgaaaaatacccccctttctccatttagtggccatgttccattcagcccttaaacctttatattccgagtaagttattttgctctcactgttttaacaaccacaacaaaacaacaacaacaacataaaaatccttgcatacccttgttcaattggatgaattttaatgtttttcaatttatcattgttaaaaccccnggggccaaantttttataacttttttggtacggtagctgttaccnatgtagggcaatctcgtctttaagtagggattaaattactcnctaaaacaaaaaagaatcctagawcactwctcccttcaagtcaaagcgtcttggttgtttaaataaacttcttgtttaaaaaaaaaaaaaaaaaaaaaaaaaaaacctcgagggggggccc

SEQ ID NO: 133182 - DNA, 500 bp, Homo sapiens
  misc_feature (1)...(500): n = a,t,c or g
aactggataaccctcgcaangnccnnaacttgagtacactgggaagngncgnggaattctctgcggccagcggaccgggcgcctggggcactgaccactactgcctggagctgctgcggaaacgggattatgaaggttatttatgctccctgctgctccctgcagaatcccgaagctctgtttttgcactgacggcctttaatgtggaactggctcaggttaaagactcagtctctgagaaaacaattggactgatgcgaatgcagttctggaaaaaaactgtggaagatatatactgtgacaatccaccacatcagcctgtggccattgaactatggaaggctgttaaaagacataatctgactaaaagatggcttatgaaaatcgtcgatgaaagagaaaaaaatctggatgacaaagcatatcgtaatatcaaggaactggaaaattatgctgaaaacacacagagctctcttctttacttaacactagaaatattg

SEQ ID NO: 133183 - DNA, 658 bp, Homo sapiens
attatgaaggttatttatgctccctgctgctccctgcagaatcccgaagctctgtttttgcactgagggcctttaatgtggaactggctcaggctggttaaagactcagtctctgagaaaacaattggactgatgcgaatgcagttttggaaaaaaactgtggaagatatatactgtgacaatccaccacatcagcctgtggccattgaactatggaaggtctgcacaccagcagaggcaggcccagtttctgggccccagattgacttcacagagccccagtaaagatggaaagccagaaccccccaactggggattgagaagaaaaagtggatgggaagctgctgttaaaagacataatctgactaaaagatggcttatgaaaatcgtcgatgaaagaagtctcactcttgtcgcccaggctggagtacaatggcacgaccttggctcactacaacctccacctcccgggttcaagtgattctcctgcctcagcttcctgagtagctgggattacaggaaaaaaatctggatgacaaagcatatcgtaatatcaaggaactggaagattatgctggaacacacagagctctcttcttatttacactagaatattggtataaggatcttcatgcagatcatgctgcaagtcatattg

SEQ ID NO: 133184 - DNA, 516 bp, Homo sapiens
ggcggagcgtggctgcggccagcggaccgggcgcctggggcactgaccactactgcctggagctgctgcggaaacgggattatgaaggttatttatgctccctgctgctccctgcagaatcccgaagctctgtttttgcactgagggcctttaatgtggaactggctcaggctggttaaaaactcaccctctgagaaaacaattggactgatgcgaatgcagttttggaaaaaaactgtggaagatatatactgtgacaatccaccacatcagcctgaggccattgaactatggaagtgattgccaaaagagggtttctgtaacaggagccacccacagacctgacagtggtacacctcttctcatgtctgcacaccagcagaggcaggcccagttttcttggccccacattgacttcacagagccccagtaaagatggaaagccagaaccccccagctgtggattgagaataaaaagtggatgggaaactgcttgttaaagacattatctgacta

SEQ ID NO: 133185 - DNA, 485 bp, Homo sapiens
tgccctgagctgtgtctctgtctaggtacacagttcatgagtgaaggagctcctggagtcatgaataatggaagtccagattggtcaagtaacttgtcccagccccagcccatgcatctggtatgtggttggacaggtttctaactcattacgtaacatcaagaacattttaaactgctttgagacatttgtgaattaagatctcaataaatagtcctccctggcaccagctccatccacattaaatgagacttgaaaatttctttgaatggatattagtttagaaggagctaagttattagttggcctcacattcctcagttgggccctgggcccagcatgccacttctcctggttattatggttcacatctgaggtaacccatcgggaaactggatgggacaacaaactaaaaatgttttagtttggacctgtccaaaaccaagagaataaaaacaaaatggatagtcaagatgaaaaaaaaa

SEQ ID NO: 133186 - DNA, 2745 bp, Homo sapiens
atgccccctttgctgcctcctggccactgcctgacaaccacagaagctgtcaccactttgttcctaaggttgtgttccctggtaataactcttatcttttctgaacaagagtggggctttaggacatggagagtcggggagaagacagcgacgtcgaatgagagcggcacaggtcgaagggacagtagactaacgacctgcccagtccaggcctctccagatggtcccctggcttctgcatccctctttcacctcctttttcctcaaccaagacaaaccactcctgtccagtctatcagggcctccccactgaaaccagagtcctctgggcctcggtgtgactcagcggcttctagggcaggggaccttgccacagatggcattgctgtggcctctcctctggaagctgcctggcctgcagcttcacctagctacagcccccaggccaagccccaggaagtttatctccaagatctctctccagaaatgtcatttccagctgctttctctgaatccagtgctaatgtctcctccgtgaagtctgctcaactgccccaggcaaatccaaaggctctaggctctgtgctcccatcaaatgaggcacattcatttctgcacacattacttaggctagagggcgctgaagagacactgcagaagacatacagtttgcttcctggttccagtgtgttcactgggagcatggctgcttctccagtgtccagctcttgcaacactgacagctcctctagcacctggctccttcagtaccagcagcttaccagggcacctccctcagtgtgggaaaccactgatgaggtaggtgtgttttgggtggagaaggaaaggcagggtagaagagagcggaatccagccaggcagcccccaatggaagaatattcaactctagctcaacgtggggaagagggaatatggaaagaatccagagtggacaagggcagcctcacattaggaccccatccaatgggcatatctgtcactttccagcacaccaggactctagggcgccaggatgggcatagctgtggcagagccatgaggtttgcaggcagtgcctcaagcatcacagcagctgcagtgcaggcacctggctgtggacaacctcatgggggtggcgagcaggtggcccaaggtgccagggccagcatggcatccgcagggtcagctagtcttcagtgctgccaagaagagtttatgagctgcctctcctctgctaccaggaaacagcctgatgggttggcattacctgtcgctatcctcacagcccgattaaagtcccctgttttggccatgggtagacaggacgttattctggattctcaccataacccaggctggtctagaggcagttatgagaacatagcctatagatgcaaggaagtttgtcgctcttcctgttgctggggccagcaggatgggctggggaattcctgcaccccaacagctgcgtccccagctcagtacctggacaacatgaatccacccccatcgtcaataagcgtctttcagagctgccagctccctctggggaaagccctttccactcgttctttgaggcccaaagctgattctggtctaattataactgtattcccagcaggcacaggagcactgaggacccttcttgacctcctggatcagaaaggcagaggaaatgctgggcagaagtcaagaataaggaaacctttcgcagaagccctctggaagaatgccccctttcgtgcttccttggtcctaatgggtcacatgtctattcctaagccagtccctggcaagaagaatggaacgaccacctttggcttccactatgaggattcgctctctggggtgggaacatccatacacttatgtcaaggagaacagatacctgttgggaaggaggaaagagggacaagcgttgggcaggcaacccaaggaccctgcagcagtctccgtgacaacttctcttcctggtgcctctgcgactctgatcattttttcttggtgtcctctttctctgaagtgcatgggttggagcctcatcatgtctctcctgctgcatcacagcagcctctcaccggccactttacacagccaccagaacaatatttccaaaccacaggtcacattatgcccctccttacccacatcccccagcttctgaagacatccactggaccttccatgagcaggagaggagaaggtgatgtgaccacgggggcagagactgcgaccacagccaagaaacgctgcagccgtcagaggctggaagacatggattctcccctagagcctccagagggagcgcagcctgccagcaccttgatttcagccagtgacactgattgtggacttccagccttcggaactgtaagagaagaaatgcctgctgttataagccaccaggtttacagtaatatgttacaggagccacaggaaactaagtcaggggttcagcctcctgcagaggaaccaggtacagccattgccattgcagctgcagccccacagaaatggcctaaccccccagggaaggcccctaaaggaaagcgccctgaaagagtggctttccaatgtttacacagagattgcatggaatttacaccaaacttcagggactcgctctgtctgaacaacctgggaggaggagtcagggtgtggcagggtgagggaagtagccaggaccctccacatgctgcccctgctccctcatcccatgaccctgataattggcatcagaagtga

SEQ ID NO: 133187 - DNA, 2574 bp, Homo sapiens
atgcagaggaccacagcgacacctggctcttctttgagcggcgtccagaggctgccttcccgcgactcaaaggagcataggggaacctgcaggggcgtggccggggcgtactgcgcgccgacggcggggggtcgaagggcacgcagtgccggcgtcatggcggcctccgcgcacggctctgtctgggggccgttgcggcttggcatccccggcctgtgctgccgccggccgcctctgggtctgtacgcgcgcatgcggcggctgcccgggccggaggtgtctgggcggagcgtggctgcggccagcggaccgggcgcctggggcactgaccactactgcctggagctgctgcggaaacgggattatgaaggttatttatgctccctgctgctccctgcagaatcccgaagctctgtttttgcactgagggcctttaatgtggaactggctcaggctgtagagggcgctgaagagacactgcagaagacatacagtttgcttcctggttccagtgtgttcactgggagcatggctgcttctccagtgtccagctcttgcaacactgacagctcctctagcacctggctccttcagtaccagcagcttaccagggcacctccctcagtgtgggaaaccactgatgaggtaggtgtgttttgggtggagaaggaaaggcagggtagaagagagcggaatccagccaggcagcccccaatggaagaatattcaactctagctcaacgtggggaagagggaatatggaaagaatccagagtggacaagggcagcctcacattaggaccccatccaatgggcatatctgtcactttccagcacaccaggactctagggcgccaggatgggcatagctgtggcagagccatgaggtttgcaggcagtgcctcaagcatcacagcagctgcagtgcaggcacctggctgtggacaacctcatgggggtggcgagcaggtggcccaaggtgccagggccagcatggcatccgcagggtcagctagtcttcagtgctgccaagaagagtttatgagctgcctctcctctgctaccaggaaacagcctgatgggttggcattacctgtcgctatcctcacagcccgattaaagtcccctgttttggccatgggtagacaggacgttattctggattctcaccataacccaggctggtctagaggcagttatgagaacatagcctatagatgcaaggaagtttgtcgctcttcctgttgctggttctatttgtgggaaagtttggttgcaaaagctaaatcctacgacagtggcttttggcatccccagaggaaaaaacggggagacccgctttggcctcaggaagcgcagaaacactgtcctggctgcgcgcgcaagggcgagaacctaggggacccgcctaaagcgccgttggggctgagcaccgaactcgcacagctccgggcagcgacccgcgatgcggcatccttccgtccggtcggagccctcctagccctcagcgcgtctattcctagcttcggtccccgcaaccatataagcaatgacaccctcgccgactcgcctgccagcttggccgcctccctgcagagggctgacgcttctccagaagttgtaagaaaaggagggaaagcaggccaacctcgaggatctccccagccttggcgttcaggtgctgaggagatcgtcgaggttggcctgcttcccctcactcctcgggccttgctcttcccccaggtgcccactgccctccctgctgtgtaccactttcttgctgcctgtgaaggtatttgtcctcactcttgtgctgctccttcaatgatagaactttgggactttctcatccagcagcaccagcctgaaaaagcagtggcttgcaccaccacacacatacctggtctcaggatctcagccctaaacaagcacagggcgtggggtggtacagatgatgatgtagctgcttctgagatgcccctgggcgctgctggagctgagccctgggactggaatgacttttgcccgctgccctcaaaattcccacaggccacaccgctaccacctcttggggtgcaggtccctgaagccctcagggaagctgcaaaggttactggggtcggctctggggcaacagctgacctcttagctcccactgcaggcgtaggaacctccaggacagcctgtgggggtggtacacagttcatgagtgaaggagctcctggagtcatgaataatggaagtccagattggtcaagtacacagttcatgagtgaaggagctcctggagtcatgaataatggaagtccagattggtcaagtaacttgtcccagccccagcccatgcatctgctgtacttaacaacctggtttcttgaacgtcccatgtgttgcccagacaccacagctttgacacagactcttccagttccatctttctcatatccagtttgtacttcacacatcagacagaatccccatttacatttcctgagagcccccagcccacattatactacagcatgttcattcgaaccacaaagatttttggagcagcaacaggatctactttag

SEQ ID NO: 133188 - DNA, 466 bp, Homo sapiens
  misc_feature (1)...(466): n = a,t,c or g
nttaacattttcaatnttatatcaaattagatactgatcacatatatcataaaattaataaatcaagcagatttttctactccataattcatgtcacatttaatagtctcttcacggattctttgtactgagaaatggaattttcattttcctcctcatttttaagactaacaacagactttttgtactcttcaatttctttagtaccaaggagctcttctttatttatttccatatttttctcagcagctttcatctggagaagcgtttccaggatatttctttctgatgagctattttcccatatatactcttccatgtctgcttcagtcttacttttttcccattcttcagtattgcaggctaggtgtcgggaccggagtggccgagtagacggcagtggagaatgcacgcagagtccttgccctcgactgcagagacagccatgctgggagccggcggncgc

SEQ ID NO: 133189 - DNA, 911 bp, Homo sapiens
atgaaatattaacgtaaattataacttttcctgaactgtttttaaatcataggcagagccagggttttctttttttctctctctctctgtaattgcgacatgaatgtactttgatcccagtaatcattttcaatcaatgggaaaacaaatgaaaaaaaatcccatgctggaatgatgcaaataggtgagcttgcttattagaatctttttttcttttcctcttacaggccactcacataatacatatccaagtcagagaatgctgatataaaccttgcccacctctctcagcccgtctttcttactcagacaatttctgagcagctctttgatgaacacacaatcttcagtttccaggacaaactgagccacagccttccctcctggcagatggctcctcaccatctgacttttgacactgtccaggacaactcccctgatgtctttaggctttcctggcataccaaagatgataaacagacccaggcaatcctctcctattaagttacagaattcttccagcttatcaaatctacttttcttccaggaagactcctctacccttgattctggattggaaaggtcacaaggcttagattccacaggaggaggtgaagacatctgcagagtctgtactgcgagctgaagctttatttgcttgtcggacccccaaaaggtccaaatccagtctgcaccaaacaggaaggcttggtgcttggtcatcttggtggtggtcagccactcatcaactcccttttcttggcagaaagtgatgaaatggattaagaagatctcattcagagtatttgcagctgggcagggtttacttggaggatattcaaatccaaggtactccttcagtttctgagctgcatggactatagcttcactgaccacctcacagacgacgg

SEQ ID NO: 133190 - DNA, 743 bp, Homo sapiens
  misc_feature (1)...(743): n = a,t,c or g
ctccggcttgccgtcctcgcagccatggcggccgccgcgctccccagaatggctgtctctgcagtcgagggcaaggactctgcacgcgttctcctcgtgacgtctactaggtcattacgatcctgacacctatgctggcggatagaacacgcagaattgagaggccacccaagaagaaaggcactacctccttaggacagagaaaatggctgttgacccaggactggcctagtgtttacccagttgcagcacccatttaaaccctctgcagtaccttcttcctgttccgaatgggttatccagtaaaaaaagggcgtgcccatgggaanaggaggggaaatctagaacttttaaagatttcccaatttttctggattttgacttcctgtagcaatttaaaaagcacttgtgaagcccttaaagattttttgcactggagtgggccagccgcactgggacagtggacggaagaaaatgttgaagaagcatttttccaattggaaatttggacagcacttggatttatgttttcatcagggaccatctggttccgggaaccccagagcacgagtagtagtccttaagagtaaagctttcctagtttgaatttagcatgatcacgcaaagaagacactaattacacttgtaggagagcgatactgcaagacaccagatgtgcttaccatcaaacagaataggtggcctttaaggagccagatcaccataatgccagtgtatctatt

SEQ ID NO: 133191 - DNA, 3208 bp, Homo sapiens
ggaaacatgttggaagagattaccaaagattaaaagtagagtgaatataacctagatagaacagatgttttgtgtgaaatttagtatctttaacttaataaaccagcaggaactgtatgaacacaacacacccaactgacaaacagagagaactaacatgtttatttagctgtatgtatatatgcttaactacacccgaggaagctgtagagttagaaaaacatgaaccattaacagatgtggcctccctgcagaacttttgctttgaaaaagaagtacgtctgaaccagattcacatgtttgatatttggatgcagagaaaatggggcagaaagcatcgcaacagttggctctgaaggacagcaaagaggtgcccgtcgtctgtgaggtggtcagtgaagctatagtccatgcagctcagaaactgaaggagtaccttggatttgaatatcctccaagtaaactctgcccagctgcaaatactctgaatgagatcttcttaatccatttcatcactttctgccaagaaaagggagttgatgagtggctgaccaccaccaagatgaccaagcaccaagccttcctgtttggtgcagactggatttggaccttttggggatccaacaagcaaataaagcttcagctcgcagtacagactctgcagatgtcttcacctcctcctgtggaatctaagccttgtgacctttccaatccagaatcaagggtagaggagtcttcctggaagaaaagtagatttgataagctggaagaattctgtaacttaataggagaggattgcctgggtctgtttatcatctttggtatgccaggaaagcctaaagacatcaggggagttgtcctggacagtgtcaaaagtcagatggtgaggagccatctgccaggagggaaggctgtggctcagtttgtcctggaaactgaagattgtgtgttcatcaaagagctgctcagaaattgtctgagtaagaaagacgggctgagagagggcggtgccagcccagggagcctgcgcttagcggccccaggcccgcccctgacactgaacgccgcttgtcccctccggcttgccgtcctcgcagccatggcggccgccgcgctcccagcatggctgtctctgcagtcgagggcaaggactctgcgtgcattctccactgccgtctactcggccactccggtcccgacacctagcctgcgcgttgatgacctccatttaacagagattgtagggatgcttgatagcgtgcttaccccggaggactctagtggaaaatacagatttattagcggagaagtgctatgtaggatcactggctgctttactggggtaagagtggaagccaaagatctgtttggaggctgttgcagtaatccaaatgaggtgatggtgacttggattaaagtaatagtggagaaggaggtgtggttgtatttgcgatatattttgaaggcactacctcctaggacagagaaaatggctgttgaccaggactggcctagtgtttacccagttgcagcaccatttaaaccctctgcagtacctcttcctgttcgaatgggttatccagtaaaatagggcgtgcccatggcaaaggagggaaatctagaacttttaaagattcccaattttctgcatttgactcctgtagcaattaaaaagcactgtgaagcccttaaagatttttgcactgagtggccagccgcactggacagtgacgagaaatgtgagaagcattttccaattgaaattgacagcactgattatgtttcatcaggaccatctgttcggaaccccagagcacgagtagtagtcttaagagtaaagctttccagtttgaatttagatgatcacgcaaagaagaaattaattaaacttgtaggagagcgatactgcaagaccacagatgtgcttaccatcaaaacagataggtgccctttaaggaggcagaattacgattatgcagtgtatctactaacagtgttataccatgagtcttgggaatactgaagaatggggaaaaaagtaagactgaagcagacatgggaagagtatatatggggaaaatagctcatcagaaaggaaatatcctggggaacgcttctccagatgaaagctgctgaggaaaaatatggggaattaattaaagaagagctccttggtactaaagaaattgaagagtacaaaaagtctgttgttagtcttaaaaatgaggaggaaaatgaaaattccatttctcagtacaaagaatccgtgaagagactattaaatgtgacatgaattatgggagtaggaaaaatctgcttggatttattaattttatggatatatgtgatccagtatcctaatttggatataaaattgaaaatgttaaaaaatcatttttttttcctcagggtttaaaattattttccctccatactaatgcttaatggcaatgattactcccagagttttttaatttttacactggggcaatagactaggaggtctctgatttcttcttggtctaaagtgttttgattttatttctacataatagctttggtattcatgtatatacatgcatttaattgtgatttgatcacctttcccatttctttcccccacaggctggcatttccagtagtggctttggaataatgggttttgggttacccctgggaaggcaggccccagaaccccatttcccttgacttggcaggttccgggctgtgttccacatgactgctgtctaggcggatgccatttttccacatttgtccaactcctggttaggaaaccagggtccctcagggggtattcctcctaaccctgatattttcctaaaaagatatgttggattccaactttgtttagccatccctactttcctagattgtggggctcattttgcccagggccaagctacccagaaaagtagaagtgggagattcccctggtatgtatctcctctgggtgccccagttagagctgccacagctcacggaaaaagatgaggcataacggaccttgaatgtaattggagtaagtgacaaaataagaactaccctgggaaaccctgcattcaatgtagctgtcaattcagtatttttaaggtacccctgtcaggctgtttcttaccacttcgatggttgtgattaatttaaaatcaaaataaaggaattacctgagtttaaaaaaaaaaaaaaaaaa

SEQ ID NO: 133192 - DNA, 233 bp, Homo sapiens
aaaaaaatagctcagttaatgaacgatcaacgtatcataaaagttctagtgttccaagcaccacatcaacaccaacagttacctctgcagctgggcttcagaaaagcctgctttccagcacaagcactactacaaagattacaacgggttcttcctcagcaggcacacaaagcagtacctcaaatcgtttgtgggctgaggatagtactgagaaagaaaaaggcagtgtttcc

SEQ ID NO: 133193 - DNA, 256 bp, Homo sapiens
ataccaggacgactagccagtacatctgacattgaagagaaagaaaacagagattcttcaagtttgcgaacaagtagttcatatacaaggagaaaatgggaagatgatcttaaaaaaaatagctcagttaatgaaggatcaacgtatcataaaagatcatacctcactcctgttagggatgaagagtctgaatcccaaagaaaagcaagatctagacaagcaagacaatctagaagatcaacacagggagtgacat

SEQ ID NO: 133194 - DNA, 114 bp, Homo sapiens
agtgatgaaaatgaacaagaacaacaatcagacacagaagagggatccaataagaaagaaactcagagacaagaaagatttgctgatagatcactgttggaaatggaaaaaagg

SEQ ID NO: 133195 - DNA, 444 bp, Homo sapiens
atcttagacgacagataaggaacaataagaactttaactacttttagacacagaatagggatcctatactaaagaatgtcacacagactccttgtctagatactaaaccagctctacgtcagctgaggaccgagatgattccttgctgcgacgctctggatcataccgagacttataagaatgaataccttacagctgcaggctagataaggatgactcaactgactgtataaagctttatgaacaaattctagctgaaagatgataagctgaaggcacagctacatgatacaaatatggaactaacagatcttaaattacagttggaaaaggccacccagagacaagaaagatttgctgatagatcactgttggaaatggaaaaaagggaacgaacagctctacaaagaagaatatctgaaatggaagaaagacttcaaatgg

SEQ ID NO: 133196 - DNA, 287 bp, Homo sapiens
ggccaaacagcctttgatgtagcagatgaagacattttaggatatttagaagagttgcaaaagaaacaaaatctgtatgatttcattgctcctatcatgcctgtggtggaatcagtagatcctgcatcatggaggcagggcttgcgcaaaactggcattgttcttgtgcccagtaagggtgaaaaatctatggagaaagatagtaaaggaactaggcttgcatatgttgcacctacaataccaagacgactagccagtacatctgacattgaagagaaagaaaacag

SEQ ID NO: 133197 - DNA, 349 bp, Homo sapiens
aattaagagcttgtactctaaggataaagatctttcatatttatttttgtcaaattttggaaagctctttacatatcactggcatcacatcttttctacactgctcctgattggacctttaattctgaagtatcactatttcacagtatagaagaagacttaagaatataataattatataactaacattggtaccttaaatcgatctaggaacgaagagctctagaaagaagaatatctgaaatggaagaagagctcaaaatgttaccagacctaaaagcagacaaccagaggctaaaggatgaaaatggggccttgatcagagttataagcaacctttccaaataaa

SEQ ID NO: 133198 - DNA, 5814 bp, Homo sapiens
tttcgtgtccgctcggccgggtgcgccgccccagtgctctgtgggatactggaagtctcgagcgtcggctccgggttcccagccctcctctggcccgcactcatagaaacattcacacaccccctgcctcccctctcttccctctccgcctcccccttccccccctcgcgataagaagacccggcggcaggagaggggatgaagatggcggacgcgaagcacaagcggaacgagcagctgaaacgctggatcggctccgagacggacctcgagcctccggtggtgaagcgccagaagaccaaggtgaagttcgacgatggcgccgtcttcctggctgcttgctccagcggcgacacggacgaggtcctcaagctgctgcaccgcggcgccgacatcaattacgccaatgtggacggacatcacatgccctgcaccaggcttgcattgatgacaatgttgatatggcgaagcttctggtagacaatggagcaaatattaatcaacctgttaacgacggctggataccactacatgcggcaccttcctgtggatatcttgatattgcagagtttttgaatggtcaaggagcacatgtaggggctgtcaacagtgaaggagatacacctttagatattgcggaggaggaggcaatggaagagctacttcaaaatgaagttaatcggcaaggggttgatatagaagcagctcgaaaggaagaagaacggatcatgcttagagatgccaggcagtggctaaatagtggtcatataaatgatgtccggcatgcaaaatctggaggtacagcacttcacgttgcagctgctaaaggctatacggaagttttaaaacttttaatacaggcaggcctatgatgttaatattaaagactatgatggctggacacctcttcatgcctgcagctcatttggggtaaagaagaagcatgtccgaattttagtggacaatcctgtgtgatatggagatggtcaacaaagtggggccaaaccagcctttgattgtagccagatgaagacatttttaggatatttagaagagttgcaaaaggaaacaaaatctgcttccatagtgaaaaacgggacaaagaaatctccacttaattgaatcaacagcaaatatggacaataatcagtcacagaagacctttaaaaacaaagagacgttgattattgaaccagagaaaaatgcatcccggattgaatctctgggaacaagaaaaggttgatgaagaagaagaaggaaagaaggatgagtctagcttgcttctagtgaagaagatgaggaagatgactcggaatcacgaagctgaaacagataagacaaaacccctgggcttctgtaactaatgccaacacttctagtacacaagcagctcctgtagctgttacaacacctactgtgtcatcaggtcaagcaacacctacatcacctattaaaaagtttccaaccacagctacaaaaatttctcccaaaggaagaagagagaaaagatgagtctcctgcaacttgggaggttagggatttaggaaagacggggcagctatggtgcacttgctgaaatcacagcatctaaagagggtcagaaagaaaaagatactgcaggtgttactacgttcagcttcctgtgccacactttcctcctctttggataataaagaaaaccagaaagatagtaaaggaactaggcttgcatatgttgcacctacaataccaagacgactagccagtacatctgacattgaagagaaagaaaacagagattcttcaagtttgcggaacaagtggttcatatacaaggagaaaatgggaagatgatcttaaaaaaaatagctcagttaatgaaggatcaacgtatcataaaagttgctcctttggtagaagacaagatgatttgatttggttctagtgttccaagcaccacatcaaacccaaccagttaccctctgcagctgggccttcagaaaagccctgctttcccagcacaagcacctacctacaaaagattacaacgggttccttccctcagcaggcacacaaagcagtaccctcaaatcgtttgtgggctgaggatagtactgagaaagaaaaggacagtgtttcttacggcagtgaccattcctgttgctccaactgttgtaaatgctgcagcttctaccacaaccctgacttacaactactggctgggcactgtcttcctccacaacagaggtcaggggagagacgcagattcatacctcactccttgttaggggatggaagagtttgaatcccaaagaaaagcaagatctagacaagcaagacaatctagaagatcaacacagggagtgacattaactgatcttcaagaagctgagaaaacaataggaagaagtcgttctacccgaaccagagaacaagaaaatgaagaaaaagaaaaagaggaaaaagagaaacaagataaagagaaacaagaagaaaagaaggagtcagaaacatctagagaagatgaatataaacaaaagtactccaaggaccgtatgatgagaccttaccagcggtataggccaggtatcaacttcaagttcaaccactccatcctcttcactttctactatgagcagttcactgtatgcttcaagtcaactaaacaggccaaattagtcttgtaggcataacttctgcttactccagaggaataacaaaagaaaatgaaagagagggagaaaaaagagaagaggagaaagaagggagaagttaaatcacaacctaaattcaatcagaggaacgacggacggaccaagagagaaaagaagatctacaggagttttcattttggacacaagatagtgatgaaaatgaacaagaacaacaatcaggacacagaagaggggatccataaagaaagaaactcagacggattccatttctagatatgaaaccagttctacatcagctggtgatcgatatgattccccttgcctggggtccgcctcctgggatccataccaggttaccttagaaggaaaggaaaaccccttaccagccagcagggcctagaaaagggatgacctcaacctgacctttaaaaagcctttatgaacaaattcctagcctgaaaatgaaaagctgaaggcacagcctacatgatacaaatatggaactaacagatccttaaattacatgtggaaaagtcccacccagagacaagaaagatttgctgatagatcactgttggaaatggaaaaaagggaacgaagagctctagaaagaagaatatctgaaatggaagaagagctcaaaatgttaccagacctaaaagcagacaaccagaggctaaaggatgaaaatggggccttgatcagagttataagcaaactttccaaataaaaaaaaaaaagcagcaagtaatggaattgcacatattagtaacccagtggaccataattggcagtcactggaagtctgggaagaatccttggagactgtcattttcggatatcctgccaaatgccctcttatctagaatttttgtttcattttgtttaattttctggggtgtttttgttgttgttggtttgttttttgttttttttttttaatcaagaccattgtttcatgttaatgcagctgctgagaagatttttttttaatgactgaggaaaacttgtttacagctccagcatataaggaaagtgttcaaggccagatatgcctcagatatttaacccagtaaggccttagttgtaccataaatacttttgtggtcaacaaaaacttttcagctcttcacagaagacagttactcaacattttttggatgtgccacagtttcgagtttttcgatatttaaattttttggcttttcatctaagtttgggtttgtattttttccttctaaactcttcatgtggcagagtcttctatgttttcacagctttttcattacagaaaagaacacttgctcttctgtgattattgtcatgtattagggctaatgctgtgttgtctcccacctggaactgaattgcttggtggaacatatgctttcactgtttgtgcaatatgcatttatttcttatatgaatgctttaaagtcatttgaggttagatcttttaattcctattttctgcttcattggtcactttttttttattgtagtataagatgttagattctgtaatcttcacattcattttagcaggtactgagtgatgctgtatatacaaataagtgtattgttttgatttttagaccaccacatgggcatgcttgactatttcttatttcaaatgtctgctaatgcagagtaggctactccatgatagtgttaaaaaacaaaatttgctaacaatgtgatataaagactttaaaagttacacattatgtgggagccctatcatctttacaaaagtttcctactgtaaagtgcttttattttcagttttcatttgatagtactcaaccataattaaagttgcataagataattgctttacatttcacatacctatatttatctgagtgctgtctaaaactgttgtgctagccaaagtaatgctatgctatgaaatcatttgcagaattaacccgtgagttaatgttaaatgcactgttattgccatgtgaagaggcatcgactttgataccaccatcatgttcagaccattttatacatttcagtggcctttttttttttttaaggaaaaaaaagccgcaaaacccaagtacatagtgacgatggcttttatttggacaaatagcttttatattttcattaaaccatgcaaaaaatactacatctttctggcacataactgtctccttaaccactggaacagttcagccatttgaataaattgtacattgtaaagcttatagtagctgattgtattattgattgtatctgtatactatattaaatgtgaatttgtaccccttcattttaaaaggtcacttgtgttctactggcctattttaagattactttggggttggggaagggtgttttggtaagcaggattttaagtcctctctctctccgattggttttatgaagatataaggttatgctcttactaccaagctcaggattcttgattttaaaggtacaaggatagttgtgggagttttatttttggttatatttgaactggtatgaatggtaggtctgaatattgagaatttcccatgggtcttatgtgggagggtaaaatataccaggataacctggatccagtttgagtgacctgccaccatgttctgggttgcacaccaagttagggcatgctatggtttatatttgtgaagtttgggatgcctgtggaaggaatgattaaataccatgtttctaatattttagtgttttgtatttaggttatttattctttgtatctaaaactgaacagctactgtgctatattgattttattggtagtattgagcagaccttgtttctgcatgaaactagttgcaaaaccccactattttggaaatacaaaatgtattttgacatatacaaataaaatggaataaaactattttaaatgtgtgaacttttaatgaagacattttaaattttgttctgagatatttaaattctgcatgggtattttttcactaattgctttacttggataccaatttgaataatttctgaaattgtaatattgtgataatttgcacagcattgtacatgcacatctgtaaatgcaatcttaattgccatatttatgcaatcctgtgtaccaatttggacaaatgtttatatattttacataaagctgtctgtatgcagaatctgaaaaaaaaaaaaaaaa

SEQ ID NO: 133199 - DNA, 2409 bp, Homo sapiens
atgggatacctaaggatctttagcccccatcctgcaaaaacaggagatggagctcaagccgaagatttgcttctagaagtggatctacgagatccagtacttcaagtggaagtaggaaagtttgtttcaggtaccgaaatgctacatttggctgtgttacattctagaaaactttgtgtctactctgtctcaggaaccttgggtaatgtggaacatgggaaccaatgtcagatgaaattgatgtatgaacataatcttcagagaacagcctgcaatatgacctatggatcatttggtggtgtaaaaggtcgagatttaatttgcatccagtctatggatgggatgctgatggtatttgagcaggagagctatgcttttggaagatttctccctggctttcttctgcctggtcctcttgcctacagttcccgtacagattccttccttactgtctcttcctgccaacaagtggaaagttataagtaccaggtacttgcttttgcaacagatgcagataaaaggcaggagactgaacagcaaaaacttggttctggaaaaagactagttgtggattggactctaaatattggagagcaagcccttgacatatgtattgtctctttcaatcagtcggcatcctctgtttttgttcttggtgagagaaactttttttgccttaaggataatggacaaattcgattcatgaagaggcttgattggagcccaagttgttttctgccatattgctcagtttctgaaggaacaataaatactttgattggaaatcataataacatgctgcatatttatcaagatgtgacactgaagtgggccacccaacttccccacattcctgtagcagtaagagtgggctgtttgcatgatttaaagggagtgatagtcactctgagtgatgatggtcacttgcagtgttcatacctggggacagatccttctctgttccaagctccaaacgttcaatctcgagaactaaactatgatgaacttgatgtagaaatgaaagaacttcagaaaatcatcaaagatgttaacaaatcacaaggtgtttggcccatgactgagagagaagatgacttgaacgtttctgtcgtggtttctcctaactttgattcagtttctcaagcgaccgatgttgaggtgggaactgaccttgtcccttctgtcacggtgaaggtcacactgcagaacagagtgatattgcaaaaagccaaattatcagtctacgtgcaaccaccattagaattgacttgtgatcagttcacctttgaatttatgagcattccgcgagttatccaatgtaaatttagacttcccctaaagttaatttgcctaccaggtcagccttcaaaaactgcaagccacaaaattactattgataccaacaaatctccagtcagtcttcttagtctcttcccaggttttgccagtcagtcagatgatgatcaggtgaatgtaatgggttttcacttcttaggaggtgctcgaattactgttcttgcttccaaaacttctcaacgatatcgcattcagagtgaacaatttgaagatctttggctcataaccaatgagcttattcttcgccttcaagaatattttgaaaaacagggagtcaaagattttgcatgttctttttcgggatctataccccttcaagaatattttgagttgattgatcatcattttgagctacggataaatggtgaaaaattagaagaactcttatctgagagagctgtacaatttcgggccattcaacgccggctactagcaagattcaaagataaaactcctgcccctcttcaacacctggacaccttgttagatggaacctacaagcaggtaattgctctagcagatgcagtggaggaaaaccaaggcaatctgttccagtcattcaccaggctgaagagtgccacccatttggtgattctgctgatcgcgctgtggcagaagcttagtgctgaccaggttgctattctggaagcggcatttctgccgctacaagaagacactcaagaattgggctgggaagaaacggtggatgccgccatttcccacctgttgaagacttgcctgtcgaagagttctaaggagcaggctttgaacctcaacagccagctgaacatacccaaagacacaagccaactgaagaaacatatcaccttgctctgcgatagattatccaaaggtggccgtctctgcctaagtaccgatgcagcagccccacagaccatggtcatgccaggtggttgtactacaatcccagagtcagacctagaagaaagatcagtagaacaagactctacagaactgtttaccaaccacagacatctcactgcagagacacccaggcctgaagtttcacccctccaaggagtctcggaataa

SEQ ID NO: 133200 - DNA, 1985 bp, Homo sapiens
tgaccttgtcccttctgtcacggtgaaggtcacactgcagaacagagtgatattgcaaaaagccaaattatcagtctacgtgcaaccaccattagaattgacttgtgatcagttcacctttgaatttatgacaccagatttgactagaacagtaagcttttctgtttatctgaaaagaagttatacaccatcagaattggaaggaaatgctgttgtttcttattccagaccaacagatcgaaatcctgatggcattccgcgagttatccaatgtaaatttagacttcccctaaagttaatttgcctaccaggtcagccttcaaaaactgcaagccacaaaattactattgataccaacaaatctccagtcagtcttcttagtctcttcccaggttttgccagtcagtcagatgatgatcaggtgaatgtaatgggttttcacttcttaggaggtgctcgaattactgttcttgcttccaaaacttctcaacgatatcgcattcagagtgaacaatttgaagatctttggctcataaccaatgagcttattcttcgccttcaagaatattttgaaaaacagggagtcaaagattttgcatgttctttttcgggatctataccccttcaagaatattttgagttgattgatcatcattttgagctacggataaatggtgaaaaattagaagaactcttatctgagagagctgtacaatttcgggccattcaacgccggctactagcaagattcaaagataaaactcctgcccctcttcaacacctggacaccttgttagatggaacctacaagcaggtaattgctctagcagatgcagtggaggaaaaccaaggcaatctgttccagtcattcaccaggctgaagagtgccacccatttggtgattctgctgatcgcgctgtggcagaagcttagtgctgaccaggttgctattctggaagcggcatttctgcccgtacaagaagacactcaagaattgggctgggaagaaacggtggatgccgccatttcccacctgttgaagacttgcctgtcgaagagttctaaggagcaggctttgaacctcaacagccagctgaacatacccaaagacacaagccaactgaacgaaacatatcaccttgctctgcgatagattatccaaaggtggccgtctctgcctaagtaccgatgcaagcagccccacagaccatggtcattgccaggtggttgtactacaatcccagagtcagacctagaagaaagatcagtagaacaagactctacagaactgtttaccaaccacagacatctcactgcagagacacccaggcctggtaagagactggatggccttcacaagcgttagttaagtcagaagcagtgacaatctggtcagtttttgtcataccagagagcattccgcaaagctgcttgttttccaatttcttcattcttccccttagcactggtgcagctgaatttgatcctttgtgtattcctgtcactattcagatcttttctctctctttctctcttactctctttttttccagaagtttcacccctccaaggagtctcggaataattcaagtagagttgtttggttgagaggaacatccccatctcaaggccgaacctgtgtgaacctcatgccaagcacagatatagggctggcgcaggtgcttcccaaagcttaccttcctggagatgacatgcatagaaagaggggttgggactttttacttcactaggagaacttgtaacaccatggggaagtcagctgaaacttgtcttgttttgccaggaaaggaagtagttgcctttggtcatccatctgctaatagtcacagaatacagtgaaatgacatagttttgggttagattttataatgcaaagattcagatccaaaataatttcataccccattttttcacagaattcttatatagtaaatgtatcaagtttaataaagcatctcattgtc

SEQ ID NO: 133201 - DNA, 825 bp, Homo sapiens
atgggtgtcagtgttttggatttcagccattctgataagtgtgaagtggcatctcgttttgcatcagggatgccagagcccaccaacattgttcttcccaaactggaagtggcagacactctgggtggttgtactacaatcccagagtcagacctagaagaaagatcagtagaacaagactctacagaactgtttaccaaccacagacatctcactgcagagacaccaaggcttggtagagactggatggccttcacaagcaagtttcacccctccaaggagtctcggaataattcaagtagagttgtttggttgagaggaacatccccatctcaaggccgaacctgtgtgaacctcatgccaagcacagatatagggctggcgcaggtaaatcagggatttcttcttggtttgctggtacatcccttgcctctcagtcatttctcatctttgtcctccacctctgggccttctccaagcccagacatcatagccatggccaaccacccatgggacaaggagtgcctgagccttggtagggaggtggatggatacaaggctcaattttggctaaagcactctgccaaaagggaggaggacaagacccaacagagcctaaaggctcctgtccttgcagtgtgtgagtcaccccaggactggacagaggatcgaggcctggaccctaagaataccccactccctgagccagcatctccagctgatggagggacccaaaagctaagcggggtcaatcagacaccttccctgggatggttaaaactgggacaggccaatggagaaggtccttctgtctttggtctgtga

SEQ ID NO: 133202 - DNA, 2142 bp, Homo sapiens
cagtttctcaagcgaccgatgttgaggtgggaactgaccttgtcccttctgtcacggtgaaggtcacactgcagaacagagtgatattgcaaaaagccaaattatcagtctacgtgcaaccaccattagaattgacttgtgatcagttcacctttgaatttatgaatcgaaatcctgatggcattccgcgagttatccaatgtaaatttagacttcccctaaagttaatttgcctaccaggtcagccttcaaaaactgcaagccacaaaattactattgataccaacaaatctccagtcagtcttcttagtctcttcccaggttttgccagtcagtcagatgatgatcaggtgaatgtaatgggttttcacttcttaggaggtgctcgaattactgttcttgcttccaaaacttctcaacgatatcgcattcagagtgaacaatttgaagatctttggctcataaccaatgagcttattcttcgccttcaagaatattttgaaaaacagggagtcaaagattttgcatgttctttttcgggatctataccccttcaagaatattttgagttgattgatcatcattttgagctacggataaatggtgaaaaattagaagaactcttatctgagagagctgtacaatttcgggccattcaacgccggctactagcaagattcaaagataaaactcctgcccctcttcaacacctggacaccttgttagatggaacctacaagcaggtaattgctctagcagatgcagtggaggaaaaccaaggcaatctgttccagtcattcaccaggctgaagagtgccacccatttggtgattctgctgatcgcgctgtggcagaagcttagtgctgaccaggttgctattctggaagcggcatttctgccgctacaagaagacactcaagaattgggctgggaagaaacggtggatgccgccatttcccacctgttgaagacttgcctgtcgaagagttctaaggagcaggctttgaacctcaacagccagctgaacatacccaaagacacaagccaactgaagaaacatatcaccttgctctgcgatagattatccaaaggtggccgtctctgcctaagtaccgatgcagcagccccacagaccatggtcatgccaggtggttgtactacaatcccaagagtcagacctataagaaagatcagtagaacaagactctacagaactgtttaccaaccacagacatctcactgtagagacacccaggcctgaagtttcacccctccaaggagtctcggaataattcaagtacagttgtttggttgagaggaacatccccatctcaaggccgaacctgtgtgaacctccatgccaagcacagatatagggctggggcagggtgtttcccaaagcttaccttcctggagatgacatgcatagaaagaggggttgggactttttacttcacttaggagaacttgtaacaccatgggggaagtcagcttgaaacttgtcttggttttgccaggaaaaggaagtagttgcctttggtcatccatctgctaatagtcacagaatacagtgaaatgacatagttttgggttagattttataatgcaaagattcagatccaaaataatttcataccccattttttcacagaattcttatatagtaaatgtatcaagtttaataaagcatctcattgtcaaataatatcttggattttatttataattagagggatttatgagtgattgctctacattatttcttcaaaggaaaggaaaggaattgaagactttgctactctctggtaagacttgaatgtgattattttataaataaaagaaccactatgaaactttcatgtgatttgttctattaagctaaacgtggaagaagggaagttttctagtattgtatgaaaatgtttaaatattttcaaggaagctagtacattaacatccccttttcattaccccattgggtggcaccttttaaaaatccaggttattaaaggattcacactttattacagttaaaatttaaggtttttatgtgtaagaagtgaaagaaactttgctaatttcaagttcgaattacagttgtgagattgatttatttaaataaaaatatgcctttgccagtt

SEQ ID NO: 133203 - DNA, 801 bp, Homo sapiens
  misc_feature (1)...(801): n = a,t,c or g
gggcggtccattganncccttnaatcgcagaccctattgcagngngctggaattcggcgcttcgggagccgcggcttaatggtgcagacatggccaagtccaagaaccacaccacaaacaaccagttcccgaaaatggcccaagaaatggtatcaagaaacccccgatcaccaaagatacgaattctcttaaagggggtggcccccccaagtttcctgagcgaacatgctgctttgcccaagaaagccccaacaaaaaagggccctaaagaagattgcaggccaacaaattgccaagggccatgagtgcaacgttgccgagggctatcaaggcccctcgtaaaaccccaaggaggtttaagcccaaagattccccaaaggggtgtcaagccgcaagctcgattcgacttgccttacatttgcccaaccccaagctttgggaagcgttgctcgttgcccgtaattgccaaggggcccaaggctgatgcccgccaaaggccaaggccaaggccaaggccaagccaaggccaaagccaaggccaagggccaaggatcaaaaccaaggcccagggctgcagccccaagcttcagttccagctcagggctcccaaacgtacccaggccccttacaaaggcttcagagtagatatctctgccaacattgaggacagaaggactggtgcgaccccccacctcccgcccctgggctaccatctgcatggggctggggtcctcctgtgctatttgtacaaataaacctgaggcaggaataaaaaaaaaaaaaaaaaaaaaaaaaaagggc

SEQ ID NO: 133204 - DNA, 2449 bp, Homo sapiens
gaagttctttatggtagcactgccctttgtttctgtggcttttctggctgagacagaaatttctgaagatcatcggccctttgacatcctttaccaaacaacgcagtggaccagaacccacggaggagcatatgtgcgtgttcctcatgactacagctgctgtggagcagtccttaacaatgcatccaaggagggtaaatcttctcatttgtttttaaaagagaaagaaggatctctttccatctttacattgagtttggatccagagcaggagggagtaggtaaccagttaggggccttggtacatcaaagacaagccaaacggctcctgggacagattgtggaccgctgtcgaaatggacctggctttcataatgacatagacagcaacagcacaatccaggagattctcattcccgcatctaaagtgggtctggtcatcggcagaggaggggaaacaatcaagcagttgcaggagcggacaggggtgaagatggtcatgatccaggatggcccattgcccacgggagcagacaagcctcttcgtatcactggagatgcatttaaagtacagcaagcaagagaaatggtactagagattatccgagaaaaagaccaagctgactttcggggtgtacgcggcgatttcaactctcgaatgggaggaggcagtatagaggtatctgtgcctaggtttgctgtggggattgtaataggaagaaacggggaaatgatcaaaaagatccagaatgatgctggtgtgaggattcagtttaaaccagatgatgggattagtccagaaagagctgcccaggtcatgggccctccggatcggtgtcagcatgcagcgcatatcatcagcgagctgattcttacagcccaggaaagagacggctttggaggcctggcagcagccagaggaagaggtcgtggccgtggcgactggagcgtgggagcccctggtggcgtccaggagataacatacacggtgccagccgataagtgtggcctcgtcataggcaaagacactgtgggcttatgctcttgcaaaatgcaagaaaccgtgttgtcttttagactgaaccactcagagttggtatgggttcgtgttcatttgccggcaggtgtgcgggctgggggtgagaacatcaaaagcatcaaccagcagtcaggggcgcacgtggagcttcagaggaacccccctcccaacagcgaccccaacctgcggagattcaccatcaggggggttccccagcagatcgaggtggccaggcagctcatagatgagaaagttggctacctttcctccaaggagctccgggtgcttcccaaacatggctgccaaggtgaatgggaacccccacagcacccctgtgagggctggggcagcacctaccaggcgtggcagcagcccacacagcaggtcccaagccagcagagccagccgcagagcagccagcccaactacagcaaggcctgggaagactattacaaaaaacagagatgtttcttgctggttggaagagatcgggttgaaggctaccagagaagtggtccccctggtgttggcatcatcgccaggttcatggcccttctaggggttggaggtcacgccgccagcgctgctcctcaggccagctccccaccggactacacaatggcctgggcagaatattacagacagcaggtcgctttctacggacagacgttagggcaggcgcaggcccacagccaggctctggggaagcaagttgggtcccacaccctcgatgctggtgtgagccttcacctctgcttgctgtatccatgccaatcaacaggatccctgttgagtagcagggacacatatgtggatggcattcaggtggctttgcctgtttctaattggtatagagttctaattgctgctaaaattgattcaattcctcacttgaataattccacacctctagtggacccctcagtatatggatacggagtacaaaaacggcccttggatgatggagaagaaggtctggttggacccgatgagaccaatgaaatccccaatgccaacttccgtcagcagatccggaagctgatcaaagatgggctgatcttgcgtcaccgcaagcctgtgacggtccattcccgggctcaatgctggaaaagcaccttggcccgccggaagggcaggcacttgggcatagaatcgaagaagattgatcgccacatgtatcacagcctgtacctgaagttgaaggggaatgtgttcaaacacaagcggattctcacggaacacagccacaagctgaaggcagacaaagcccgcaagaagcccctggctgaccaggctgaggcccgcgggtctaagaccaaggaagcacgcaagctccgtgaagagcacctccagaccaagaaggaagagatcatcaagactttgtcccaggaggaaaaggccaagaaataa

SEQ ID NO: 133205 - DNA, 696 bp, Homo sapiens
atggctgtcatggaaaaactttactgggtgaacagggaagagtcgtatgcctctctaagagtccatcttccaatctgcaatgccacaaccatgagtatgctcagtcttcagaagaggcttgcctctagtgtcctccgctgtggcaagaagaaggtctggttggaccccaaggagaccagtgaaatcgccaatgccaactcccatcagtggatccgaaagctgatcaaagatgggctgatcatccacaagcctgtgactgtccattcctggctcgataccggaaaacaccttggcctgccagaagggcaggcacatgggcatatgaaaggctacagccaatgcccgaatgccagagaagatcatgtggatgaggggatgaggattctatgccagcttctcagaagatactgtgattctaagaagattgatcaccacatgtatcacagaagataccatgaatctaagaaggttgatcgccacatgtatcacagcctgtacctgaaggtgaaggggaatgtgttcaaaaacaagcggatcctcatggaacacatccacaacctgaaggcagacaaggcctgcaagaagctcctggctgaccaggctgagacccgcaggtctaagatcaaggaagcacgcaagcaccgtgaagagcacctccaggccaagaaggaggagatcatcaagactttggtctaa

SEQ ID NO: 133206 - DNA, 693 bp, Homo sapiens; identical to SEQ ID NO: 122810

SEQ ID NO: 133207 - DNA, 814 bp, Homo sapiens
  misc_feature (1)...(814): n = a,t,c or g
gcacgaggccatgagtatgctcaggcttcaaaagaggctcgcctctagtgtcctccgctgtggcaagaagaaggtctggttagaccccaatgagaccaatgaaatcgccaatgccaactcccgtcagcagatccggaagctcatcaaagatgggctgatcatccgcaagccttgtgacggtccattcccggcttcgttgccggaaaaacacctttggcccggcgnaaagggcaggcacatgggcataggtaagcggaaggtaccagccaatgccccgaatgcccagagaaggtcacattggatgagggagaatgagggattttgccgccggcttgcttcagaagatacccgtgaatcctaagaagatcgatcgcccacatgtagtcacagccttgtacctggtaggtgaaggggaatgtgttcaaaaacaagcggattcttcatggaacacatccacaagctgaaggcagaacaaggcccgcaagaagctccctggctgacctaggctgaggcccgcaggtctaagaccaaggaagctaccaagcgccgtgaagagcgcctccctccaggccaagaaagagggagatcatctagactttatccaaggaggaagagaccaagaaataaaaccttcccattttgtctgtacattactgccctctgttgattacataggttcagccctaaaataaaacaagccttaatctgcaaaaaaaaaaaaaaaagtcggcgcggccgcaaatttgtaggggtagttgcgcccgggatttggtgcgggggttgcggggtgggagaaggttgtccccagggggga

SEQ ID NO: 133208 - DNA, 449 bp, Homo sapiens
  misc_feature (1)...(449): n = a,t,c or g
aattcggacnnnccttaaggaggcttcgggctcctgggatttctgtccgcgctcctggccctcgtccttcgcgccagagcaggttcgcaaactcctcagacccttctgctcccggccgccgctttccgccggggcgagacccccaggttcaaaatgagcctgtttggaacaacctcaggttttggaaccagtgggaccagcatgtttggcagtgcaactacagacaatcacaatcccatgaagcccaccaaccttgccggggaactttcttattgcaggatcatgggctaatgatgttcgctgctgggaagttcaagacagtggacagaccattccaaaagcccagcagatgcacactgtgcctgtgcttgatgtctgctggagtgacgatgggagcaaagtgtttacggcatcgtgtgatataactgccanaatgtgtgacctcagcc

SEQ ID NO: 133209 - DNA, 470 bp, Homo sapiens
gtcatcgatctaatggaaccaacacttcagctcctcaggacatttatgcggtaaatggaatcgcgttccatcctgttcatggcacccttgcaactgtgggatctgatggtagattcagcttctgggacaaagatgccagaacaaaactaaaaacttcggaacagttagatcagcccatctcagcttgctgtttcaatcacaatggacatggatttcaacccctggagaaaacgatgtcattgttcagcagctgagagcccaggcgtccgcggcgacttgccgtctctccattccactgcctgttgcagagtttttctgtaactaagggggttgaggttattgtagacgttagattgcggcaccgccagggattttgcagcgcttcagtgtacgtgttagagaatattggaaaagcgtctgtgagccccgtgctgtatattgtaataaagtcttatgcagattgctaaaaa

SEQ ID NO: 133210 - DNA, 474 bp, Homo sapiens
ttttaaagacaaacagaacaagcctactggttttgccctgggaagtatcgaggggagagttgctattcactatatcaaccccccgaacccgtaagtgtgactctgtcagcttgcagatttcactggactttttttaacaaaggaagacttacatgaacctttgtctttcagcgccaaagataacttcacctttaaatgtcatcgatctaatggaaccaacacttcagctcctcaggacatttatgcggtaaatggaatcgcgttccatcctgttcatggcacccttgcaactgtgggatctgatggtagattcagcttctgggacaaagatgccagaacaaaactaaaaacttcggaacagttagatcagcccatctcagcttgctgtttcaatcacaatggaaacatatttcatacgcttccagctacgactggtcaaagggacatgaattttataatccccagaaaaaaaaa

SEQ ID NO: 133211 - DNA, 1877 bp, Homo sapiens
ttggtaccgagctcggatccactagtaacggccgccagtgtgctggaattcggcttctggttcggcccacctctgaaggttccagatcgatagtgaattcgtggttttttccgcggtagtcagggcagtttctaccgcaggcttaaggaggcttcgggctcctgggatttctgtccgcgctcctggccctcgtctcttcgcgccagatcaggttcgcaaactcctgagacccttctgctcccggccggcgttttccgccggagcgagacccccatgtttaaaatgagcctgtttggaacaacctcacgttttggaaccagtgggaccatcatgtttggcagtgcaacttacagacaatcacaatcccattgaaggatattgaaagtaacattcattttccttgatggatagcattggtttgttcttgtctttttagcccaccaaccttgccggggaactttcttattgcaggatcatggggctaatgatgttcgctgctggggaagttcaagacagtggacagaccattccaaaagcccagcagatgcacactgggcctgtgctttgatgtctgctgggagttgacggtgggagcaaagtgtttacgggcatcgtgtggttaaaactgccaaaatgtggggacctcaggcagtaaccaaggcgattacagatcgcacagcatggatgctcctgtttaaaaccatccattggatcaaagctccaaactacagctgtgtgatgactgggagctgggataagactttaaagttttgggatactcgatcgtcaaatcctatgatggttttgcaactcccctgaaaggtgttactgtgctgacgtgatataccccatggctgtggtggcaactgcaggagaggggcctgattgttcttattcagctaggaggattcaaccttctgaattcagaaggatagaatctccactcgaaacatcagcatccggtgtgtggctattttttaaagacaaacagaacaagcctactggtttttgccctggaaagtatccagggaagagttgctattcactatatcaaccccccgaaccccgcccaaagatactttcacctttaaaatgtcatcgatctaatggaaccaacacttcagctcctcaaggacatttatgcggtaaatggaatccgcgttcccatcctgttcatgggcacccttgcaactgtggggatcttgatggtagattcagcttttgtggacatagtatgccagaacaaaacttaaaaactttcgggaacagttagatcagccccatcttcagcttgctggtttcaatcaccaatggaaaacatattttgccatacgcttcccagctacgactgggtcaaaggggaccatggaattttataatcccccagaaaaaaaaatttacatttttccctgcgtaaatgcaggccgaagagctaaaagccccaggaaataaggaagtagtggctggaagaactctgggctcagcccagagtttgtttctcctccactctggcctcatctctgtacgaatttgggcccccaaccttgttggggttgtcagcccatggacgatggagtttcaaccccctggagaaaacgatgtcattgttcagcagctggagagccccaggcgtcccgcgggcgacttgccggtcttctccattcccactggcctggttgcagaagttttttctggtaaacctaaaggggggttgaagggttattggtagaccggttagaatttgccggggcaccccaaggggaattttgcagcgcttcagtgtacgcggtagaaaataatggaaaaagcgtttgtgagccccgtgctggattttgtaataaagtcttttgcagattgcaaaaaaaaaaaaaaaaaaa

SEQ ID NO: 133212 - DNA, 1257 bp, Homo sapiens; identical to SEQ ID NO: 125428

SEQ ID NO: 133213 - DNA, 924 bp, Homo sapiens
aaatttgagaccagtaagtactacgtgagtatcattgatgccccaggacacagagacttcatcaaaaacatgattacagggacatctcaggctgactgtgctgtcctgattgttgctgctggtgttggtgaatttgaagctggtatctccaagaatggacagacccatgagcatgcccttctggcttacacactaggtgtgaaacaactaattgttggtgttaacaaaatggattccactgagcaaccctacagccagaagacatatgaggaaatcgttaaagaagtcaacacttacattatgaaaattggctgcaaccttgacacagcagcatttgtgcttatttctgtcaatgttacaactgaagtaaagtctgttgaaatacaccatgaagctttgagtgaagctcttcctggggacaatgtgggcttcaatgtcaagaacgtgtctgtcaaggatgttcgtcatggcaacaatgctggtgacagcaaaaacgacccaccaatggaagcagctggcttcactgctcaggtgattatcctgaaccatccaggccaaataagtgctggctatgcccttgtactggattgtcacacggctcacactgcatgcaagtttgctgagctgaaggaaaagattgatcgctgttctggtaaaaagctggaagacggccctaaattcttgaagtctggtgatgctgccatcatttatatggttcctggcaagcccatgtgtgtagagagcttctcagactatccacctctgggtcactttgctgttggtcatatgagacagacagttgccatgggtatcatcaaagcagaggacaggaaggctgctggagttggcaaggtcactaagtctgcccagaaagctccaaagcctagtgaatattatcccttgtacctgccaccccagtcttaa

SEQ ID NO: 133214 - DNA, 1389 bp, Homo sapiens; identical to SEQ ID NO: 125531

SEQ ID NO: 133215 - DNA, 1127 bp, Homo sapiens
  misc_feature (1)...(1127): n = a,t,c or g
ggaattctggcacgagcngggtttgccgccagaacacaggtgtcgtgaaaactacccctaaaagccaaaatgggaaaggaaaagactcatatcaacattgtcgtcattggacacgtagattcgggcaagtccaccactactggccatctgatctataaatgcggtggcatcgacaaaagaaccattgaaaaatttgagaaggaggctgctgagatgggaaagggctccttcaagtatgcctgggtcttggataaactgaaagctgagcgtgaacgtggtatcaccattgatatctccttgtggaaatttgagaccagcaagtactatgtgactatcattgatgccccaggacacagagactttatcaaaaacatgattatcctgaaccatccaggccaaataagcgccggctatgcccctgtattggattgccacacggctcacattgcatgcaagtttgctgagctgaaggaaaagattgatcgccgttctggtaaaaagctggaagatggccctaaattcttgaagtctggtgatgctgccattgttgatatggttcctggcaagcccatgtgtgttgagagcttctcagactatccacctttgggtcgctttgctgttcgtgatatgagacagacagttgcggtgggtgtcatcaaagcagtggacaagaaggctgctggagctggcaaggtcaccaagtctgcccagaaagctcagaaggctaaatgaatattatccctaatacctgccaccccactcttaatcagtggtggaagaacggactcagaactgtttgtttcaattggccatttaagtttagtagtaaaagactggtttaatgataccaatgcatcgtaaaaacctttcaaaggaaagggagaatgtttggggaccacttgggtttcttttttgcgtgtgcagttgtaggtattaggttttaaaatcagtactttttaatggaacaacttggcccaaaaatttgcaccaaaattttggaacccattaaaaagggtaaatggggaaaaaaaaactgtgggggggcgggccgtttttaaagataccttggggggccccaaagtttaccccggcttagcaaaggaatttcttttttccctataagggag

SEQ ID NO: 133216 - DNA, 1871 bp, Homo sapiens
gcttttttttttttttcgcaacgggtttgccgccagaacacaggtgtcgtgaaaaactaacccctaaaagccaaaatgggaaaggaaaagactcatattcaacattgtcgtcattggacacgtagattcgggcaagtccaccactactggccatctgatctataaatgcggtggcatcgacaaaagaaccattgaaaaatttgagaaggaggctgctgagatgggaaaggactcattcaagttgtgcctgggtcttggataaactgaaagctgagcgtgaacgtggtatcaccattgatatctccttgtggaaatttgagaccagcaagtactatgtgactatcattgatgccccaggacacagagactttatcaaaaacatgattacaggggacatctcaggctgactgtgctgtcctgaattgttgctgctggtgttggtgaatttgaagctggtatctcccaagaatgggcagaacccgagagcatgcccttctggcttacacactggggtgtggaacaactaattgtcggtgttaacaaaatgggattccactgagccaccctacagccagaagagatatgaggaaatgtggttaagggaagtcagcactttccattaagaaaatttggctacaacccccgacacagtagcattttgtgccaatttcttggtttggaattggtgacaacatgcctggagccaagtgcctaacatgccttggttcaagggatgggaaagtcacccgtaaggatggcaatgccagtggaaccacgctgcttgaggctctggactgcatcctaccaccaactcgtccaactgacaagcccttgcgccctgcctctccagggagtccaccaaattgggtggtattggtactgtctcttctgccccgatggaaacctggtttctccaaccccggtatggtggtcacctttgctcccagtccacggtaacaacggaaagtaaaatcctgtcgaaaatgcacccatgaagctttgaagtgaagctccttcctggggaccaatgtgggccttcaatgtccaagaatgtgttctgtcaaggaatgtttcgtcgtggcaaacggttgctgggtgaccagcaaaaaatgaccccacccaatgggaaagcagctgggcttcactggtcaagggtgattatccttgaaccatcccaggccaaaataaggcgccgggcctatgcccctgtatttggattgcccacacgggctcacatttgcatgcaaagtttgctgagctgaaggaaaaagattgatcgccgtttctggtaaaaagctggaagatggccttaaattcttgaagtctggtgatgctgccattgttgatattgttcctggccaggcccatgtgtgttgagagcttctcagactatccaacctttgggtcgctttgctgttcgtgatatgagacagacagttgcggtgggtgtcaatcaaaagcagtggacaaaaaaggctgctgggagctgggcaaggtcaccaaagtctggcccagaaaagctccagaaggctaaatgaatattatccctaatacctgccacccccactctttatcaggtgtgggaagaacggttctcagaactgttttgtttcaattggcccatttaaggttaagtagtaaaagcattggttaaatgataaccaatgcatcgtaaaacctttcagaaggaaaggagaatgttttgcggaccactctggttttcttttttgcgcgtggcagttgtaagttattagtttttaaaatcagtactttttaatggaaacaacttgacccccaaatttgtcacagaattttgagacccattaaaaaagttaaatgagaaaaaaaaaaaaaaaaaaagggcggccgct

SEQ ID NO: 133217 - DNA, 598 bp, Homo sapiens
gaattcggcacgagggcgaagaaggaagctcctgcccctccgtaaagcttgaagccaaagcgaaaggcttttaaagggccaagaaaggcagtttttaaaaggtgtcccacagccaccaaaaagaagaagatcccgcacgttcacccacctttccgggcgggccgaagacactgcggactccggagacagccccaaatatcctcggaagagccgcgtcccaggagaaacaaggcttgaccacctatgcctatccatcaagtttcccgctgacccactgagtcctgcccatgaagaagatagaagacaacaacacacttgtgttcattgtggatgttaaagccaacaagcaccacgattaaacaggctgtgaagaagcttgtatgacatttgatgtggccaaggtcaacacccctggattcggcctgatggagagaagaatggcatatgttcgacttggctcctgatttaccgattgcttttgggatgtttgccaacaaaatttggggattcatctaaacttgagttccagcttgcctaatttctgaatatatatatatatatatatatctttttcacccataaaaagaaaaatagaaaa

SEQ ID NO: 133218 - DNA, 1483 bp, Homo sapiens
cgacgatttcgtgtttgtgttttggttcgagaaggagccggcgttttgccttttgggaggaggcagtgggaggatgtttgaggaagaattagtcggaacttcagcgccggcggcggcggcggcggaggaggagaaaggaaagaggaagggggagcggcgagaggcggagacggagcccgacaggggcggcaccacggcacgagccccgcacagtccagtgtgaggggagcggtgctaagagcaggcgacgccgccgccgccaccaccaccgtcatagatacatctctcattctacggtccacgcctgggccttgctgtcaggaagcttctgccccgcagctcggctggctgcggactcacgttgctttacctccagaaagaagaatatcggcccctcgaattctggaaggtcattgtagagtctgaaattagggacttatttcaaatttggacatggctagtcgaggcgcatcatgatcccacggggccagatactggaaataaaatatgccagttcaaacttagtacttctggggagagtcccgctgtttgcaaatcaagcctagtgcttcgttttgtgaaaggccaatttcaatgaatttcaagagagtaccattggggctgcttttctaacccaaactgtagtgtcttgatgacactacagaaaagtttgaaatatggggatacagctggtcaagaacggtaccatagcctagcaccaatgtactacagaggggcacaagcaggccatagttgtatatgatatcacaaatgaggagtcctttgcaagagcaaaaaattgggttaaagaacttcagaggcaagcaagtcctaacattgtaatagctttatcgggaaacaaggccgacctagcaaataaaagagcagtagatttccagggaagcacagtcctatgcagatgacaatagtttattattcatggagacatccgctaacacatcaatgaatgtaaatgaaatattcatggcaataggtaagattaatatctctttttaaatgatcaatataagcaaaacaagtgtgaagcatatttggtttgactgtctcttttttaaaaaatttttgggggtgggtttgtgtgtatgtttatgtgtgtgtgtgagagagagagagagattataccacttttctaagtcccttccacaaaacaatattttgttggtaatattgttaaatttgaaagatgattacctattaggttgtaatactgtcagtttaggcagcttcttccgggtgagttaagccttaacctcttaacctgatagttcagacagacagattttgcaaaggtttcgctgggaaatttggataaatattttttttattagattatactttttaaaaatcaaattattggtaaatataactcagaagaacatgacacataagtatacagattgacaaattattttaatgtaaacattataaggaagatgatttcaaagcatagaggcgtaaggaa

SEQ ID NO: 133219 - DNA, 2659 bp, Homo sapiens
atggccctgctcactgatcccatggtccccgtgcttctgccaccgcagccttcggtgctctgcagtgcgactgcctcttcacttgtctcactccccaccagagtctgggatactgacatgacggctggaactcaagctgcccttatggactatgaggttcacagaaatggaattattgggccatttaagtatattcaaaataacagggaaacagaaacaacttacacgaacagcgccgggaccgtcaggtcagctccgctccaaccaaacaacagggaacagcctggaaccgtcaggtcagccccgctccagccaaacaacagggaacagcctggaaccgtcaggtcagccccgctccagccaaacaacagggaacagcctggaaccgtcaggtcagccccgctccagccaaacaacagggaacagcctggaaccgtcaggtcagccccgctccagccaaacaacagggaacagcctggaaccgtcaggtcagccccgctccagccaaacaacagggaacagcctggaaccgtcaggtcagccccgctccagccaaacaacaggggacagcctggaaccgtcaggtcagctccgctccaaccaaacaacaggggacagcgtccaaccaaacaacagggaacagcctggaacagtcaggtcagctccgctccaaccaaacaacagggaacagcctggaaccgtcaggtcagctccgctccaaccaaacaacaggggacagcgtccaaccaaacaacagggaacaacctggaaccgtcaggtcagctccgctccaaccaaacaacagggaacagccaggaccgtcaggtcagccccgctccaaccaaacaacagggaacagcctggaaccatcaagtcagctccgctccaaccaaacaacaggggacagcgtccaaccaaacaacagggaacagcctggaaccgtcaggtcagctccgctccaaccaaacaacaggggacagcgtccaaccaaacaacagggaacagccaggaccgtcaggtcagccctgctccaaccaaacaacagggaacagtctcgaaccatcaagtcagctccgctccaaccaaacaacaggggacagcgtccaaccaaacaacagggaacagcctggaaccatcaggtcagctccgctccaaccaaacaacaggggacagcgctgggaccgtcaggtcagctccgctccaaccaaacaggggacagcgctgggaccgtcaggtcagctctgctccaaccaaacaacaggggacagcgctggaaccgtcaagtcagctccgctccaaccaaacaacagggaacagcctggaaccgtcaggtcagccccgctccaaccaaacaacagggaacagccgggaaccgtcaagtcagctctgctccaaccaaacaatagggaacagccaggaccgtcaggtcagctccgctccaaccaaacaaccgggaacagccaggaccgtcaggtcagccccgctccaaccaaacaacagggaacagccgggaaccgtcaagtcagctccactccatccaaacagggaacagcgtccaaccaaacaacagggaacagcctggaaccgtcagtggtgccatggatgggtggctaccccagtcaagggtccggccagagtggagacttctgcccacaaggtctctgctgctggtttgccaaagaagaaaacaagccaggtgtgactggaggggcacccaggctcaccctcaacacagtgctccccaaacattcccggacccccagcaggcacgaggctggtagtacccaggccttgtaccacaatggccaggctcagtatgccctgtcttttccacacgaagctgcacctatggctgcattttatgtcgtgacaggaatagaagtcactacggcactcacgctagaggaagcaccatgcactgtagaaatcactacggcactcacgctagaggaaccaccatgcaccgtattctggaataaaacagaaaggaacacacggacattggttcaggacaaaggaagcaacaccaaaggctttgtccagacagccacgtgctgcttccgagctgactgtaaagccagcaggcccagccctcatcctccctcaccccacagagaatggacctcagacctcagacacaagcaggtgtccaaattcccaggagcacacagactgccgggacacccagagcttccgattcaggaggcctgggaccgtggtgagggcaccgaggaagacagcgtggctcaacctttccaggaccgtggtgagggcaccgaggaagacagcgtggctcaacctttccaggacggtggtgagggcaccgaggaagacagcgtggctcaacctttccaggaccgtggtgagggcaccgaggaagacagcgtggctcaacctttccaggaggtcgcatgcgagcggttccggtggttaccttgaatgatcccaagtgtcattccaggggctgcaaatatatcttcagtaggcaaagacaaggcccctgacaataaaatataaatgaccacctgtcttctgcaaccgccccgattatgggagtcgagcggcatggcgctaatggaagggaagcaacctcagacacatgggacaccaggggagcctccaaaggcacctgctgctggactgactccgctaaattgtg

SEQ ID NO: 133220 - DNA, 360 bp, Homo sapiens
  misc_feature (1)...(360): n = a,t,c or g
cagagccatggtcggcagaagagcactgatcgtactggctcactcagagaggacgtccttcaactatgccatgaaggaggctgctgcagcggctttgaagaagaaaggatgggaggtggtggagtcggacctctatgccatgaacttcaatcccatcatttccagaaaggacatcacaggtaaactgaaggaccctgcgaactttcagtatcctgccgagtctgttctggcttataaagaaggccatctgagcccagatattgtggctgaacaaaagaagctggaagccgcagaccttgtgatattccagagtaagaaggcagtgctttccatcaccactggtggcagtggctccatgtn

SEQ ID NO: 133221 - DNA, 2725 bp, Homo sapiens
  misc_feature (1)...(2725): n = a,t,c or g
cgcccttgtaggctgtccacctcaaacgggccggtcaggatatataagagagaatgcaccgtgcactacacacgcgactcccacaaggttgcagccggagccgcccagctcaccgagagcctagttccggccagggtcgccccggcaaccacgagcccagccaatcagcgccccggactgcaccagagccatggtcggcagaagagcacttgatcgtactgggctcactcagagaggacgtccttcaactatgccatgaaggaggctgctgcagcggcttttgaagaagaaaggatgggaggtggtggaagtcggacctctatgccatgaactttcaatcccatcatttccaagaaaggacatcacaaggtaaacttgaaggacccttgcgaacttttcagtatcctggccggagtctgttcttggcttataaaagaaggccatcttgagcccagattatttgtggcttgaacaaaaagaagctggaagccgcagaccttgtggatattccagttccccctggcagttggtttggaagtccctgccattcttgaaaggctggtttgagccgagtgttcataaggagagttttgcttaacactttacggctggccatgttatggacaaaggaccctttccgggagtaaagaaggcagtggcttttccattcaccactggtggcaagtggctcccatgtactcttgccaagggattccacggggaacatgaatgtcattctctggcccaattcagagtggccattctgccatttctggggcttcccaagtctttagaccctcaactgaccatatagcatttggncaccactcccagccagacgccccgaattctcaatcctggaaaggatggaagaaaccgcctggaagaatatttgggatgagaccaccactgtattttgctccaaggcagcctctttgacctaaacttccaggcaggattcattaatgaaaaaagaggtacaggatgaggaggaaaacaagaaattttggcctttctgtgggcccatctacttgggcaagtccatcccaactgacaaaccagatccaaagctagaaaatgagattccttagcctgggatttccttctaaacatgtttatccaaatctgggtatctttccgaggcttccctggacttgctttagtttttaagatttgtgtttttcttttttccacaaggaataaatgagaggggaatcgaccgtattcgtgcatttttggatgcatttttaacctgaatcctaaggattactatcatggcatataacccaaaaatccgaactgggctcaagaggcccaccttagggacagatgtagaaagatgctaggaaaaatgttctttaaaggcatctacacaatttaattcctctttttagggctaaagttttagggtaccagtttggctaggtatcattcaactctccaatgttctattaatcacctctctgtagtttatggtcagaagggaattgctcagagaaggtaaaagactgaatctacctgccctaagggacttaacttgtttggtagttagccatctaatgcttgtttatgatatttcttgctttcaattacaaagcagttactaatatgcctagcacaagtaccactcttggtcagcttttgttgtttatatacagtacacagataccttgaaaggaagagctaataaatctcttcttttgctgcagtcatctactttttttttaattaaaaaaaatttttttttgaagcagtcttgctctggttacccaggctggagtgcagtggtggtgatctcggctcactgcaacctctgcctcccaggttccagcaattctcctgcctcagcctccctagtagctgggatgacaggcgcctgccattcatgcctgactaaatttttgtattttttnagtagagacggcgttttcaccatgttggccaggctggtctcaaactcctgacctcaggtgatccgcctacctcagcctcccaaagtgctgggattacaggcgtgattccacccacacctgggccctgcaaatcttctactttgaggtttgcagagataaacccattaaatccacaccgtacatctgcaatatggaattcaagaaaggaaatagtaccttcaatacttaaaaatagttcttccccaaaaaaacccttaattctggaatcaatcaaaattccagaggtttattttctttatcatggctaaacctgatggacttacccatgggatggggtcccagtcccatggaccttgggggtaccaattgtaaacctaggagttttattcaactttgggtgaaccagttttgggcataatagtcaatttctacttctgggaagtcatctcaatcccactgttggtattatataattcaaggagaatatgataaaacactggccctcttgtggtgcattggaaagaagagatgagaaatggatggaaaaggttgccctgaaaaatgggagacagcctcttacttgcccaagaaaatgaagggattggacccgagctggaaaacctcctttacccagatgctgactggcactggtggtttttgctctccgacagtatcccacaatagctgacggctgggtgtttcagtttgcaaaatattttgttgccttcatcttcactgcaattttggtggtaaatttccccaaagatctgaattaaataaataaaattcatttctacagacccacaaaaaaa

SEQ ID NO: 133222 - DNA, 473 bp, Homo sapiens
ctgggtggactctcagcagaagcaggtatgttccagtaaaaggagaccatgtgattggcatagtgacagctaaatctggagatatattcaaagttgatgttggagggagtgagccagcttctttgtcttacttgtcatttgaaggtgcaactaaaagaaacagaccaaatgtgcaggttggagatctcatctatggccagtttgtggttgctaataaagacatggaaccagagatggtctgtattgacagctgtggacgagccaatggaatgggtgtcattggacaggatggtctgctttttaaagtgactctgggcttaattagaaagtaagtcctgatgtctgctggcttgactgctttttataattatacattcttggaaagttggttaatcttcaggattcagattctttgtaacgtttgaatttctcctcagagttagaaatcagtatccattttaacacatttggaa

SEQ ID NO: 133223 - DNA, 923 bp, Homo sapiens
cggggaagccctggccacagccttttctaatgcccagggcgcccagtgtgagggccaggccaatgcagtcactggacacgaacagcagggcagctctctctgggtgggctctaatgtaagcaaaggctgccagagagttgctaacaagaattccatctttcctcagaaccttcgatccgcttgggtcgaagtttataccatattcaccatctttttgcttcaaagaaggttttagattagcaatggctggatcaatcgctgtgagtatgttcttgggaacacatgcgtaggtcacagtgaggtattttttcacgcctggcaaacaggggcttccaaaatggtgattgttgacgatgattttgcatctctgcttcccatagcaccttcgggataggacttgcaaagctgagtaagacaagcaatcgaaaggggggagccgctctgccttggaggagcagatgtccctttcctgggtcctcctgccgtaggtcgcagagtagatgttgaggaacttggattcatggcagtgcagtttcagctcctggtcttcacacacggttttgttttttaattcatctgaagtaggttggcatttaaaggagaccaggaggtatttactgcttcctggacaaaggtcaggtccaaaaacacggctattgaccaggaggtggcaggcccgctggttctggcattcgtccagcaccttctggaaggtggtggctgccacacaggttaagctgtcttccctctgggaggcaggcttctgggaactacacatttggtaatcttgcccataaaatgccgattgggcacttatcgtagaatgccgagggcactgtagattcaaatagtccccatcacaggcataggtggggtggttttgcaggagtttggttaggtaaccagagaagtcggtgagcgct

SEQ ID NO: 133224 - DNA, 2611 bp, Homo sapiens
atggcagtagctataagactttctgctgatacacagtgggaggattcaccagggaagagtatcttggagttacacatgagctgcaccaagatccctgagcgatgtgaagctgataaaaaagagtctacatccagctggtgtactcggaaaatcagatttcgcatggacttggagaaggagtgcaaggttttattgagtggaggaggtggctctcggatggggagccagaagggggatggagtgggaaggtggtcttcccctagagttgggctgcccagcagccagactctcctccgaccgcccccgactgatttccacatcgccccgctgtcgaaagcccgccagcatctgctggtgtctgtcagtgtgctcttctgcttctctgctcctctcgacgtccagccacttaaggtgctggacgaatgccagaaccagcgggcctgccacctcctggtcaatagccgtgtttttggacctgacctttgtccaggaagcagtaaatacctcctggtctcctttaaatgccaacctaagcaaatgttcacccagcaggggccaggtcctgtgctcagcattggggagacacaggtgagcacgtcctcggtaaccagatcatccagtcccgtggggcctgatattcactgtgagtttcacacaaatatgtgcaagattccagatgaattaaaaaacaaaaccgtgtgtgaagaccaggagctgaaactgcactgccatgaatccaagttcctcaacatctactctgcgacctacggcaggaggacccaggaaagggacatctgctcctccaaggcagagcggctcccccctttcgtttttaccaggtattactgcttcctctatgcccctgtgagctctattgcaaatcctgtgaaaggatgctttcatctgggtaaaaagcaagattgcttgtcttactcagctttgcaagtcctatcccgaaggtgctatgggaagcagagatgcaaaatcatcgtcaacaatcaccattttggaagcccctgtttgccaggcgtgaaaaaatacctcactgtgacctacgcatgtgcaactctaagtagcatggggcccattttggctgaggttcccccagaggccaaaaaggtcactttgagtacatccttggatagctcctctggtagaatggaggacggtagactggacacgggtcacactgaggttccagtaacttcaggcctcttcatcagagtgttgaataagaagcagaactttagcctccaaataaggtgtagttttggccggggaccgggaaagctgagacactgctgggctggggccgccatagccctgggaacggagtatattctagtgaaaggagaccaggtgactggcatagtgacagctaaatctggagatatattcagagttgatgttggagggagtgagccagtttctttgtgcttacttgtcatttgaaggtgcaactaaaagaaacagaccaaatgtgcaggttggagatctcatctatggccagtttgtggttgctaataaagacatggaaccagagatggtctgtattgacagctgtggacgagccaatggaatggggtgtcattggacaggatggtctgctttttaaagtgactctggggcttaattaggaaagcctattagcctcccagatttgtgaaaatccatacaggaagtgggaaaactcccttccactggagatagtatttggaatgaatggaagaatatggggttaaggccaaaaaacccatcccagccagactttaattttggcaaaacattttaggaagcttgtgaacacatgaccgtcagatcaaaggaaaacagatcttcctcccagattggcagaaagttgatataggtggacttttttacaggtccagttgagggccaaaagactatggggttttttcaggtgaacctccccccatttaaaatactcagaagataaggtgtgaatgtatgtattattagagtccgaaagtatttttataagttactggttttcaccccacgcttttgtgggagagaaaatcattgcaaaatcattttttttgtttggtacaataaagtttactaaaaaacagtattagggtttatttggagttaactcccttagtaattgctacagcttccataattaactggaggtcagcagtaaaataattttgtgattataacagtaagccaggttcaccagaggaaaatgtggaatacctaaagtataaagcagcaaagaaatgtcacctgtagtcccattattcagcgggtgagtatataacaacgaaatactttttcatttaccaagtattgtgttttgcatggattaactcctttattctaactgcagaagacacttatcctcataattgaaactgaggcacagaatttaacttggcctacattctctatattcatcaaattgaaattatagttattatagcttatatgccactttgtaatatacttttgtctacttcaaacagcatgatacatttcacaactttagtcacatatttcatgttacaggatatttttgagttttatcattatataaataacactatgaggatttctgaatccaaatctggccaagtcttatttt

SEQ ID NO: 133225 - DNA, 410 bp, Homo sapiens
  misc_feature (1)...(410): n = a,t,c or g
gggacttgagactcaccggccgcacgccatgagggccctgtgggtgctgggcctctgctgcgtcctgctgaccttcgggtcggtcagagctgacgatgaagttgnnnnnnnnnnnnnnnnnnnnnnnnnnnnnnnnnnnnnnnnnnnnnnnnnnnnnnnnnnnnnnnnnnnnnnnnnnnnnnnnnnnnnnnnnnnnnnnnntannnnnnnnnnnnnnnnnnnnnnnnnnnnnnnnnnnnnnnnnnnnnnnnnnnnnnnnnnnnnnnnnnnnnnnnnnnnnnnnnnnnnnnnnnnnnnnnnnnnnnnnnnnnnnnnnnnnnnnnnnnnnnnnnnnnnnnnnnnnnnnnnnnnnnnnnnnnnnnnnnnnnnnnnnnnnnnnnnnnnnnnnnnnnnnnnnnnnnnnnnnnnna

SEQ ID NO: 133226 - DNA, 427 bp, Homo sapiens
atggggagaaaccagagcagaatagctgaaaattctaaaaaccagagggccccttctcctccaaaggatcgcagctcctcaccagcgccgcatcagagcaggaaggagactgattttgacgagctgagcaggtgtacgcttaagaagggggctatttgcaaagttgtccgcggccaggtgccgactttggcggcggtggcggtggggctttgggcgcttcgggacctggcggtcgacgggcgtagtgtggttgaaaaaactgtctgggactgggaacttatgaatgatatcaaaccaatatggcagagaccatcaaaagaagtagaagaagatgaatacaaagctttctacaaatcattttcaaaggcctcactgttaacagccaaccttcgaaacaacggagtagccagccatctccttgttgaag

SEQ ID NO: 133227 - DNA, 1548 bp, Homo sapiens
atgaccatggcagcggcggcggtggtggcacgcggggccggggcgagggcagcgacagcggcggctttgcggggtggctgcgggaccgcggctcgggggcggccgtgtgcgggccccgcccggcccttgtgcactgcacccgggaccgccccggacatgaagcgctacctgtgggagcgctaccgggaggcgaagagaagcacagaaggcactaagaagtacacgacctcacttaatgcaagacactattatacccatttcacagaggaaaatgaagatgaaattaacagctcgagttcttatgcgagtcagaagaaaacatttgaaattaatcccagacacccgctgatcagagacatgcttcgacgaattaaggaagatgaagatgataaaacagttttggatcttgctgtggttttgtttgaaacagcaacgcttcggtcagggtatcttttaccagacactaaagcatatggagatagaatagaaagaatgcttcgcctcagtttgaacattgaccctgatgcaaaggtggaagaagagcctgaagaagaacctgaggagacagccgaggacacaacagaagacacagagccagacgaagatgaagaaatggatgtgggaacagatgaagaagaagaaacaggcaaggaaagtgatgaccccatggcttatattcactttactgctgaaggggaagttaccttcaaatcaattttatttgtacccacatctgctccacgtggtctgtttgacgaatatggatctaaaaagagcgattacattaagctctatgtgcgccgtgtattcatcacagacgacttccatgatatgatgcctaaatacctcaattttgtcaagggtgtggtgattaggaagaagcttgttcgtaaaacgctggacatgatcaagaagattgctgatgataaatacaatgatactttttggaaagaatttggtaccaacatcaagcttggtgtgattgaagaccactcgaatcgaacacgtcttgctaaactttctaggttccagtcttctcatcatccaactgacattactagcctagaccagtatgtggaaagaatgaaggaaaaacaagacaaaatctacttcatggctgggtccagcagaaaagaggctgaatcttctccatttgttgagcgacttctgaaaaagggctatgaagttatttacctcacagaacctgtggatgaatactgtattcaggcccttcccgaatttgatgggaagaggttccagaatgttgccaaggaaggagtgaagttcgatgaaagtgagaaaactaaggagagtcgtgaagcagttgagaaagaatttgagcctctgctgaattgggatgaaagataaagcccttaaggacaagatttgaaaaggctgtgggtgtcttcagccgccttgacagaatctcccgtgttgcttttggtggcccagccagtacgggattggtcttggccaacattgggagagaatcatgaaagcacaagcgtaccaaacgggcaaggacatctctacaaatttactatgcgg

SEQ ID NO: 133228 - DNA, 3068 bp, Homo sapiens
  misc_feature (1)...(3068): n = a,t,c or g
aattcccgggtcgacgatttcgtgcttggggtgtagtgggcggaccgcgcggctggaggtgtgaggatcctaacccaggggtgtgttggtggaggcggctcctgcgatcgaaggggacttgagacctcaccggcccgcacgccagtgagggccctgtgggtgctgggccctctgctgcgtcctgctgaccttcgggtcggtcaagaagctgacgatgaagttgatgtggatggtacaagtagaagaggatcttgggtaaaagtatgagaaggatcaagtgacggatgatgaagtagtacagagagaggaagaagctatttcagttggatggattaaatgcatcacaaataagagaactttagagagaagtcggaaaattttcctttcccaagccgaagttaacagaatgattgaaactttattcatccaatttcattgtattaaaaataaagagattttccttgagagacttatttccaattcctcctgttgctttggataggttaagcctaatatcactgacctgatgaaaatgctctttctggaaatgaggaactaacagtcaaaaattaagtgtgataaggagaagaacctgctgcatgtccagcacaccggtgtaggaatgacccagagaagagttggttaaaaacccttggtaccatagcccaaatctgggaccaagcgagttttttaaacaaaatgncctgaagccacaggaagatgggcccagtcaaccttcctgaattgattggcccagtttgggtgtccggtttcctattcccgccttcccttgtagcagataaggttattgtcacttcaaaacacaaacaaccgataccccagcacatctggggagtctggactcccaatggaattttcttgtaattgctggacccaagagggaaacactcttaggaccgggggaaccgacaatttaccctttgtccttaaaaagaagaagcatctgatttaccttggaatttggataccattaaaaatctccgtcaaaaaaatattcacagtttcataaaacttttcctaatttatgtatggaggcagcaaagactgaaaactgtttgaggagcccatggaggaaagaaagaaagcagccaaaagaagaagaaaagaagaatctgatgatgaagctgcaggtagaggaagaagaagaagaaaagaaaccaaagacctaaaaaagttgaaaaaactgtcttgggactgggaacttatgaatgatatcaaaccaatatggcagagaccatcaaaagaagtagaagaagatgaataccaagctttctaccacatcattttccaaggaaagtgatgaccccatggcttatattcacttttactgctggaaggagaagttaccttcaaaatcaattttatttgtacccacatctgctccacgtgggtctgtttgacggattatggatctaaaaaagagcggttacattaagctcttatgtgccgccgtggtattcatcacagaccgacttccatgatatgatgcctaaatacctcaattttgtcaagggtgtggtggactcagatgatctccccttgaatgtttcccgcgagactcttcagcaacataaactgcttaaggtgattaggaagaagcttgttccgtaaaaccgctgggacatgatcaagaagatttgctggatgataaatacaatgatactttttgggaaagaatttgggtaccaacattcaagcttggttgtgattgaaggaccacttcgaattcgaacaacgtcttgctaaacttcttagggttccagtcttctcatcatccaacttgacattactagcctagaccaggtatgtgggaaagaatgaaggaaaaacaagacaaaatctacttcatggcctggggtccagcagaaaagaggctgaatcttctccatttgttgagcgacttcttgaaaaagggctatgaagttatttacctcacagaacctgtggatcgaatactgtattcaggcccttccccgaatttgatcgggaagaggttccacgaatgttgccaaaggaaggagtgaagttccgatgaaaagtgagaaaactaaggagagtcgtgaagccagttgagaaagaatttgagcctctgcctgaattggatgaaagataaagcccttaaggacaagattgaaaaggctgtggtgctctcagcgcctgacagaatctccagtgtgctttggtggccagggcaggtcttttggtctggcaacatggagagaatccatgaaagcacaagcgtaccaaaccgggcaaagaacatcttacccaatttactatgccgagtcagaaagaaaacattttgaaattaatccccagacaccccgcttgatcagagacattgcttcgacgaatttaagaaagatgaaggatgataaaacagtttttggatcttgcttgtggttttggtttgaaaccggcaacggctcgggtcagggtatctttttacccagacacttaaacgcatatggagattggaattggaaagaatgcttcgcctcagttttgaacatttgacccctgatgccaaaggtgaaaaaaagagccccgaaggaagaaccctgaaagagacagcagaaggacacaagcagaaagacacagagcagagacgaagagtgcaagaaatgggatggtgggaaacagatgaagaaagaagaaaccagccaaaggaatcctacagcctgaaaaaagatgaaattgtaaaattatactcctcacccatttggatccctgtgtggagaggggaatgtgaaaatttacatccatttcttttttgggagaagacttgttttggatgcccacacataatcccccttctcccctgcactggtaaaatgtgggattatggggtcacaggaaaaagggggttttttaaattggaattttttttaacatttcctcatggaatgtaaatttgtactattttaactggactattcttggtgttaaaatcttgtcatgtgtataaaaataaaaaaaagatcccaaaaaaaaaaaaaaaaaaaaaaaaaaaagtcgtatcgatgtcgagcgatcatgatgatgat

SEQ ID NO: 133229 - DNA, 670 bp, Homo sapiens
aaaaaaaaggaactatgtcaaaaatagtccctgccggggtgaaagcctgtcaaatggagttacagtgggacatcagtaaaagcccagtgggaaggagcgggcacggttctggcgttcgcatgaggaaggaagcagcgtcatcagcgcaggtgtaggcagttgtcaacccctcgctggccgcgtgcgacgtgaagcacctgcgctgggcgcggcgggtaaacgccgtcactagcgggcgcctgaacagtccagcggcgtcagcgctgcggagcaggaaagggtcccgaacgcagggtggccatgcagcgtggcgcccacctgtccctctcctcgaagcgctgagccagcacgatgcacataagggaaggaggaaggtggcttgaggacagtgaccgagcggacagcggaagcccatttcaggagccccggtacccgagctcgggcccctttccaatcccccaggcgtccttcccatgtccttgtctcctagtcctgggaatccgcggccactccactatcctgcagtaccgcggacaagaacaccatgtactcttcacaggcaggtgtcttctggtggacccaactctgttggtacttgtcgtctccaaaaagtccccaaatgcagctagagaccagccagcccggtatccgagagggccactctaggtga

SEQ ID NO: 133230 - DNA, 868 bp, Homo sapiens
atggctgaagctggccctaaaccacagaggaccctgatgtgggcctgggagtccgtcctcagccagcggaagcccagagaggcaggacgcctgagcgaaggctgcgtgaaggccaccgggacccctgggtttggatggcaagcccgtcctgaccagaaggagcacaggctggatggccgtgtcattgaccctaaagaccgccatggactagtgaaggatacggaacccaggttgaacgaacaatctctgtgtgggggtctgaatcctgaagccactgaggaaaagatcagggagtacttggcgagtttggggagaagaagacccgtgaagaaggttctggagaaaaagttccatactgtcagtggaagcagtgcggaccccaagtcccgccttcctggtcagagacgtaccggacccgtgcctaatcaggagaccagctggggactccggcagcgcctaaccccaggtggcccatggaataagagcaggaaattgaagctcagcgaaggtcagctcatagtggagccagggccccctggcccccctggccccccaggcccgatgggcctccagggaatccaggtccaaagtttatggtttctctctcttgctggaacatcagctccctgagggcagggctcctgtacgctggctgtggctgcagcccctgagtggggccattagtggggaccccaaggactcgcctgtgtctcagttgaagtctggggtacttcgctatgaacttcgacttggattaggaatccgtgctaccccgagtgtggaatgccccacaagccacaattttcttatacacaaggccttcggtttcatatgtcaactgacgagtacgatgacccaaggggagtga

SEQ ID NO: 133231 - DNA, 684 bp, Homo sapiens
cgaggcacgcgtccgcgcgcaagaagtacaacccccccagctggtttcaccggggtctgccgccccctgaggaccaggaggacgagatgtcagtgtcggaggagctggagcgccatcacgctgaccccgtcctcagccctgaagccctccgaccgcatgaccatgagcagcctgggggaaagggcttgctgtcgcgactaccagcgcctcggtctgggcaccctgagcagcagcctgagccgggccaagtctgagcccttccgcatttctccggtcaaccgcatgtatgccatctgccgcagctacccagggctgctgatcgtgccccagagtgtccaggacaacgccctgcagcgcgtgtcccgctgctaccgccagaaccgcttccccgtggtctgctggcgcagcgggcggtccaaggcggtgctgctgcgctctggaggcctgcatggcaaaggtgtcgtcggcctcttcaaggcccagaacgcaccttctccaggccagtcccaggcggactcgagtagcctggagcaggagaagtacctgcaggctgtggtcagctccatgccccgctacgccgacgcgtcgggacgcaacacgcttagcggcttctcctcagcccacatgggcagtcacggtaagtggggcagtgtccggaccagtggacgcagcagtggccttggg

SEQ ID NO: 133232 - DNA, 341 bp, Homo sapiens
cgcgtccgcaagagccgcctacttcgggagcgtgccgggctgggcgacctggagagcgccagcaacagcctggtcaccaacagcatggctggcagtgtggccgagagctatgacacggagagcggcttcgaggatgcagagacctgcgacgtagctggggctgtggtccgcttcatcaaccgctttgtggacaaggtctgcacggagagtggggtcaccagcgaccacctcaaggggctgcatgtcatggtgccagacattgtccagatgcacatcgagaccctggaggccgtgcagcgggagagccggaggctgccgcccatccagaagcccaagctgct

SEQ ID NO: 133233 - DNA, 3868 bp, Homo sapiens
atggtgtctggagcccgggccgccgccgcagccgcagccgctgcggccgccgcggagcgaacccggggtgtcccgggtcatccagactccactggccgactccctgcccatcagcagctgcagcgtggcctgctcttccgccagctgggcatcaccaacgtactgtctttggtctgtgccaccctcatggagcacgaggttctcttcctgtcccggagctaccagcagctcaccgatgcctgcaggagcctcctggcattgctgtttcctctcagatacagcttcacctatgtgcccatcctgccggcccagctgctggaggccctcagcacacccacgcccttcataatcggggtcaatgcggccttccaggcagagacccaggagctgctagacgtgattgtagctgatctggatggagagacggtgaccatccctgagtgtgtgcacattccacccttgctagagccactgcagagtcagacgcacagtgttctaagaatggtcctggacccggagctggagttggttgacctcgccttccctccacccatgacgacaaagagctgcggctcttccatcagctgctgcagggctatctctggtgcctgcacgttcgtgtgcattcacccggagcctgtcatccgcttccataaggcagccttcctgggccagtgtgggctggtggaggacaatttcctgatgaatgtgctggagggcatggcctttgctctctttgtgttggagtgtggggtcccgtactgccccacggacctgtttgatgagctggtggcccacgatgtggcacagagcaggctgcaggtcaagagcccagggcagctggaggtcgtgggcaactgcatctcccacgtgtttgaggggaagatgcttgaggccaagaagctgctcctacctgtgctgagggccctgaagtgtatgatgaactgctgcctgcaggactgcacttctctggacaagcatggcatctcggctgctctgctgcctctggtcacagccttcctggaagcggagccaagggtggcttttgagcagtggtgcctgtggccatccctgagcggtgagaagcagcaggagctgatgcagaaggaggagagcacagtgttcagccaggccatccactataccaactgcgtgagctacctcctgctgcctctggacagcagcaagagccgcctgcttcaggagctgggtgacctggagagcaccagcaacagcctggtccccaacagcatggctggcagtgtggctgagagctatgacacggggagcggctttgaggacagagagacctgcaatgtagctggggctgtggtccacttcatcaaccgctttgtggacaaggtctgcacagagagtggggtcaccagtgaccacctcaaggggctgcatgtcatggtgccagacatcgtccagataaacattaagaccctggaggcgaaacccaagctattgaggctgcacctgctgtttggtgaggagtgtgtgctggatggcctgcgcatctacctgccaccgaatgggcgtgaggagggtgcgagggcgggcagtgcggggtggccagcactgctcccagctgagggcgccctcttcctcactacgtaccgggtcatcttcacggggatgctcacagaccccctggtgggggagaaggtggtgttccgctccttcccggtggccgcgctgaccaaggagaaatgcatcagcatccagacccctttggatcagctattgcaggacgggctgcagctgcgctcctgcacattccagctgctgaaaatggcctttgatgaggaggtggggtctgacagtgccgagctcttctgcaagcagctgcataagctgcggtacacaccggatgtcagggccaccttctccttcaccctgggctctacctacacacccggccagccaccccgagtcaccaagaacaagggtccttccctcagaaccctgtcctggaacctggttaagaacgtcaagaagaccatcgggcggcagcatgtcactcgcaagaagtacaaccccaactcagctaggagcactggagccagccgccctctgaggaccaggaggaggagatctcagtccttgaagccctcggacggcatgaccatgagcagcctcctggtggaaagggcttgctgccgcgaatatcagtgccttggcctgggccccctgagcagccgcctgagccgggccaagtctgaatccttccgcatttctctggtcaaccgcatgcatgccatctaccgcaggtacccggggctgctgatcgtgccccagagtgtccaggacaacgccctgcagcgcgtgtcctactgctaccgccagaaccgcttcaccgttgtctgctggcgcatccggcggtccaaggcagtactgctgcattctgggggcctgtacggcataggtgtagtcggactctttaaggcccagaacgcaccttctccaggccagttccaggcagactcgagtagcctggagcaggagaagtacctgcaggctgttgtcagctccatgccccgctactccagtgcgtccggacgcaacacacttagcggcttctcctcagcccacgtggggagtcacattggcagccccagagccagggtcaccactctgtctaaccccatggcggcggcatccaaactgactgcaccccgagcaagcagccctctacatcctcggggacaaaggccagctcaagaatgtgcggccggaccccttgcagcaaccttcctactggactctgactatgagcacattgagctggggctgctgtacgaggagaaggggcagcgcaggagccagctgccttgcaggtctctgtgtggaccggatgagcaagaggacagccatgttccacaactacatgaatgcacccgaggacacagaggtcctgcggccctacagcaacgtgtccaacctgaaagtaggttggagacagagctgagccgacccgctaagcgctggaaggacacctgggaccgcgtgaaggctgcatggcgccttgaagcccggccagatggacgtggcacccctagctccctcctagtgtccaccgcacctcaccaccgctgctcgctgggctgcctgcggcagcaccagcacccttacagccaggttccagacagcagagagtgagaacaggtcctacgagggcactctgtacaatgaagggggccttcatgaagccctggaaggccccgctggttcgtgctggacaagaccaagcccccagttgcgctactacgaccacccgtgtggacacagagtgcaaagggtgtcatcgacctggtggaggtggaggtggaggctgtggcacctggcacgcccacctatggggtgcccctaagactgtggacgagaaggcccttctttgacgtgaagacaacgcgtctcgcgtttacaacttctggtgcccaggacgtgccctcggccccagcagtgggtggaccggatccagagctgcctgtcggacgcctgagcctccaagccctggcccggttgctttgcttcccggtcggttacccgacccactagggggtgggcagggccgccccggcaattgtttacagccccggccctcgacagtattgaggccccgagccccccagcacttgtgtgtacagcccccgtccccgccccgccccgcccggccggccctaacttattttggcgtcacagctgagcaccgtgccgggaggtggccaaggtacagcccgcaatgggcctgtaaatagtccggccccgtcagcgtgtgctgggtccagccagcgggctgcagaagactcttctagaaccagagtctatataaagagagaactaacgccaaaaaaaaaaaaaa

SEQ ID NO: 133234 - DNA, 486 bp, Homo sapiens
gaaatgcaacttgagaaacccaagcctgtaaaaccagtgacgttttccacaggcatcaaaatgggtcaacatatttcactggcacctattcacaagcttgaagaagctctgtatgaataccagccactgcagatagagacatatggaccacatgttcctgagcttgagatgctaggaagacttgggtatttaaaccatgtcagagctgcctcaccacaggaccttgctggaggctatacttcttctcttgcttgtcacagagcactacaggatgcattcagtgggcttttctggcagcccagttaaccatttataagatttggaccttggagctgaaccagggagctagcaaaaaggatttgacacgataagcctcatctgatggaagagaggaataaataattcacctatatgtgtttgaggttgtgacagacttataaaatctttttaaaaaataaagctataatttatattaaaaaaaaaaaa

SEQ ID NO: 133235 - DNA, 945 bp, Homo sapiens
atgattatcgtagacaaagttaactggatcccgtggctaattggcttgaaatccatgtatgcaaataactgtgaaagttgtgtagatttactgtttgtgagaggagctggaaactgccctgagtgtggtactccactcagaaagagcaacttcagggtacaactctttgaagatcccactgttgacaaggaggttgagatcaggaaaaaagtgctaaagatatacaataaaagggaagaagattttcctagtctaagagaatacaatgatttcttggaagaagtggaagaaattgttttcaacttgaccaacaatgtggatttggacaacaccaaaaagaaaatggagatataccaaaaggaaaacaaagatgttattcagaaaaataaattaaagctgactcgagaacaggaagaactggaagaagctttagaagtggaacgacaggaaaatgaacaaagaagattatttatacaaaaagaagaacaactgcagcagattctaaaaaggaagaataagcaggcttttttagatgagctggagagttctgatctccctgttgctctgcttttggctcagcataaagatagatctacccaattagaaatgcaacttgagaaacccaaacctgtaaaaccagtgacgttttccacaggcatcaaaatgagtgttgggattacactgtgcccggctgaggagcacacttttaatgatgaaagaagtttcaatctcagctcatcttggagcaaatttaataaacctccctctactctgccttttaaagtattggatgaagagaggttggtggaactgaaagttcccaacacactaattacaaagttggttccctttgcaataagcccctgttctgaggctatccaggaccacccagccatcttattagcatacaaaaagacaccattttggagactacaaacgttttag

SEQ ID NO: 133236 - DNA, 1543 bp, Homo sapiens
ctagatgcaagaccgggggaactgactgccggaacgtttgtgttgcagcgcctcgccccttgccggtgctctttcgcgaagggaccgtctctgccaagcgcctgttggtaggaacctgcttggtcgcgtctgagggggcttgtaggtggctctggctgaaacaggcgcctgcgagagtctgtaggagggaaaccgccatggacgatcagggttgccctcggtgtaagaccaccaaatatcggaacccctccattgaagctgatggtgaatgtgtgcggacacactctctgtgaaagttgtgtagatttactgtttgtgagaggagctggaaactgccctgagtgtggtactccactacagaaagagcaacttcaggggtacaactctttgaacgatcccactgtttgacaaggagtgttgagatcaggaaaaaagtgctaaacgatatacaataaaagggaaggaaggtttttcctagttctaagagaatacaatgatttcttgggaagaagtgggaaggaaattgtttttcaactttgacccaacaatgtgggttttgggacaacaccaaaaaggaaaatgggagatataccaaaagggaaaacaaaggatgttattcagaaaaataaattaaagctgactcgagaacaggaagaactggaagaagctttagaagtggaacgacaggaaaatgaacaaagaagattatttatacaaaaagaagaacaactgcagcagattctaaaaaggaagaataagcaggcttttttagatgagctggagagttctgatctccctgttgctctgcttttggctcagcataaagatagatctacccaattagaaatgcaacttgagaaacccaaaccctgtaaaaccagtgacgttttccacaggcatcaaacatggtcaaacatatttcactggcaccttattcaccaagcttggaaggaagctctgtatgaataccagcccactgcagatagagacatatggacccacatgttccctgagcttgagatgctagggaagacttgggtatttaaaccaattgtccagagctgcctcaccgacaggacccttgctggggggctatacttcttctcttgcttggtccacagagcacctacaggatgccattccagtggggctttttctggccagccccaggttaacccatttataagatttggacccttggagcctgaacccaggggagcctagcaaaagtaaagcagacttataaaattatagctaatgtgcagctgcacaacacagtccttccacttagccagctgtggttaaaggattttataaggagaaaatttcagaaactaagttgagtaatatggggggatatatatttgtgaaaaataatttttacttatatttttcagaggatttgacacgataagcctcatctgatggaagagaggaataaataattcacctatatgtgtttgaggttgtgacagacttataaaatctttttaaaaaataaagctataatttatattaaaaaaaaaaaaaaagggcggccgct

SEQ ID NO: 133237 - DNA, 511 bp, Homo sapiens
  misc_feature (1)...(511): n = a,t,c or g
acacctggggatgagaatgaacatgcccatttccagaaagacaaagtagtagaagtagcagaggaggaagaagtggctgaggtggaagaagaagaagccgaccgaggactgaccactcgaccaggttctgggttgacaaatatcaagacggaggagatctctgaagtgaagatggatgcagaattccgacatgactcaggatatgaagttcatcatcaaaaattggtgttctttgcagaagatgtgggttcaaacaaaggtgcaatcattggactcatggtgggcggtgttgtcatagccgacagtgatcgtcatcaccttggtgatgcctgaagaagaaacagtacacatccattcatcatggtgtggtggaggttgacgccgctgtcaccccagaggaacgccacctgtccaagatgcagcagaacggctacgaaaatcccacctacnagttctttnagcagatgcagnactagacccccgccacagcagcctcttgaagttggacang

SEQ ID NO: 133238 - DNA, 549 bp, Homo sapiens
ggtctaccctgaactgcagatcaccaatgtggtagaagccaaccaaccagtgaccatccagaactggtgcaagcggggccgcaagcagtgcaagaccatcccccacttgtgatttccctaccgctgcttaggtgagccggccggccgtggggctggtgttgattgggggcctggtcttgagggaagaaaaagaggatgctcctgttaggtcacatacacagacttgttcttcagcacattgccactctgtgttgtactgtgttttggactcttgcagttacattctgggcactgaccctataggagcagtatttttgagttccctgcctcagaatgaatttacccagggtgtatattgaaattacaaattcctgggccagttccaggactcctgaatgaaaaatgcctatagtagcggatccgggaattcttattttaccgtatcgcatagatgattctcatgaacaggggccttgtgtgtttcttcacatagactttctagaagaaagaatctaatgtgaagctgcagcattttgttaaattctaaaa

SEQ ID NO: 133239 - DNA, 438 bp, Homo sapiens
taccaacttgcatgactacggcatgttgctgtcctgcggaattgacatagttccgaggggtagagtttgcgtggtgcccactggctgaaaaaagtgacaatgtggattctgctgatgcggaggaggatgactcggatgcctgctggggcggatcaaacacatactatgcagatgggagtgaagacaaagtattagaagtatcagaggatgaagaagtggctgaggtggaagaagaagaagccgatgatgaagagccatagaaaagcactacttcagcttctacttcagaagaagaataaaagaagaagtctagccgttcataagaaaggtccaagaaaaggagaaagaaaaaatcatcgaaaagaaaacataagaagtattctgaagatagcgacagtgactctgattctgaaacagactccagtgatgaagataaca

SEQ ID NO: 133240 - DNA, 3585 bp, Homo sapiens
agtttcctcggcagcggtaggcgagagcacgcggaggagcgtgcgcgggggccccgggagacggcggcggtggcggcgcgggcagagcaaggacgcggcggatcccactcgcacagcagcgcactcggtgccccgcgcagggtcgcgatgctgcccggtttggcactgctcctgctggccgcctggacggctcgggcgctggaggtacccactgatggtaatgctggcctgctggctgaaccccagattgccatgttctgtggcagactgaacatgcacatgaatgtccagaatgggaagtgggattcagatccatcagggaccaaaacctgcattgataccaaggaaggcatcctgcagtattgccaagaagtctaccctgaactgcagatcaccaatgtggtagaagccaaccaaccagtgaccatccagaactggtgcaagcggggccgcaagcagtgcaagacccatccccactttgtgattccctaccgctgcttagttggtgagtttgtaagtgatgcccttctcgttcctgacaagtgcaaattcttacaccaggagaggatggatgtttgcgaaactcatcttcactggcacaccgtcgccaaagagacatgcagtgagaagagtaccaacttgcatgactacggcatgttgctgccctgcggaattgacaagttccgaggggtagagtttgtgtgttgcccactggctgaagaaagtgacaatgtggattctgctgatgcggaggaggatgactcggatgtctggtggggcggagcagacacagactatgcagatgggagtgaagacaaagtagtagaagtagcagaggaggaagaagtggctgaggtggaagaagaagaagccgatgatgacgaggacgatgaggatggtgatgaggtagaggaagaggctgaggaaccctacgaagaagccacagagagaaccaccagcattgccaccaccaccaccaccaccacagagtctgtggaagaggtggttcgagaggtgtgctctgaacaagccgagacggggccgtgccgagcaatgatctcccgctggtactttgatgtgactgaagggaagtgtgccccattcttttacggcggatgtggcggcaaccggaacaactttgacacagaagagtactgcatggccgtgtgtggcagcgccatgtcccaaagtttactcaagactacccaggaacctcttgcccgagatcctgttaaacttcctacaacagcagccagtacccctgatgccgttgacaagtatctcgagacacctggggatgagaatgaacatgcccatttccagaaagccaaagagaggcttgaggccaagcaccgagagagaatgtcccaggtcatgagagaatgggaagaggcagaacgtcaagcaaagaacttgcctaaagctgataagaaggcagttatccagcatttccaggagaaaagtggaatcttttggaacaggaagcagcccaacgagagaccagcagctggttggagacacacatggccagagttggaagccatgctcaatgaccgccgccgcctggccctggagaactacatcaccgctctgcaggctgttcctcctcggcctcgtcacgtgttcaatatgctaaagaagtatgtccgcgcagaacagaaggacagacagcacaccctaaagcatttcgagcatgtgcgcatggtggatcccaagaaagccgctcagatccggtcccaggttatgacacacctccgtgtgatttatgagcgcatgaatcagtctctctccctgctctacaacgtgcctgcagtggccgaggagattcaggatgaagttgatgagctgcttcagaaagagcaaaactattcagatgacgtcttggccaacatgattagtgaaccaaggatcagttacggaaacgatgctctcatgccatctttgaccgaaacgaaaaccaccgtggagctccttcccgtgaatggagagttcagcctggacgatctccagccgtggcattcttttggggctgactctgtgccagccaacacagaaaacgaagttgagcctgttgatgcccgccctgctgccgaccgaggactgaccactcgaccaggttctgggttgacaaatatcaagacggaggagatctctgaagtgaagatggatgcagaattccgacatgactcaggatatgaagttcatcatcaaaaattggtgttctttgcagaagatgtgggttcaaacaaaggtgcaatcattggactcatggtgggcggtgttgtcatagcgacagtgatcgtcatcaccttggtgatgctgaagaagaaacagtacacatccattcatcatggtgtggtggaggttgacgccgctgtcaccccagaggagcgccacctgtccaagatgcagcagaacggctacgaaaatccaacctacaagttctttgagcagatgcagaactagacccccgccacagcagcctctgaagttggacagcaaaaccattgcttcactacccatcggtgtccatttatagaataatgtgggaagaaacaaacccgttttatgatttactcattatcgccttttgacagctgtgctgtaacacaagtagatgcctgaacttgaattaatccacacatcagtaatgtattctatctctctttacattttggtctctatactacattattaatgggttttgtgtactgtaaagaatttagctgtatcaaactagtgcatgaatagattctctcctgattatttatcacatagccccttagccagttgtatattattcttgtggtttgtgacccaattaagtcctactttacatatgctttaagaatcgatgggggatgcttcatgtgaacgtgggagttcagctgcttctcttgcctaagtattcctttcctgatcactatgcattttaaagttaaacatttttaagtatttcagatgctttagagagattttttttccatgactgcattttactgtacagattgctgcttctgctatatttgtgatataggaattaagaggatacacacgtttgtttcttcgtgcctgttttatgtgcacacattaggcattgagacttcaagcttttctttttttgtccacgtatctttgggtctttgataaagaaaagaatccctgttcattgtaagcacttttacggggcgggtggggaggggtgctctgctggtcttcaattaccaagaattctccaaaacaattttctgcaggatgattgtacagaatcattgcttatgacatgatcgctttctacactgtattacataaataaattaaataaaataaccccgggcaagacttttctttgaaggatgactacagacattaaataatcgaagtaattttgggtggggagaagaggcagattcaattttctttaaccagtctgaagtttcatttatgatacaaaagaagatgaaaatggaagtggcaatataaggggatgaggaaggcatgcctggacaaacccttcttttaagatgtgtcttcaatttgtataaaatggtgttttcatgtaaataaatacattcttggaggagc

SEQ ID NO: 133241 - DNA, 3414 bp, Homo sapiens
atgatggaaggtgaagggggagtacggatgtcacatgaccagaccgggaacaagagaaagcatggtacctctggtatttctgtgtgtcctaatctcctcctcttacaagaataccagccagattatattagggcccacgccagtggccttaatttaattagctcttcaaaggccctacccaaatacagtcatgttctaagtggactctgcaagatttgtagctttggaccacgtttctctttgcattcagataccttcttttttgccttatttgctcatgcagacccggaacaaatacggaattgcgaaacgcctgccccacctctccaaaccgagagaaaaaacgaaatgcggataaaaacgcaccctagcagcagtcctttatacgacacccccgggaggcctgcggggtcggatgattcaagctcacggggacgagcaggagcgctctcgacttttctagagcctcagcgtcctaggactcacctttccctgatcctgcaccgtccctctcctggccccagactctccctcccactgttcacgaagcccagtttcctcggcagcggtaggcgagagcacgcggaggagcgtgcgcgggggccccgggagacggcggcggtggcggcgcgggcagagcaaggacgcggcggatcccactcgcacagcagcgcactcggtgccccgcgcagggtcgcgatgctgcccggtttggcactgctcctgctggccgcctggacggctcgggcgctggagagcttagaaaataggtctgctgcaggtggctgtagaaaagaaatgaataagggcaatgataatggggccttggctatcgggggaaacatggttattatctgggttgatgattttggctggtatgttgatagagatactttagagcaggggtccccaacacccagccatggacaggtactggtccatggcctgctaggaaccgggccacacagcaggagcacattgaacatcaaggagcaactccctcgatctaaaatttctagcattggtgcttgtaatatcatttttcaagttgacattaatgctatctttggaattctcatggtacccactgatggtaatgctggcctgctggctgaaccccagattgccatgttctgtggcagactgaacatgcacatgaatgtccagaatgggaagtgggattcagatccatcagggaccaaaacctgcattgataccaaggaaggcatcctgcagtattgccaagaagtctaccctgaactgcagatcaccaatgtggtagaagccaaccaaccagtgaccatccagaactggtgcaagcggggccgcaagcagtgcaagacccatccccactttgtgattccctaccgctgcttagttggtgagtttgtaagtgatgcccttctcgttcctgacaagtgcaaattcttacaccaggagaggatggatgtttgcgaaactcatcttcactggcacaccgtcgccaaagagacatgcagtgagaagagtaccaacttgcatgactacggcatgttgctgccctgcggaattgacaagttccgaggggtagagtttgtgtgttgcccactggctgaagaaagtgacaatgtggattctgctgatgcggaggaggatgactcggatgtctggtggggcggagcagacacagactatgcagatgggaggacatctgcaatctttggctatgaccacgactgtaaagtgcatgacgcttttgctctgtcatcagtattagttgacaggcaagaatggggctccacttacgaatctggggcaggacaaggtattgctgcattttggggagcgtgctggaaggaggagcagagtttgttgtttttgcttcctgatatggactggctgtgtctccattcaaatatcaacttcaattatatctcccagaattcccacatgttgtggagggacccaggggagatagattccaagaaattgagtgctttatcttcactacctggaatagtactggcacttggtaaagcacagcgaatattgttgattgaattactaggggttggcttagagagtgaagacaaagtagtagaagtagcagaggaggaagaagtggctgaggtggaagaagaagaagccgatgatgacgaggacgatgaggatggtgatgaggtagaggaagaggctgaggaaccctacgaagaagccacagagagaaccaccagcattgccaccaccaccaccaccaccacagagtctgtggaagaggtggttcgagaggtgtgctctgaacaagccgagacggggccgtgccgagcaatgatctcccgctggtactttgatgtgactgaagggaagtgtgccccattcttttacggcggatgtggcggcaaccggaacaactttgacacagaagagtactgcatggccgtgtgtggcagcgccacaaactgcacatttgatttgaaaaagtcatggtcatctggaggtcaaattcagatggcagactcaattcagagaaaaggagctgaactagaagctatttgccaaaagaggttttctcagaggaaacacaggtatggaaaatgtttcgttggtgtcttggccccagtgatggaggagcattttgtgataggaacgttgggtgcagcatcgccatttatgaataaactgaaagctaacctgtgttacttcaccccagaaaacagagctctggcagttcctacaacagcagccagtacccctgatgccgttgacaagtatctcgagacacctggggatgagaatgaacatgcccatttccagaaagccaaagagaggcttgaggccaagcaccgagagagaatgtcccaggtcatgagagaatgggaagaggcagaacgtcaagcaaagaacttgcctaaagctgataagaaggcagttatccagcatttccaggagaaagtggaatctttggaacaggaagcagccaacgagagacagcagctggtggagacacacatggccagagtggaagccatgctcaatgaccgccgccgcctggccctggagaactacatcaccgctctgcaggctgttcctcctcgggtaggtctcgctgcagccgagttcacacttcaggtcacagcacagacacctcgtcacgtgttcaatatgctaaagaagtatgtccgcgcagaacagaaggacagacagcacaccctaaagcatttcgagcatgtgcgcatggtggatcccaagaaagccgctcagatccggtcccaggttatgacacacctccgtgtgatttatgagcgcatgaatcagtctctctccctgctctacaacgtgcctgcagtggccgaggagattcaggatgaagttgcattcaaaattaataaaaacatgaattattataaaccagatgcgggaaagatctctggctga

SEQ ID NO: 133242 - DNA, 3238 bp, Homo sapiens
gaattcccgcggagcagcgtgcgcggggccccgggagacggcggcggtagcggcgcgggcagagcaaggacgcggcggatcccactcgcacagcagcgcactcggtgccccgcgcagggtcgcgatgctgcccggtttggcactgctcctgctggccgcctggacggctcgggcgctggaggtacccactgatggtaatgctggcctgctggctgaaccccagattgccatgttctgtggcagactgaacatgcacatgaatgtccagaatgggaagtgggattcagatccatcagggaccaaaacctgcattgataccaaggaaggcatcctgcagtattgccaagaagtctaccctgaactgcagatcaccaatgtggtagaagccaaccaaccagtgaccatccagaactggtgcaagcggggccgcaagcagtgcaagacccatccccactttgtgattcccctaccgctgcttagttggtgagtttgtaagtgatgcccttctcgttcctgacaagtgcaaattcttacaccaggagaggatggatgtttgcgaaactcatcttcactggcacaccgtcgccaaagagacatgcagtgagaagagtaccaacttgcatgactacggcatgttgctgccctgcggaattgacaagttccgaggggtagagtttgtgtgttgcccactggctgaagaaagtgacaatgtggattctgctgatgcggaggaggaatgattcggatgtctggtggggccggagcagacacagactatgcagatgggagtgaagacaaagtagtagaagtagcagaggaggaagaagtggctgaggtggaagaagaagaagccgattgattgacgaggaccgatgaggatggttgatgaggtagaggaagaggcttgaggaaccctaccaagaagccacagagagaaccacccagcattgccaccaccaccaccaccaccacagagtctgtggaagaggtggttcgagaggtgtgctctgaacaagccgagaccggggccgtgccgagcaatgatctcccgctggtactttgatgtgactgaagggaagtgtgccccattcttttacggcggatgtggcggcaaccggaacaactttgacacagaagagtactgcatggccgtgtgtggcagcgcatctcctacaacagcagccagtacccctgatgcccgttgacaagtatctcgagacacctggggatgagaatgaacatgcccatttccagaaagccaaagagaggcttgaggccaagcaccgagagagaatgtcccaggtcactgagagaatgggaagaggcagaaccgtcaagcaaagaacttgcctaaagctgataagaaggcagttatccagcatttccaggatgaaagtggaatctttgtaacaggaagcagccaacgaggagacagcagctggtggagacacacatggccagagtggaagccatgctcaatgaccgccgccgcctggccctggagaactacatcaccgctctgcaggctgttcctcctcggcctcgtcacgtgttcaatatgctaaagaagtatgtccgcgcagaacagaaggacagacagcacaccctaaagcatttcgagcatgtgcgcatggtggatcccaagaaagccgctcagatccggtcccaggttatgacacacctccgtgtgatttatgagcgcatgaatcagtctctctccctgctctacaacgtgcctgcagtggccgaggagattcaggatgaagttgatgagctgcttcagaaagagcaaaactattcagatgacgtcttggccaacatgattagtgaaccaaggatcagttacggaaacgatgctctcatgccatctttgaccgaaacgaaaaccaccgtggagctccttcccgtgaatggagagttcagcctggacgatctccagccgtggcattcttttggggctgactctgtgccagccaacacagaaaacgaagttgaggcctgttgatgcccgccctgctgccgaccgaggactgaccactcgaccaggttctgggttgacaaatatcaagacggaggagatctctgaagtgaagatggatgcagaattccgacatgactcaggatatgaagttcatcataaaaaaattggtgttcctttgcaagaagatgtggggtccaaaccaaaggtgcaatcattgggactcatgggtgggcggttgttgtcatagcgacagtgaatcgtgcatcaccttgggtgatgcctgaagaaagaaacaagtaccacatccattcatcatgggtgtggtggaggttggacgccggctgtcaccccagaggagcgccacctgtccaagaatgcagcagaacggcttacggaaaatccaacctacaagttcttttgagcagatgcagaactaggacccccgccacagcaagcctctggaagtttggacagcaaaaccattggtttcactacccatcggtggtccatttatagaataatgtgggaagaaacaaacccgttttatggatttactcatttatcgcctttttgacagctgtgctgtaaacacaagtagatgccttgaacttggatttaatccacacatcagtaatgtattctatctcccctttacattttgggtctctatactacattattaatggggttttgtgtactgtaaagaatttagctggtatcaaactaagtgcatgaatagattctctccctggattatttatcacatagcccccttagccaggttggtatattattcttggtgggtttgtgacccaattaaggtcctactttacatatgctttaaggaatcgatggggggatgcttcatgtggaacgtggggagttcagctgctttctcttgcctaagtattcctttcctgatcactatgcattttaaagttaaacatttttaagtatttcagatgctttagagagattttttttccatgactgcattttactgtacaagattgctgcttctgctatatttgtgatataggaattaagaggatacacacgtttgtttcttcgtgcctgttttatgtgcacacattaggcattgagacttcaagcttttctttttttgtccacgtatctttgggtcttcaattaccaagaattctccaaaacaattttctgcaggatgattgtacagaatcattgcttatgacatgatcgctttctacactgtattacataaataaattaaataaaata

SEQ ID NO: 133243 - DNA, 3648 bp, Homo sapiens
  misc_feature (1)...(3648): n = a,t,c or g
atgaagtccatcttcacttcagagatctcctccgtcttgatatttgtcaacccagaacctggtcgagtggtcagtttcctcggcagcggtaggcgagagcacgcggaggagcgtgcgcgggggccccgggagacggcggcggtggcggcgcgggcagagcaaggacgcggcggatcccactcgcacagcagcgcactcggtgccccgcgcagggtcgcgatgctgcccggtttggcactgctcctgctggccgcctggacggtctgggcgctgggaggtacccactgatggtaatgctggcctgctggctgaaccccagattgccatgttctgtggcagactgaacatgcacatgaatgtccagaatgtgaagtgggattcagatccatcagtggaccaaaacctgcattgataccaaggaaggcatcctgcagtattgccaagaagtctaccctgaactgcagatcaccaatgtggtagaagccaaccaaccagtgaccatccagaactggtgcaagcggggccgcaaagcagtgcaagacccatccccactttgtgattccctaccgctgcttagttggtgagtttgtaagtgatgcccttcttcgttcctgacaagtgcaaattcttacaccaggagaggatgggatgttttgccgaaactcatcttcactggcacaccgrccgccaaagagacattgcagtgaagaagaagtaccaacttgcatgactacggcatgttgctgccctgcggaattgacaagctccgaggggtagagtttgtgtgttgcccactggctgaagaaagtgacaatgtggattctgctgatgcggaggaggatgactcggatgtctggtggggcggagcagacacagactatgcagatgggagtgaagacaaagtagtagaagtagcagaggaggaagaagtggctgaggtggaagaagaagaagccgatgatgacgaggacgatgaggatggtgatgaggtagaggaagaggctmaggaaccctacgaagaagccacagagagaaccaccagcattgccaccaccaccaccaccaccacagagtctgtggaagaggtggttcgagttcctacaacagcagccagtacccctgatgccgttgacaagtatctcgagacacctggggatgagaatgaacatgcccatttccagaaagccaaagagaggcttgaggccaagcaccgagagagaatgtcccaggtcatgagagaatgggaagaggcagaacgtcaagcaaagaactttgcctaaagctgataagaaggcagtttttccagcatttccccggagaaagttgaatctttggaacaggaagcagccaacgagagacagcagctggtggagacacacatggccagagtggaagccatgctcaatgacccccgccgcctggccctggagtaactacatccaccgctctgcaggctgtttcctcctcggcctcgtcacgtgttccaatatgctaaagaagtatgtccgcgccagaactgaaggactagtcagcacatctctatagcatttcgagcatgtgcgcaatggtggatcccaagaaagccgctcagatccggtcccaggttatggacacacctccgtgtgatttatgagcgcatgaatcagtctctctcccgtgctctacaacgtgcctgcagtggccgaggagattcaggatgaagttgatgagctgcttcagaaagatgcaaactattcatgatgacgtctttggccaaccatgattagtgaaccaaggatcaagttacggaaaacgatgctcttcatgccatctttgaccgaaacgaaaaccacccgtgggagctccgttccggtgaatgaagaagttcagcctggaccgatctcgagccggtgcatttcttttggtggctgacgtctgtgccagccaacacagaaaacgaagttgaagcctgttgatgcccgccctgctgccgaccgaggactgaccactcggaccaggttctgggttgacaaatatcaagacggaggagatctctgaaagtgaagatggatgcagaattccgacatgactcaggatatgaagttcatcatcaaaaattggtgttctttgcagaagatgtgggttcaaacaaaggtgcaatcattgggactcatggtgggcggtgttgtcatagcgacagtgatcgtgcatcaccttggtgatgcttgaaggaagaaacagtacacattccatttcatcatgggtgtgggtggaggttgacgccgctgtcaccccagaggagcgccacctggtcccaagatgcagcagaacggctacgaaaatccaacctacaagttctttgagcagatgcagaactagacccccgccacagcagcctctgaagttggacagcaaaaccattgcttcactacccatcggtgtccatttatagaataatgtgggaagaaacaaacccgttttatgagttacgcattgatcgccttttgacagctgtgctgtaaacacaagtagatgcttgaacttgaattaaatccacacacaagataaatggattcctcctctctttacatttttggtctctatactacattattaatgggttttgtgtactgtaaagaatttagctgtatcaaactagtgcatgaatagattctctcctgattattttatcagcataggccccttaggccagttgtatattattcctggtggtttgtgacccaattaaagtcctactttacatatgctttaagaatccgatggggggatgccttcatgtgaaacgtgggagttccagctgccttcctcttgccctaagtaatccctttcccgggaccactatgccattttaaaagttaaaaccatttttaaaggtatttccagatgcttttaggagagatttttttttcccatggactgcaattttaactgtaacagattgcctgccttctgctaatatttgtgatattaggaatttaagagggatacacaccgtttggtttccttcggtgcctgtttttatgtgcacacaattaggccattgagacttccaagctttttcctttttttgtcccacgtaatctttggggtctttgattaaagaaaagaatcccctgttcatttgtaggccacttttaccgggggccgggtgggggagggggtgctttgctggttcttcaattacccaagaattctccaaaacaattttctgcaggatggattgtaccagaatcattgccttatgacatgatcgctttcctacactggtattacattaattaaattaaattaaattaaccccggggcaagacttttttttgaaggatgacccccagccattaaataatccgaagtaattttgggtggggagaagangcaggcagattcaattttctttaaccaagtctgaagtttcgatttatgatacaaaagaagatggaaaatgggaagtggcaatataaagggggatgaggaaggcatgcctgggacaaaccccttcttttaagatgtgtcttccaatttgtataaaacgggggctttcatgtcaacaaaatacattctttggaggagcttgttacatccttgtatgtcacacgcccctctgcatagacacttcttcatttcacacgcgagtgtgggggcggggcg

SEQ ID NO: 133244 - DNA, 475 bp, Homo sapiens
gaacataaactcaagattttattgtcttcataataaaagatgacacttagaactggatcacttggatctgagagaatctcactgagttcctcattgaaatagcccctcttatatgctatgtcaactggtaaacgatggctctcctttgggtcaatgatccccccggttgcgatctgtgcttctaataagcgaataccgtggcccttttcgatgagttccttattcatggcttggaacaaagagatgatgtttcctgtttcaggatcattatacccagtgacagctcgttctgcagacaggagcttctctttgaactcaatgcccaccagacctctcttgtaggcttcctccactggtaacctcaagttgctaacaggatccactataaagccagtagctgcttgggcttccagcaactccagagcagtaccaggtcggactaagccaattttcatggcctcataaatgccaagct

SEQ ID NO: 133245 - DNA, 482 bp, Homo sapiens
tttaatttaattttttttcaggctaaaactacaaagaagattgtgctaaggcttgagtgcgttgagcccaactgcagatctaagagaatgctggctattaaaagatgcaagcattttgaactgggaggagataagaagagaaaggtatataattatgggtggaaggtgcaatctttttcatagctttattatttgaaaaggtgaacatctattcattgtggcatagagctcaggggtaatcctctaaaaatattagatctatagctaaagatatgtgaggtcttttgctacaaggaggaaaggaagaatgaggcagcttaacagcatggtgagtattttaggaacagataatgttcttaatggggcagtagttcatggcaaaatacaaaacaacttttttctgttctgttacagggccaagtgatccagttctaagtgtcatcttttattatgaagacaataaaatcttgagtttatgttca

SEQ ID NO: 133246 - DNA, 487 bp, Homo sapiens
ggatggttcacgctgagatctctgacgagggtttctttctttccgcgccgatagcgctcacgcaagcatggttaaatatccctaaaaccccgccggactttctgtaagtaagtgtggcaagcaccaaccccataaaagtgacacagtacaagaagggcaaggattcctctgtacgcccagggaaagcggcgttatgacaggaagcagagtggctatggtgggcaaaactaaaagccgattttccggaaaaaggctaaaactacaaagaagattgtgcttaaggctttgagtgcgttgagcccaacttgcagatctaagagtaaatgctggctttttaaaagatggcaagcatttttgaactggggaggagataaggaagagaaagggccaagtggatccagttcttaagtgtcatcttttatttatggaaggacattaaatctttgagtttctgttcaaaaaaaaaaaaaaaaaaaaaaagtcgagc

SEQ ID NO: 133247 - DNA, 564 bp, Homo sapiens
  misc_feature (1)...(564): n = a,t,c or g
tcttatanacatgttgactcttgttcctgctgagttacttgttcgaagcttacagcttgttntccaggcatcgaataactgttgagattgttctactgttgtcgtatattcttctatattgaattctggttaatttggagtaactaattctgtggctgttgtgagtcttcagcaccctcccatgtaatgttcctccatacagttaaaacatcctaacttgtttttcaagctcactcaggcctacgccaaacgtttctgttttttttaaccataaaggttaaattaatttttgtgataggagggatatttacatattttagtggaccacattttaagttggatggtgtgctctaaaatactgaaaaacaatagcccatatacctatgtatttgtttttgatgggttgtttactctgaaataaaatgtatggttttcttaaaaggaagttttaaagtacctattttgtgtcatcctgtattgaaaagaatgtcaagcttgttaaaatgacatgtaacaaaaatgtattttgatttgtatttcagaaactaaaaaataaaatgttga

SEQ ID NO: 133248 - DNA, 1804 bp, Homo sapiens
  misc_feature (1)...(1804): n = a,t,c or g
gtgagacacgatgagtgttagcttgcacagtagaggcaagtgttataggaggccagaaaagggagatgaacatgggaagcatagtcagagaaggcttcatggaggaagcagggcccagaattgggtttaatttgagtttcttcatccaaagcacagtcaccggttcgagctcagtaggtagtactcagctccaacccttgtcccttccgcctgccactgcaggtcaggaaccccgggggacaggacctttaggctctcataactcttgccctgcccccgaacctgtttcatatggccgactcaacgacccgccagcgactacccaccccggctctttcacacggttccactcaaagccgctcacaagtagttgctgggacagcgaaatggaggggtgtgtgtctaacctaatggtctgcaacctggcctccttcctaaatgttagcactaatccttgtgcctttttcccctggtatttctactacctacttcttttataggcaggttggtctcctcttcatattgcggcttctgctggccgggatgagattgtaaaagcccttctgggaaaaggtggagttctaaacgtgtatacaaacacagatagatttctgcattgttttcttctttcttctccatctttccagatcgctgtcatgttactggaaggcggggctaatccagatgctaaggaccattatgaggctacagcaatgcaccgggcagcagccaagggtaacttgctagcaagaaatcctaaccattacatagaattggtagtgattaattggtctctggtggtccctgatttcagacacttagcctgtgatgaggagagagtggaagaagcaaaactgctggtgtcccaaggagcaagtatttacattgagaataaagaagaaaagacacccctgcaagtgggccaaaggtgggctggggttttaatactcaagagaatgggtgggaaggtttaaacagcttgggtttattctttactttgtattgttgtgtttgttgtccccagtgtcctacaaactaatgtatttgtgcacaagacatcatctatgaatgatgaagttttctcaccttcaaagtcttataaacatgttgactcttgttcctgctgagttacttgttcgaagcttacagcttgttttccaggcatcgaattaactgttgagattgttctactgttgtcgtatattcttctatattgaattctggctaatttggagtaactaaattctgtgggctgttgtgagtcttccagcaccctccccatgtacccttataatccctccncctgaaaacagaacagctcccaatagcaaccaagctaggtggttctgcccagatgtttctatgtggattctgtaaatgtccctcccataccagttaaaacccatcctaaacttggttttttccaggctcacttccaggcctacggcaaaacggtttctgtttttttttaaccatgaggtttaatttattttttgtgataggagggatatttacatattttagtgggaccacattttaagttgggatgggtgtgctctaaaatactggaaaaacaatagcccatataccctatgtatttgtttttgatggggttgtttactcctggaaataaaatggtatgggttttccttaaaagggaagtttttaaaggtaccctattttgtgtcatcctgtattgaaaagaatgtcaagcttgttaaaatgacatgtaacaaaaatgtattttgatttgtatttcagaaactaaaaaataaaatgttgaaagaaaaaaaaaaaaaaaaaa

SEQ ID NO: 133249 - DNA, 1923 bp, Homo sapiens
ttattgcaaatggagattagcaataagtgaggaaggtgaccatccactccgttctgataagacaccatctttaaatattaaattttttgcaggaagtggaacacccatgtcagcatacgatgactgtgaaagcaaacttgaaaaactgggctctgtgtgaatatccaatgttgaagcaccttcctggaatgagtgaacaaagttaaggacttgcagagagagttttctactggaatgtaagaggttttgaaggctctcttttctgcaaaggccatgtgtagcaattttcctataaactttccggtttaattcggaactgaacagcggaattccaaagcacagctcgagaggaacccaatctgcttctgttgtggcaccagaggtttgctttgttgctgaatctatagttgcttcttcaatgaccatttcaaatgactctgtactcccatttaacatctgagccagaagccaaatcaggttttcctctctcatcagaagcatcactgagttttctatttgcaagttggcatgctcctgaattaaaactgcagaatgtgttaaagcatcattcaacatcgtgagcacatttgaggtaggaactactccaggatcgtgaccccaagatgttattagcaatcgatcgtaactctgaaatatatctggcagttttcgaggtcttgtacctttggataataaaagggatggtggtccttgtccagtgatatgataaacataaatgtactgtttaaaccagacagagctgacttctgggatagctggtccaatatgctgaggggtgcagctgctgacaggccggatttcattggtgaggggagccatggaaacaagcagtgtgtaatttttgtttagaactctgctgccagttgcagggtccagaccaagaaggctttcacagcataagagatccagaggaaaaccataattgggttggtctggctgtgcagtttgcacaactagatctttgttatgatgcagaaacagtattgtgtttctcagagtaagcgcatgatcaaaatatctctgtgcttctctttcaccagtgctctgaactggtgaaagatttcccatcattaagaaggcagtaagagtggagtcaaacaggaatgcgatgtgcttcgtgtgtcctgcagacagactcaggcttcttacactggctgtgtcagctggatcttcttgactatttgtatcagtgtcagttgccgatgaagcttcttgtacaggcctcctactttcccctccaccccatgacaagagcaccttttgatgtgaagacaaagatgaagacctccatgatgagctatctccacttaatgactgcctcacgttggccggcaacttgttccaggggtagttgtgccggatgtggaactccacgtctatgttcaccatgccgccgccagggctggctgtttccacagccgaggggccttcctgtgcatcaaagaggaaggcattgctgctgggaagctggtgggagtcatggcagctggaatgagtcaaatactgttcatctagtgagtactccaggacttcatccatttcttcctcctggacttcccggagccttgcagctgacctcggcaattcggccagctccctctcctgaaactgcacctcctcctccagcacagattctataaggtctttgcactcttcacacttacatttctgcaggtgattggccaggcagtaggcagtagctttggatgtcaggaatttctctgtgaggtcttggaagttctgtttgcacttttccagttcagagcgcaagtactgattggtttccaggatgctcatttctgccctcttggtctgggtagacactttcactggatgggtaaaggcttttcccacagggtcagagaaggccaccacggtcatttcttcccttttgtcagacat

SEQ ID NO: 133250 - DNA, 794 bp, Homo sapiens
tcagacataattcctcagtttggccttcccatctctatacagtccgataacggactggcctttattagtcaaatcacccagtttctcaggctctttgtattcagtgaaatcttcataccccttatcgtcctcaatctctgggtcaaggagagcctctggatgactatgtgaatacccagggggcttcgtgttcagtgtcactaagaaggagctgggggcaggaagtatagaagaatgtgcagcaaaatgtgaggaggacaaagaattcacctgcaggtatttccattgtcgttgcacctttctcagcattccacaagttacttcctccttcctttgttttcctctacctttgcctcttttaaaaagttctaagttgttagccaatcgggacaaatacagaatgtgaggtcccattccagccaatagaaaccagacacagcagtagggtggacatgtcaggttataaatgaccctgtctcctttgtttggtgaactctcatggcaaaactgctggtgagtgtaccctttcaaaatcccttttaaaacctgaagccaaaataaagccttcttcagccaaagaaaagctgaaagccaccaccaccaccagtcccgtgctataagaaatgctaaaggttgtttttcccagaaagaatgtgcctccagatggaaattgggatctcctttccgttttgaaacacacaaaaatctctcggcctcaagtacacagtcttcatcaacttcctgctgatgatcaagtactttctgctgtaaaaatttatcagctgcaagaattg

SEQ ID NO: 133251 - DNA, 2146 bp, Homo sapiens
ttacaaatagtctcgtccacacattgtgacagactctttgtatggacggatgcttttatttttcttgggtaaataggagtgacataggagtgaaaggctgggacctatagtaagtgtattttcactttttaaggaactgtcaaatgattttctgttgtgatcgtactgttgtatgttccaatcaagagtgtgacagcgttctggttgctccatctcctcttcaccaatatttgatattgtccatttttttttagatttgtgccacagctcctctttgtacctctggtagaatttggctgcgaatccatctggtcctgggctttttttggttggtagtctattaattgctgcctcactttcagaacttgttattgatctattcagggattcgacttcttcctggtttagtcttgggaggctgtatgtgtccaggaatttatccatttcttctagattttctagtttatttgtgtagaggtgtttatagtattctctgatggaagtttgtatttctttggtctttgatgttggtgaccttcggatggggttttcatgtggacctccttttgttgatgttgatgctattcctttatgtttattagttttccttctaacagtcaggcccttctgctgcaggtcttctggagttcgttggaagtccactccagaccctctttgcctggctatcaccagtggaggcttcgtggtcaccatatcatctggagaacgtgtcaaaagaggagaagtttctgcttgcattccccatccagtgaaagcgtctacccagactaagaggtattttagtttcctgactcggggcatgtgagtaaagtcaatttgccagtcctgggcaggggcaaatccccgagcttgatgtgtaggaaagggaggaggcctgaacaattccatggggtggataggcaaaacaatttggttgataaggctcagatcctgaactaacctgtaaggcttctctggttctaggacaggtgaaatgggggaattgtaaggagagtttataggctttaaaaggccatgctgtagcaggcgagtgataacaggctttaatctttttaaagcgtgccagctgccactctcttgattgtcctctgcagcatcacttccaagtaatgacctgtctgctgtgtgagcacctctcatcacaggatactcactacccttcgcctggtccagactccacacatgggctgcgctgccacagtacacgctgccaccacagcaggacaacgcccacggcccgtgaaccacgcgaggacaacgcccacggcccgtgaaccacgtgaggtgcgacacttttgtcctgccctgggacttctgctccggcccgcgatgccgcaagacctggctcagctgcagggccccacagcctcccctccggccccactcaccgccgcccccgtgaggtaggacagggagatcccaaagagccggccccaggcagccccgatgagcagggacgggatgaagaccccggcagacaccgtgagcccgtaggtccagcaggccaggaagaagtagaccagcgtgaacaggccgagggtcagggggttgtaggagcctaggagagaagaggggctgacggggcctccacgactcccgcctccgcaggactgccctgccccgctgcccagtctcgggcctcacagtcaccttccaggagcccagcaacctgagctcccgagcccagcggtccccagaaggctccctgttctcagcctccgggctgcagatgctgggccgaggctgctcagcggctgtcctgccccacacaggagtctctggggctcggggtctcccaggccctggggacagtcgctgggtgggacgggaggcttgggaccggcctgtcaggcctctaccctcggacagcctgaggcccagcatctgctcctgcagatcgagccggctgctcagagccgggagatggccactcagctcctttaactgcccggccagctgcgccacggatgcctccagagcccggctcttctctcggagcagcaccagctctccatgcatctcctgccgggccagctcgccagccagctgtgcggcctccaggttctcctgcacataggcggccagctccccagcccggctttcctccaagcgccccttggcgtcc

SEQ ID NO: 133252 - DNA, 1281 bp, Homo sapiens
atgtctactgatgatgatagtgatggtggtggtggtggtgatggtggtggtggtaataattgtgatggtggtggaatgatgatgatggtggtggtgggtagtaatgatggtgttggtgatggtggtagtggtcgtggtgatggtgatagtgatagtgatggtggtggtaatgataatgctaatggtgatggtaatgataatgattatcatgatgatagcggtggtgatggtgatggtgatgataatggtgatggtggtagaatgatgatgatggtgatggtggtgctggtggtaataatgatgatggtggtggtgatgatgttgaggatgatgataatagtgacagtggtggtgagactgaggtgcgactctagaggatcccctgatggtggtggtagtggtagtaacgatgatggtggtggtgatgatagtgatgatggtgatgatgttgagggtgatgataatagtgatagcggtggtggtaatgataatggtgatggtggcggtggtgatgatgttgatgaagatgataatgggagtggtggtggcaatgtggatggtgatgatgatgttgacgatgatgatgctcatcacaatcaccttatatcacctctgagaaagtcagcagagtcagaacgcttttctaggttccagactcataatgtcctcaccagcacctctgagaaagtcaggcagagatcccaaaacagtcttagtgttccagtggtcaagggggactggcaaattgactttactcacatgccccaagtcaggaaactaaaatacctcttggtctgggtagacactttcactggatgggtagaagcctttcccacaggatctgagaaggccaccgtggtcatttcttcccttttgtcagacataattcctcagtttggccttcccatctctatacagtccgataacggactggcctttattagtcaaatcacccagtttctcaggctctttgtattcagtgaaatcttcgtaccccttatcgtcctcaatcttcaggaaaatgactgcacaagaattgctccaagtggaaggactgatgttggcaagccggcttccagccaggagctgcagacagccgttgatcttcaggggaagttacctctgagttcagacactctggcaatccctagctatcaaccttccgataagcaagggctccgacccacctacctgaggatcagtccgggagccagcgtctggacagagcggggtcgcgccctggaacacagggcaggagaggaaggagaaaagcccagctga

SEQ ID NO: 133253 - DNA, 641 bp, Homo sapiens
gactcccgggtcgactactactactaaatttccgacagcgtcgacagatagatcgcccctccatgaacgacacccgtaacctatcccgcacctagaaagttccatgccccaacccgacctacttcagaggaaaacaaatgggtcattgatgtcctttcacccgcgggaaggccgacagtgccctaagaccagaaattccgggaaaaacctagcccaaaatgtaccaagccccacacccggatgtccatccttgtatttggattccagaacctcattttggtggtggcaagacaactggctttggccatgatttatgattccccctggattatgcaaaggaaaaatgaaccccaaacatagacttgcaagaccatggcctgtatgagaagaaaaaggacctcaagaaagccaccgaaaaggaacgccaagaaccagaattgaagaaagtccaggggggacttgcaaaaggcccattgttgggtgctgggcaaaaagaagaaatgaagtgtctagcagttgagctggagattggttcacagccgaaggagttaaaggtgctgcaatgatgttagctgtggccactgtggatttttcgcaagaacattaataaactaaaaacttcatgtgaaaaaaaaaaaaaa

SEQ ID NO: 133254 - DNA, 476 bp, Homo sapiens
tatgaaactggatgaagatgtgaaggggatcagtgcagaagcgcctgtactctttgccaaggcagcccagatttttatcacagagttgactcttcgagcctggattcacacagaagataacaagcgccggactctacagagaaatgatatcgccatggcaattacaaaatttgatcagtttgattttctcatcgatattgttccaagagatgaactgaaacctccaaagcgtcaggaggaggtgcgccagtctgtaactcctgccgagccagtccagtactatttcacgctggctcagcaacccaccgctgtccaagtccagggccagcagcaaggccagcagaccaccagctccacgaccaccatccagcctgggcagatcatcatcgcacagcctcagcagggccagaccacacctgtgacaatgcaggttggagaaggtcagcaggtgcagattgtccaggctcagccacagg

SEQ ID NO: 133255 - DNA, 2451 bp, Homo sapiens
atgaggggctccatccttaaggaatgtggttctaaggagagggccagccaagtggacctggaatactccagaggaaacacggccagctttgccatgtgcttccatgacagagccagaattatgaagggaagccagagaagccgaaaactaacagggggagaagggagagaagagggagaaagagtagagaataaagacttcttggacctgcatggccagatacaggtgcgccttgtggtgaagactgccagcttgttatcacgagtcacctacatagctgaggttgaaggtagagagacagatgccggctggagaaatgaacttcaagtggggagactggattctggtccagacattttggttgtttccatctccactgaccatactttggttgacactcatctagaagcagttggaggacactcacatgaatttccatattttaaaaaccacttagcttgccatgtggaaagtgagctgcagagagacaggaatggccacagggatgctggttggaggaacatgagacatgggattactgacaaggaaatgcaagatagtcaaggatcttcagacaatcatgttctgggaagcttgaggtcatggagcgccagggcggctcctgctcttcctggactccctgaagaggcgtttgtcgaaatgtccacagaaggaggatttggtggtactagccgcagtgatgcccagcaaagcctaaagtccttctggcttcggcccagattttttatcacagagttgactcttcgagcctggattcacacagaggataacaactgccggacttatgtcgccatggcaattacgaaatttgatcaattggattttctcatcgatattgttctaagagatgaactgaaacctccaaagtgtcaggaggaggtgctgcagtctgtaactcctgctgagccagtccaatactatttcacgctggctcagcagcccaccgcccgtccaagtccagggacagcagcaaggccagaccaccgccagctccatgaccaccatgcagcctgggcagatcatcatcgcacagcttcagcagggccagaccacgcccgtgacgacgcaggttggagaaggtcagcaggtgcagattgtccaggcccagccacagggtcaagcccagtaggcccagagtggtactggatggaccgtgcagggacagatccagacacttgccaccagcgctcaaccgattacacagacagaggtccagcaaagacagcagtagttcagccagttcacagatggacagcagctctaccagatccagcaagtatccatacctgcgggccagcgacctcgcccaggcccatgttcatccagtcagccaaccagccctccgacgggcaggccccccggagtcatgaagtcatcgcagctgcgcctgcagccaggcgggaacgggaacgggaactggctggccgcggtcccttctgtcccccgccagccggaaatgtccgcgcgctgaaaagcagacgctgcctgcccggggaacggcgagagagagcgagaaaaaaaaagcctgaaggcggcgcggcagccagcgagcggggagaaacagattcacacccaggggcctccgggcagggcccacgggactcaggccgtgtcccgcttggaatgtggagcaggcgcggcctcggcgtcagcagagctcccctgcatctcctcctgggggtgtcaacttcctttccattaccattaactcctcttattccaaccacagctgttgtcaaccctctcaaacctctgaaaaacaggataaaagccccacataggaggatgccccttgtgccaggtggctctcagaatctggggactgtaagagccaggatcagcacccgtcagtcacatgctgagcccagcactgacaatgaacgtgttctgtctatgactcaagatatacactccatcttcttgaaccttaagaatattacatggatttgtaccttacaaagttgtgggttcttgctaagcaatctctgtaaggacattgtccacaaggcaggcagtggggaagcaaggacaagatggagcccacgggcacaagctggaacccatgaggatggactgagactcatgccaattcttgctgcctctgactttgatggtgtgggtgtcctgcaggaaaagcttgtgccctttatcacagagctggcccaggagccaagaggccaaagcaggacagcaggggcctgctgtcccacaccagcaacaagcagcatatgtgttctgtttctccggaaaaccctgactaatacagtagaggatatccagattgacaacttcaggagaaagtctgatttaggagtcggaagcccagattggaaaaacctcttgatagatgtcactcgggaagaccatgaaaacagccaaaataattcaaagagaagatgcaaagtgaactgtgaaacagaccaaagatga

SEQ ID NO: 133256 - DNA, 456 bp, Homo sapiens
catgaccatgcattacgagattccggtccgtacccggagatcaaaagggacgacataactccctcagaacgcctggtgaacaacatgcctcactgaacaggtgctatttaagctgatatctcaatgactaattatgcaaggattgagaggaaccatttagggagaggaaacagcaactccaaagaccctaagctacgagagagctctgagcatttgaggaaattaaagaccagagtggtgaacgagcagaccaggcttggtctcataatggagacgtttgtgggccgaggcggagaggctccattttactttcaatgtgacaaacatctgtcacggagttttcagggactcggtctgatctgtctgtaaaaagcctgtaaaactgctctctgggcagggcatctctgaaagaaaggcagcagccccagtcagggcttatagataaaactcccatct

SEQ ID NO: 133257 - DNA, 1039 bp, Homo sapiens
tttcataccccagtggtgcctggaatgccagcgagacaaaaccgtttactcccctggaaaggaggctgaagccagggagccaagtggtctggctcggtgggtcccactcccatggagcccagcaagctaacatccactggcttgaaattcttgctgccagcacagcattctgaagttgacctgggacactcaagcttggtggggggaggagcagccagggagccaagtggtctggctcggtgggtcccactcccatggagcccagcaagctaagatccactggcttgaaattcttgctgccagcacagcattctgaagttgacctgggacactcaagcttggtggggggaggagcgtccgccattggtgaggcttgagtaggtggatttaccctcacggcgtaaacaaagcctctggggagttcgaattgggtggagctcactgcagctcagcaaggccactgtggccagactgcctctctagattcctcctctctgggcagggcatctctgaaagaaaggcagaggccccagtcaggggcttatagataaaactcccatctccctgcaacagagcacctgggggaaggggtggctgtgggcgcagcttcagcagacttaaacgttcctgcctgccaactctgaaaagagcagcagatctcccagtgcggcacttgagctctgctaaaggacagactgcctcctcaggtgggtcccggacccctgtgcctcctgacagggagacatctcccagcaggggtcaacagacacctcatacaggagagctccagctggcatctgacagggtcacaagggatcaaaactggatagagaatgagtttgacaaattgacagaagtaggcttcagaaggtgggtaataacaaattcctctgagctaaaggagcatgttctaacccaatgcaaggaagttaagaacattgataaaaagttacaggaactgctgactagaataaccagtttagagaagaacatatgtgacctggtggagctgaaaaaacacagcacaagaacttcatga

SEQ ID NO: 133258 - DNA, 1239 bp, Homo sapiens
  misc_feature (1)...(1239): n = a,t,c or g
acatgcttcccaagctacactctggggtatgaaacacacgctaacagatgtaaaagaagccccactggttacctagctgtaatgaacacctaacaccctacttcatccaactacagcagaacacacatgcttcccaagctacactctgggctatgaaacacccgctaacagaagttaaagaatataggtccttccatgggtatgacctctcaattccatacgggagttaaactagaaatcagtaacagaaagatagctggaaaatccccaaacacatggagattaagcaatgcacttctaataccacatggatctacaaagaagtctcaaaagaaatttaaaaatatttaaactaaatgaaaataacaacacaatatatgtaaatttgtgagatgcagcaaaagcagtgcctggaagaaatgcatagcattcaatgcctgtattagaaaagaatgatccaaaagcaatcatttagatatccatcttaggaggcagtcaaatccaaagtaagctcagcaaatggaataataaaagttagtagcagaaatcaatacaattgagaataggaaacagagaaaaataatgtaatcaaaagccagcgcnnnnnnnnnnnnnnnnnnnnnnnnnagccgctaaccgttcactctcctggaaaaggggctgcagccagggagccaagtggtctggctcggtgcggtcccacctaccaatgagcccagcaagctaagatccactggcttgaaattcttgctgccagcacagaaatcaacctgaaatcaacctgaaatgctcaagcttggtgcnnnnnnnnnnnnnnnnnnnnnnnnnnnnnnnnnnnncagttttaccctcaccgtnnnnnnnnnnnnnnnnnnnnnnnnnnnnnnnnnnnnnnnnnnnnnnnnnngcaaggccactgtnnnnnnnnnnnnnnnnnnnnnnnnnnnnnnnnnnnnnnnnnntctctgaaaaacaggcaaccagccccaagcaggggctttgaaaataaaacccccatctatctgggacagagcacccaaggaaaggggccgggtgtgggggccgattttaacaaaaataaacgctcatgcctgacggctgtgaagacaacagcagatctcccagcacagcactcaagtctctgctaaggtcagactgcctctcactgggtcctgaccctgtgtatctgactggagaacctccagtagggaaacagaccctatacagaagcttgctggg

SEQ ID NO: 133259 - DNA, 429 bp, Homo sapiens
  misc_feature (1)...(429): n = a,t,c or g
cttaattcccacgaggctggggtgtgtgctcctgagctnttngaaaccaggctgctttcaggaacattgctgtggattcccagggcctattccactanaagcaagatggctgaatgcgcatgcagcaacctctgggaaacagagtaacttttcccgaaaatcatccactcacaataagccctctgaaggcaaagcggcaaaccccaaaatggtgagcagtctccccagcaccgccgacccctctcaccagaccatgccggccaacaagcagaatggatcttctaaccaaagacggagatttaatccacagtatcataacaaccggctgtgacgttggtggcctgagctaggaggaaaaagagcagttttcactcagttttggttccctgcccgaggtgctgacccaattcgctgccaaaagagtggtca

SEQ ID NO: 133260 - DNA, 415 bp, Homo sapiens
aagcgacgattttgtgcagcgctgtgtttgcgagcgggatttaagggctgccggctggggtgtgtgctcctgagctcttcagaaaccaggctgctttcaggaacattgctgtggattcccagttcaagcaaagtgatgtaatacccaagaacaggaaagtaaacctaagagcattaatgggtttcagagaaacgaaagtgaaactttattactgcctacacaatcaaacaggagggagaaaggagacaagcaagtcagaaagcgatttgatagggcctattccactagaagcaagatggctgaactcaatactcatgtgaatgtcaaggaaaagatctatgcagttagatcagttgttcccaacaaaagcaataatgaaatagtcctggtgctccaacagtttgattttaatgtg

SEQ ID NO: 133261 - DNA, 394 bp, Homo sapiens
ctgggattcttctagaaagtggggtgggaaaggagctagggagggcgtgtggagggacgagatctgtgtcagaacgtgcgtgtgagcggatacaaaacccgagagaggcgtgagcagcgctgtgtttgcgagcgggagcgaggggcgccggctggggtgtgtgctcctgagctcttcagaaaccaggctgctttcaggaacattgctgtggattcccaggtgagtagagatggtccttccctctctgtgacctcctcctgctgccatggccagctgtccctacacctgcagctgcctcctgggagccttgtcacagcctttggccgcctctgctgcctctcagggctcaacaccagagttctcttttagagtgtgttgactgaagttattcctg

SEQ ID NO: 133262 - DNA, 1350 bp, Homo sapiens
atggaatcacattctgatatccttgaagagaaggctataggttcactgccctttgaggatgcagctgatcttgtacagccaacagtggcactagatgccgccactgggaccaccactgctgctgggaccactgggaccaccactgcatatgggaaagtgggcatagttgtgctgcagttttcccatcactgctgcttggcattactagctcctgttgctagacctggtttgggtgtgtctgactcgtcaaacctgaatcatatgctacaagtcctgctgcaagggagtcctgaacagcctgtgtctggcttttgttgttgtgttgatgatgatgatgattatgatgatggtggcttcttagtgagaggtaacctagacagactcataaggttcactggttctcttccacagagcggccctgagcagctgagcctgcaagccacgcaagcatctgtttcttcttttgccaagtacaggaggatgtttgctctctctgtagagagctttctgaggtctctgggtgtacccagagatttaatagaaattcttaacgttaagtcacattccaggaaggaaggaagagttgttcgttcaaataagaaagataaatgttcggcactgcaggaagatgctcattccctagccaggtcagcactaagactgagcgtggagcctcccagcaacagggctggaaagatccccaccaggtcagcactgcagtggacaccggaagagcagagtgaacgcatccacgggggtgccttggtcatttctgtaatcatggggttcctgcttttcatctctttcctccagcactttgtcagcgagcgtaaatatgacgaggagctcgggaaagctgcccggttttcctgtgacatcgaacagctgaaggcccaaatcatgctctgcggagaaattacacatccaaagaacaactattcctcaagaactccctgcagctccctgctgcctctgctgaatgcgcacgcagcaacctctgggaaacagagtaacttttcccgaaaatcatccactcacaataagccctctgaaggcaaagcggcaaaccccaaaatggtgagcagtctccccagcaccgccgacccctctcaccagaccatgccggccaacaagcagagcggccctgagcagctgagcctgcaagccacgcaagcatctgtttcttcttttgccaagtacaggaggatgtttgctctctctgtagagagctttctgaggtctctgggtgtacccagagatttaatagaaattcttaacgttaagtcacattccaggaaggaaggaagagttgttcgttcaaataagaaagataaatgttcggcactgtag

SEQ ID NO: 133263 - DNA, 899 bp, Homo sapiens
  misc_feature (1)...(899): n = a,t,c or g
cccacgcgtccgcttactggtcacagtaaaagcaagttgataaaggtggccagtgggggaacagagcttatgtgcctcctgagaaagccagtcgctggaaactggactgagagccctgatttggagcacgaggaaaccttaaaaaggcctattccactagaagcaagatggctgaactcaatactcatgtgaatgtcaaggaaaagatctatgcagttagatcagttgttcccaacaaaagcaataatgaaatagtcctggtgctccaacagtttgattttaatgtggataaagccgtgcaagcctttgtggatggcagtgcaattcaagttctaaaagaatggaatatgacaggaaaaaagaagaacaataaaagaaaaagaagcaagtccaagcagcatcaaggcaacaaagcatgctaaagacaaggtggagaggcctgatgtcatgtcccctgcagccgcagccaccacagattcaaaacggccccatgaatggctgcgagaaggacagctcgtccacagattctgctaacgaaaaaccagcccttatccctcgtgagaaaaagatctcgatacttgaggaaccttcaaaggcacttcgtggggtcacaggcccaaatattgagaaatcggcgaaggatttgcaacgctgcaccgtttctctaactagatatcgcgtcatgattaaggaagaagtggatagttccgtgaagaagatcacagctgcctttgctgaattacacaactgcatcattgacaaagaagcttcattaatggcagaaatggataaaggtatagaagaagccatggaaatcctgactgctcgtcagatggaaagcagaagnactaaagagactcactgaccttggccagttcagatggcagagatgcagctgg

SEQ ID NO: 133264 - DNA, 2715 bp, Homo sapiens
  misc_feature (1)...(2715): n = a,t,c or g
gggtcgacgatttcgtcggattgtgacaaaatctttcattaacaaggggagtttcggtgaagtggaggtttggggaaaggcgaggaagtcggtctggagcaagcaagcaaagtgcggaagctgtactgggattcttctagaaagtggggtgagaaaggagctagggagggcgtgtggagggaccagatctgtgtcagaacgtgcgtgtgagcggatacaaaacccgagagaggcgtgagcagcgctgtgtttgcgagcgggagcgaggggcgccggctggggtgtgtgctcctgagctcttcagaaacgaggctgctttcaggaacattgctgtggattcccagggcctattccactagaagcaagatggctgaactcaatactcatgtgaatgtcaaggaaaagatctatgcagctagatcagttgttcccaacaaaagcaataatgaaatagtcctggtgctccaacagtttgattttaatgtggataaagccgtgcaagcctttgtggatggtagtgcaattcaagttctaaaagaatggaatatgacaggaaataagaagaactataagagaataagaagcaagtccaagcagcatcaaggcaacaaagatgctaaagacaaggtggagaggcctgaggcagggcccctgcagccgcagccaccacagattcaaaacggccccatgaatggctgcgagaaggacagctcgtccacagattctgctaacggaaaaaccagcccttatccctcgtgagaaaaagatctcgatacttgaggaaccttcaaaggcacttcgtggaggtcacagaaggcaacagactactgcaacagaaactatccttaggtggggaaccccaaacctatacatggaacaacagagaggtcagatggcctacagtggtcagctgagcagccttgtaacccaagcaagcctaaggcaaaaacatctcctgttaagtccaatacccctgcagctcatcttgaaataaagccagatgagttgggcaaagaaaagaggcccaaatattgagaaatcaagtggaaggatttgcaacggctggcaccgttttcttctaactagaatatcgcgtcatgaattaaagggaaagaaagtgggatagttccggtgaaagaagatcaaagctgccctttgctgaaattacacaactgcatcattgaacaaaaggaagttttcattaatgggcaggaaatgggattaaagtttaaaggaaggaaggccatgggaaatcctggactggctcgtcaggaagaaaagcaagaagaaactaaagagactcactgaccttggccagtcaagaatggcagagatgcagctgggcccgaaactcaggggcagaaattaagcactttgtcagcgaagcggtaaattatgacgagggagctcgggaaaagctgccccgggttttcctgtgacatcgaacaagctgaagggcccaaatcattgctctgcnggggaaaattacacatccaaaagaacaactatttcctcaaggaactcccttgcagctccctgctggcctctgctgaatgccgcacgcagcaaacctctggggaaaacagaggtaactttttcccgaaaatcatccactcacaataagccctctgaaggcaaagcggcgaaccccaaaatggtgagcagtctccccagcaccgccgacccctctcaccagaccaatgccggccaacaagcagaatggatcttctaaccaaagacggagatttaatccacaagtatcataactaacaggctaaattgggcctgccaagtcgcagggcagtgggaatgaagccgagccactggggaaagggcaacagccgccacggaacacaggaaggacagccgcacaanggttcggtttccggcccaaaaacaaagggcggtgccaaaaaattcaagaggcttccttggggattgaaggacccccgagggccccggcccatttcttgaaaaggccccgggcgaaaggcagtcacgctgcagacaccttcgggagggccagggccttttccggggttagtgttcggttaggggttcacagtgcaatctcttccccacgaagaatagaagtttccacagatgcagcagttctctcagttcccggctgtgaccgttgggtggcctgagctaggaggaaaaggagccagtttccactcagtttgggttcccctgcccggggtgctgaccccaattcgctgcccaaaagagtgtcaatcagaatataccaaatcccggtatgggttgtgtcatccctctcttaatccatttttacttaattcttaataatccagcccccagcctggcctccataattttccagggcctttgccttgatcctgttgatgcctttcctcctcatccaagactttggcagcattttagccccaggcagtatttacctcattattaggaaaatcaagaatgtgggtgaaaaacatcaaggggtcagttagccaacctgtgttgtagccagtgatgtccagtcccattgattggccttttagaagagttaatgttcccaaaaaggattctttataatccggccaaacatgatctgctgaggacacatgcgcttttgtagaatttaacatctggtgtttttctgaaaaaatatatatatacatatattgctttagtttgaaacaaattaaaatatgactgcatttgaaaaaaaaaaaaaaaaaaaaccta

SEQ ID NO: 133265 - DNA, 490 bp, Homo sapiens
  misc_feature (1)...(490): n = a,t,c or g
gggaacaantttgagacctgattacgtgtggnggaatccnnnnnnnnnnnnnnnnnnnnnnnnnnnnnnnnnnnnnnnnnnnnnnnnnnnnnaaaaagacctgctctttaaacaattgctttgctgagatgttgctaatttgtagctttgccccagccactttgccccagccactttgannnnnnnnnnnnnnnnnnnnnnnnnnnnnnnnnnnnnnnnnnnnnnnnnnnnnnnnnnnnnnnnnnnnnnnnnnnnnnnnnnnnnnnnnnnnnnnnnnnnnnnnnnnnnnnnnnnnnnnnnnnnnnnnnnnnnnnnnnnnnnnnnnnnnnnnnnnnnnnnnnnnnnnnnnnnnnnnnnnnnnnnnnnnnnnnnnnnnnnnnnnnnnnnnnnnnnnnnnnnnnnnnnnnnnnnnnnnnnnnnnnnnnnnnnnnnnnnnnnnnnnnnnnnnnnnnnnnnnnnnnnnnnnnnnnnnnnnnnnnnnnntgtggaa

SEQ ID NO: 133266 - DNA, 388 bp, Homo sapiens
  misc_feature (1)...(388): n = a,t,c or g
gcgccggggcaaagtgcctggggcaaagctacaaatgaacaacatctcagcaaagcaattgtttaaagtacaggtcttttcnnnnnnnnnnnnnnnnnnnnnnnnnnnnnnnnnnnnnnnnnnnnnnnnnnnnnnnnnnnnnnnnnnnnnnnnnnntccaagggcttgaacatttcttgacttgttagcaatccaaatcgttatgtctccgaaacagagttgactgaggggaccgcacggctgggcaggacctttgacttcgtatacatccacaggagaaagagaacctcagccccactctaccaacacgcacctagtaaaattccgccaactgaatctcacgcacgcaaacacgtggggagcgttgcttgcaccgcgagtccccatt

SEQ ID NO: 133267 - DNA, 1259 bp, Homo sapiens
  misc_feature (1)...(1259): n = a,t,c or g
atgattatctcaatagatacagaaaaggcccttgataaaattctacaccccttcattctaaaaactctcaataaactaggtattgatggaacgtatctcaaaataataagagctctttatgacaaacccacagccaacatcataatgaatgagcaaaagctggaagcattccctttgaaaagcaacacaaagcaaggatgcccttttttaccactcctattcaacatagtattggaagttctggccagggcaatcaagcaagagaaagaaataaagagtattcaaataggaagggaggaagtcaaattgtctctgtttgcagatgatatgattgtatatttagaaaaccccatcatctcagccccaaatctccttaagctgataagcaacttcagcaaagtctcaggatacaaaatcaatgtgcaaaaatcacaagcattcctatacaccagtaatagacaaacagagatccagatgatgagtgaacttccattcacaattgctacaaagggaataaaatacctaggaatactacccacttacaagggatgtgaaggacctcttcaaggagaactccaaacccctgctcaagaattagaaaaaactactttaaatttcatatggaaccaaaaaagagcccatatagccaagacaatgctaagcaaaaagaacaaagctggaggcgtcatgctacctgacttcaaactatactacaaggctgcagtaaccaaaacagcatggctgggggacgatcaggtctttctcatcccacgaggccatatttcagactatcacatggggaaaaaccttggacaatacccggctttccaggacagaggtccctgcggctttccacagtgcattgtgcccctggtttatcgagactagagaatggccacgacttttaccaagtatacggcttgtaaacatttggttaacaaggcacgtcctgcacagccctagatcccttaagccttgattttatacaacacaggtttttgtgagctccaagttgggtcaaagcggctggggcaaagtgcctggggcaaagctacaaatgaacaacatctcagcaaagcaattgtttaaagtacaggtcttttcnnnnnnnnnnnnnnnnnnnnnnnnnnnnnnnnnnnnnnnnnnnnnnnnnnnnnnnnnnnnnnnnnnnnnnnnnnntccaagggcttgaacatttcttgacttgttagcaatccaaatcgtatgtctcgaacgattcccccctgggagtgaatcaa

SEQ ID NO: 133268 - DNA, 1603 bp, Homo sapiens
gggcggcggagagggagcagccagttggtgtgtctcagaaaatcccactgagttccgaggcctcctagatgtggaatcctgctgagagttgttcccaggtcagagaatggagagagccctgtgcatgatgggatatccccgcctagatctttcagtgagtctctacctcagctactcttaggatcagggggagaaccatggaaaggcccggtgtcagacatccggaaagaagatgggatgaatgttttacctctgaagtacatcccaaatgtgggagttaacttcagctttgctggggtctatttggccagtgaaactctgcctgggttcattcgcacatccggaagccacttcacgggggggccgtcgcaaccggaaccacacacttggcatcggcgggttgagccaaattggggactcgtggtgcaagcaacgctcccccacgtgttagcgtgcgtgagattcggttggcggaattttactaggtgcgtgttggtagagtggggctgaggttttcttgctcctgtggatgtataggaagtcaaaggtcctgcccagccctgcggtcccctgagtcaactctgtttcggagacataacgatttggattgctaacaagtcaagaaatgttcaagtccttggatgtagggaaaagaaagagagatcagactgtcactgtgtctatgtcgaaagggaagacataagagactctattttgaaaaggacctgtactttaaacaattgctttgctgagatgttgttcatttgtagctttgccccagccactttgccccagccgctttgacccaacttggagcacacaaaaacctatgttgtataaaatcaaggtttaagggatctagggctgtgcaggaccgtgccttgttaaccaaatgtttacaagcagtatactttgtaaaagtcattgccattctctagtctcaataaaccagggacacaatgcaccgtggaaagccgcagggacctctgcccttgaaagcagggtattgtccaaagtttctccccatgcgatagtctgaaatatggcctcgtgggatgagaaagacctgactgtcccccagcctgacacccgtaaagcgtctgtgctgaggtgtattagtcaaagaggaaagcctcttgcagttgacatggaggaaggccaactgtctcctgcttgccccctgggaactgaaatgtcctcgggtgtaaaaccccgatcgtacatttgttcaactctgagctcgggagaaaagctgccctgtggagggaggcgagacatgttgggcagtaatgctgccttgttattctttactccgctgagatgtttgggtggagagaaacataaatctggcctacatgcacatccgggcatagtacctttcccttgaacttaattatgatatagattcttttgctcacgtgtttgtttttgttgttgctgttgaacttccccttattatcaccctgctcccctactgcattcctttgtgctgtaataatgaaaaataataatcaataaaaactgagggaactcaaaggccggtgccggtgcaggtccttggtgtgctgagtgcccggtcccctggacccactgttgtttccct

SEQ ID NO: 133269 - DNA, 522 bp, Homo sapiens
gtgtacccaacagctccgaagagatagcgaccatcgagaacgggcaatgatgacgatggcggttttgtcaaaaagaacagggggaaatgtgggaaaaagaaagagagatcagattgttactgtgtctgtgtagaaagaagttgacataggagacaccattttgttctgtactaagaaaaattcttctgccttgggatgctgttattctataaccttatccccaaccctgcgctctctgaaacatgtgctgtgtccactcagggttaaatggattaagggtggtgcaagatgtgctttgttaaacagatgctagaaggcagcatgctccttaagagtcatcaccattccctaatctcaagtacccagggacacaaacactgcggaaggccgcagggacctctacctaggaaaaccagagacctttgttcacctgtttatctgctgaccttctctccactatcatcctatgaccctgccacatccccctctttgagaaacacccaagaatgatcaataaatact

SEQ ID NO: 133270 - DNA, 1701 bp, Homo sapiens
gagatagggaaaaaccgccttagggctggaggtgggacctgcgggcagcaatactgctttgtaaagcattgagatgtttatgtgtatgcatatccaaaagcacagcacttaatcctttacattgtctatgatgccaagacctttgttcacgtgtttgtctgctgaccctctccccacaattgtcttgtgaccctgacacatccccctctttgagaaacacccacagatgatcaataaatactaagggaactcagaggctggcgggatcctccatatgctgaacgctggttccccgggtccccttctttctttctctatactttgtctctgtgtctttttcttttccaaatctctcgtcccaccttacgagaaacacccacaggtgtgtaggggcaacccacccctacatctggtgcccaacgtggaggcttttctctagggtgaaggtacgctcgagcgtggtcattgaggacaagtcgacgagagatcccgagtacatctacagtcagccttacgacatttgaagttctacaatgaacccatcagagatgcaaagaaaagcacctccgcggagacggagacatcgcaatcgagcaccgttgactcacaagatgaacaaaatggtgacgtcagaagaacagatgaagttgccatccaccaagaaggcagagccgccaacttgggcacaactaaagaagctgacgcagttagctacaaaatatctagagaacacaaaggtgaaacaaaccccagagagtatgctgcttgcagccttgatgattgtatcaatggtgtctgcaggtgtacccaacagctccgaagagacagcgaccatcgagaacgggccatgatgacgatggcggttttgtcgaaaagaaaagggggaaatgtggggaaaagcaagagagatcagattgttactgtgtctgtgtagaaagaagtagacataggagactccattttgttatgtactaagaaaaattcttctgccttgagattctgttaatctatgaccttacccccaaccccgtgctctctgaaacatgtgctgtgtccactcagagttgaatggattaagggcggtgcaggatgtgctttgttaaacagatgcttgaaggcagcatgctccttaagagtcatcaccactccctaatctcaagtacccagggacacaaaaactgcggaaggccgcagggacctctgcctaggaaagccaggtattgtccaacgtttctccccatgtgaaagtctgaaatatggcctcgtgggaagggaaagacctgaccgtcccccagcccgacacccgtaaagggtctgtgctgaggaggattagtaaaagaggaaggaatgcctcttgcagttgagacaagaggaaggcatctgtctcctgcctgtccctgggcaatggaatgtctcggtataaaacccgattgtatgctccatctactgagatagggaaaaaccgccttagggctggaggtgggacctgcgggcagcaatactgctttgtaaagcattgagatgtttatgtgtatgcatatccaaaagcacagcacttaatcctttacattgtctatgatgccaagacctttgttcacgtgtttgtctgctgaccctctccccacaattgtcttgtgaccctgacacatccccctctttgagaaacacccacagatgatcaataaatactaagggaactca

SEQ ID NO: 133271 - DNA, 1062 bp, Homo sapiens
atgtctacgcgaacaccaaaattagtaagtcctgtttctgctcctgaacatccagaattatggaggcgggctgtggcctctctccacattagagtttggtttgttgatcaaactttagattcaagagattttgtagtaaatatagtaattaaaccagactcccagattataacatgtgaaaattgtagagtgcttacgcgcattgattcaacttttaattggcaacgccgtattctgttggtgagagaaagaaagggtgtgtggatccctgtgtccatggaccgaccgtgggaggcatcaccatccgtccatattttgattgaagtattaaaaggtgttttaaatagatccaaaagattcatttttactttaattgcagtgattatgggattaattgcagtcacagctacggctgctgtagcaggagttgcattgcactcttctgttcagtcagtaaactttgttaatgattggcaaaagaattctacaagattgtggaattcacaatctagtattgatcaaaaattggcaaatcaaattaatgatcttagacaaactgtcatttggatgggagacagactcatgagcttagaacatcgtttccagttacaatgtgactggaatacgtcagatttttgtattacaccccaaatttataatgagtctgagcatcactgggacatggttagacgccatctacagggaagagaagataatctcactttagacatttccaaattaaaagaacaaattttcgaagcatcaaaagcccatttaaatttggtgccaggaactgaggcaattgcaggagttgatgatggcctcgcaaatcttaaccctgtcacttgggttaagaccattggaagtactacgattataaatctcatattaatccttgtgtgcctgttttgtctgttgttagtctgcaggtgtacccaccagctcggaagagacagcgaccatcgagaacgggccatgatgacgatggcggttttgtcgaaaagaaaaggcggaaatgtgccgaaaagcaagagagatcacattgttcctgtgtctgtgtag

SEQ ID NO: 133272 - DNA, 1878 bp, Homo sapiens
atgaacgacaaaaaccacatgattatctcaacagatgccgaaaagacctttgacaaaattcaacaacccttcatgctaaaaactctcaataaattagatattgttgggacgtatctcaaaataataagagctatcaatgacaaacccacagccagtatcatactgaatggggaaaaactggaagcattccctttgaaaactggcacaagacaaggatgccctctctcaccactcctattcaacatagtgttggaagtgttggccagggcaattaggcaggagaaggaaataaaggaaaaaccagtgtgggtaaatcagtggccgctaccaaaacaaaaactggaggctttacatttattagcaaatgaacagttagaaaagggtcatattgagccttcattctcaccttggaattctcctgtgtttgtaattcagaagaaatcaggcaaatggcgtatgttaactgacttaagggccgtaaatgccgtaaacgccgtaattcaacccatggggcctctccaacccgggttgccctctctggccatgatcccaaaagattggcctttaattataattgatctaaaggattgcttttttaccatccctctggcagagcaggattgtgaaaaatttgcctttactataccagccataaataataaagagccagccaccaggtttcagtggaaagtgttacctcagggaatgcttaatagtccaactatttgtcagacttttgtaggtcgagctcttcaaccagttagagaaaagttttcagactgttatatcattcattatattgatgatattttatgtgctgcagaaacgaaagataaattaattgactgttatacatttctgcaagcagaggttgccaacgcaggactggcaatagcatctgataagatccaaacctctactccttttcattatttagggatgcagatagaaaatagaaaaattaagccaccaaaaatagaaataagaaaagacacattaaaaacactaaatgattttcaaaaattgctgggagatattaattggattcggccaactctaggcattcctacttatgccatgtcaaatttgttctctatcttaagaggagactcagacttaaatagtaaaagaatgttaaccccagaggcaacaaaagaaattaaattagtggaagaaaaaattcagtcagcgcaaataaatagaatagatcccttagccacactccaacttttgatttttgccactgcacattctccaacaggcatcattattcaaaatactgatcttgtggagtggtcattccttcctcacagtacagttaagacttttacattgtacttggatcaaatggctacattaattggtcagacaagattacgaataataaaattatgtggaaatgacccagacaaaatagttgtccctttaaccaaggaacaagttagacaagcctttatcaattctggtgcatggcagattggtcttgctaattttgtgggaattattgataatcattacccaaaaacaaagatcttccagttcttaaaaatgactacttggattctacctaaaattaccagacgtgaacctttagaaaatgctctaacagtatttactgatggttccagcaatggaaaagcagcttacacagggccgaaagaacgagtaatcaaaactcaatatcaatcggctcaaagagcagaattggttgcagtcattacagtgttgcaagattttgaccaacctatcaatattatatcagattctgcatatgtagtacaagctacaagggatgttgagacagctctaattgatcaaaatggcaatcaaattaatgatcttagacaaactgtcattggatgggagacaggctcatga

SEQ ID NO: 133273 - DNA, 747 bp, Homo sapiens
atgggaaaagttcgcttttacttccgcctctggggtccggagcggctaggaggagcggaagtggaaaagactaacttccggcctcgggtcgcgcgcagaggtgatgtcgttggtcctgcgccccctcgtggcggtacttcagcccttcgcagcccgacgctaggggcctggcagggggcagcaagagaccgcggatctcacaagagcttactcttacaaggacagcaccaagaatatgaggaatctgcccgcatgacccaaacacttccctccaggccccacctccaacactggggattacatctcaacactggatttggaggggacatccaaactatatcaaggctgtacaagaagcttggtgccagcatttgcttctacgcagagcctcaggctgcttctactcacagtaaaaggcaaaagggcatgcaaagatcatgtggcaagagaagaatgaggagcgcctctgcccagccgcccatcgtctgggatgtgaggagcgcctctgcccagccgcccatcgtctgggatgtgaggagcgcctctgcctggctgccccatctgggaagtgagaagcgcctctgcccggccatctcatctgggaggtgtacccaacagctccgaagagacagcgaccatcgagaacgggccatgatgacgatggcgcttttgtcgaaaagaaaagggggaaatgtggggaaaagaaagagagatcagattgttactgtgtctggtagaaagaagtag

SEQ ID NO: 133274 - DNA, 786 bp, Homo sapiens
atgattccaccagcatccataggcagccagttgcctcaatatcatttggagacaccttttgacccactggctgcagatcataaatgttatctttgtccagaaccaccatattctttcaagaaccagagccttaaatccaaatatgcctctggttgcagagagaaacacactaactattcaagtgactcactgggagtgatggcttgcttacattctctcgctcccgcagcttccactatagcagtgtttcttcaccctggcagcagcagttcctccctgcggttgcaactaaatccaggttgcagtttttccaacatttactataccagccttaccagcctcatcaccactcacaccagcaccctcttctccaagccgccggctgaacttcagtatcggccacccccagaaagtcagtatggatatccaagaatgcccccagcaccacagggcagggcgccataccctcagccgcccactaggagacttaatcctacggcaccacctagtagacaaggtagtgaattacatgaaattattgataaatcaagaaaggaaggagatactgaggcatggcaattcccagtaatgttagaaccgatgccacctggagaaggagcccaagagggagagcctctcacagttgaggccagatacaagtctttttcgataaaaatgctaaaagatatgaaagaaggagtaaaacagtatggacccaactccccttatatgaggacattattagattccattgctcatggacatagactcattccttatgattag

SEQ ID NO: 133275 - DNA, 6011 bp, Homo sapiens
ggtgaaggtacgctcgagcgtggtcattgaggacaagtcgacgagagatcccgagtacatctacagtcagccttacgaacaaggaacttcagatctaaaagattggaaaagaattggtaaggaactaaaacaagcaggtaggaagggtaatatcattccacttacagtatggaatgattgggccattattaaagcagctttagaaccatttcaaacagaagaagatagcatttcagtttctgatgcccctggaagctgtttaatagattgtaatgaaaacacaaggaaaaaatcccagaaagaaaccgaaagtttacattgcgaatatgtagcagagccggtaatggctcagtcaacgcaaaatgttgactataatcaattacaggaggtgatatatcctgaaacgttaaaattagaaggaaaaggtccagaattaatggggccatcagagtctaaaccacgaggcacaagtcctcttccagcaggtcaggtgctcgtaagattacaacctcaaaagcaggttaaagaaaataagacccaaccgcaagtagcctatcaatactggccgctggctgaacttcagtatcggccacccccagaaagtcagtatggatatccaggaatgcccccagcaccacagggcagggcgccataccatcagccgcccactaggagacttaatcctatggcaccacctagtagacagggtagtgaattacatgaaattattgataaatcaagaaaggaaggagatactgaggcatggcaattcccagtaacgttagaaccgatgccacctggagaaggagcccaagagggagagcctcccacagttgaggccagatacaagtctttttcgataaaaatgctaaaagatatgaaagagggagtaaaacagtatggacccaactccccttatatgaggacattattagattccattgcttatggacatagactcattccttatgattgggagattctggcaaaatcgtctctctcaccctctcaatttttacaatttaagacttggtggattgatggggtacaagaacaggtccgaagaaatagggctgccaatcctccagttaacatagatgcagatcaactattaggaataggtcaaaattggagtactattagtcaacaagcattaatgcaaaatgaggccattgagcaagttagagctatctgccttagagcctgggaaaaaatccaagacccaggaagtacctgcccctcatttaatacagtaagacaaggttcaaaagagccctaccctgattttgtggcaaggctccaagatgttgctcaaaagtcaattgccgatgaaaaagccggtaaggtcatagtggagttgatggcatatgaaaacgccaatcctgagtgtcaatcagccattaagccattaaaaggaaaggttcctgcaggatcagatgtaatctcagaatatgtaaaagcctgtgatggaatcggaggagctatgcataaagctatgcttatggctcaagcaataacaggagttgttttaggaggacaagttagaacatttggaggaaaatgttataattgtggtcaaattggtcacttaaaaaagaattgcccagtcttaaacaaacagaatataactattcaagcaactacaacagggttttcagggacaacaacccccactgtcccaagtgtttcagggaataagccagttaccacaatacaacaattgtccctcaccacaagcggcagtgcagcagtagatttatgtactatacaagcagtctctctgcttccaggggagcccccacaaaaaatccctacaggggtatatggcccactgcctgaggggactgtaggactaatcttgggaagatcaagtctaaatctaaaaggagttcaaattcatactagtgtggttgattcagactataaaggcgaaattcaattggttattagctcttcaattccttggagtgccagtccaagagacaggattgctcaattattactcctgccatatattaagggtggaaatagtgaaataaaaagaataggagggcttgtaagcactgatccaacaggaaaggctgcatattgggcaagtcaggtctcagagaacagacctgtgtgtaaggccattattcaaggaaaacagtttgaagggttggtagacactggagcagatgtctctattattgctttaaatcagtggccaaaaaactggcttaaacaaaaggctgttacaggacttgtcggcataggcacagcctcagaagtgtatcaaagtatggagattttacattgcttagggccagataatcaagaaagtactgttcagccaatgattacttcaattcctcttaatctgtggggtcgagatttattacaacaatgggaaaaaccggtgtgggtaaatcagtggccgctaccaaaacaaaaactggaggctttacatttattagcaaatgaacagttagaaaagggtcacattgagccttcgttctcaccttggaattctcctgtgtttgtaattcagaagaaatcaggcaaatggcatacgttaactgacttaagggctgtaaacgccgtaattcaacccatggggcctctccaacccgggttgccctctccggccatgatcccaaaagattggcctttaattataattgatctaaaggattgcttttttaccatccctctggcagagcaggattgtgaaaaatttgcctttactataccagccataaataataaagaaccagccaccaggtttcagtggaaagtgttacctcagggaatgcttaatagtccaactatttgtcagacttttgtaggtcgagctcttcaaccagtgagagaaaagttttcagactgttatattattcattatattgatgatattttatgtgctgcagaaacgaaagataaattaattgactgttatacatttctgcaagcagaggttgccaatgctggactggcaatagcatctgataagatccaaacctctactccttttcattatttagggatgcagatagaaaatagaaaaattaagccacaaaaaatagaaataagaaaagacacattaaaaacactaaatgattttcaaaaattactaggagatattaattggattcggccaactctaggcattcctacttatgccatgtcaaatttgttctctatcttaagaggagactcagacttaaatagtcaaagaatattaaccccagaggcaacaaaagaaattaaattagtggaagaaaaaattcagtcagcgcaaataaatagaatagatcccttagccccactccaacttttgatttttgccactgcacattctccaacaggcatcattattcaaaatactgatcttgtggagtggtcattccttcctcacagtacagttaagacttttacattgtacttggatcaaatagctacattaatcggtcagacaagattacgaataacaaaattatgtggaaatgacccagacaaaatagttgtccctttaaccaaggaacaagttagacaagcctttatcaattctggtgcatggcagattggtcttgctaattttgtgggacttattgataatcattacccaaaaacaaagatcttccagttcttaaaattgactacttggattctacctaaaattaccagacgtgaacctttagaaaatgctctaacagtatttactgatggttccagcaatggaaaagcagcttacacagggccgaaagaacgagtaatcaaaactccatatcaatcggctcaaagagcagagttggttgcagtcattacagtgttacaagattttgaccaacctatcaatattatatcagattctgcatatgtagtacaggctacaagggatgttgagacagctctaattaaatatagcatggatgatcagttaaaccagctattcaatttattacaacaaactgtaagaaaaagaaatttcccattttatattacttatattcgagcacacactaatttaccagggcctttgactaaagcaaatgaacaagctgacttactggtatcatctgcactcataaaagcacaagaacttcatgctttgactcatgtaaatgcagcaggattaaaaaacaaatttgatgtcacatggaaacaggcaaaagatattgtacaacattgcacccagtgtcaagtcttacacctgcccactcaagaggcaggagttaatcccagaggtctgtgtcctaatgcattatggcaaatggatgtcacgcatgtaccttcatttggaagattatcatatgttcatgtaacagttgatacttattcacatttcatatgggcaacttgccaaacaggagaaagtacttcccatgttaaaaaacatttattgtcttgttttgctgtaatgggagttccagaaaaaatcaaaactgacaatggggcagggatactgtagtaaagctttccaaaaattcttaagtcagtggaaaatttcacatacaacaggaattccttataattcccaaggacaggccatagttgaaagaactaatagaacactcaaaactcaattagttaaacaaaaagaagggggagacagtaaggagtgtaccactcctcagatgcaacttaatctagcactctatactttaaattttttaaacatttatagaaatcagactactacttctgcagaacaacatcttactggtaaaaagaacagcccacatgaaggaaaactaatttggtggaaagataataaaaataagacatgggaaatagggaaggtgataacgtgggggagaggttttgcttgtgtttcaccaggagaaaatcagcttcctgtttggttacccactagacatttgaagttctacaatgaacccatcggagatgcaaagaaaagggcctccacggagatggtaacaccagtcacatggatggataatcctatagaagtatatgttaatgatagtatatgggtacctggccccatagatgatcgctgccctgccaaacctgaggaagaagggatgatgataaatatttccattgggtatcgttatcctcctatttgcctagggagagcaccaggatgtttaatgcctgcagtccaaaattggttggtagaagtacctactgtcagtcccatcagtagattcacttatcacatggtaagcgggatgtcactcaggccacgggtaaattatttacaagacttttcttatcaaagatcattaaaatttagacctaaagggaaaccttgccccaaggaaattcccaaagaatcaaaaaatacagaagttttagtttgggaagaatgtgtggccaatatgattatgggattaattgcagtcacagctacggctgctgtagcaggagttgcattgcactcttctgttcagtcagtaaactttgttaatgattggcaaaagaattctacaagattgtggaattcacaatctagtattgatcaaaaattggcaaatcaaattaatgatcttagacaaactgtcatttggatgggagacagactcatgagcttagaacatcgtttccagttacaatgtgactggaatacgtcagatttttgtattacaccccaaatttataatgagtctgagcatcactgggacatggttagacgccatctacagggaagagaagataatctcactttagacatttccaaattaaaagaacaaattttcgaagcatcaaaagcccatttaaatttggtgccaggaactgaggcaattgcaggagttgctgatggcctcgcaaatcttaaccctgtcacttgggttaagaccattggaagtactacgattataaatctcatattaatccttgtgtgcctgttttgtctgttgttagtctgcaggtgtacccaacagctccgaagagacagcgaccatcgagaacgggccatgatgacgatggcggttttgtcgaaaagaaaagggggaaatgtggggaaaagcaagagagatcaaattgttactgtgtctgtgtag

SEQ ID NO: 133276 - DNA, 3455 bp, Homo sapiens
atgggagttccagaaaaaatcaaaactgacaatggaccaggatattgtagtaaagctttccaaaaattcttaagtcagtggaaaatttcacatacaacaggaattccttataattcccaaggacaggccatagttgaaagaactaatagaacactcaaaactcaattagttaaacaaaaagaagggggagacagtaaggagtgtaccactcctcagatgcaacttaatctagcactctatactttaaattttttaaacatttatagaaatcagactactacttctgcagaacaacatcttactggtaaaaagaacagcccacatgaaggaaaactaatttggtggaaagataataaaaataagacatgggaaatagggaaggtgataacgtgggggagaggttttgcttgtgtttcaccaggagaaaatcagcttcctgtttggatacccactagacatttgaagttctacaatgaacccatcagagatgcaaagaaaagcacctccgcggagacggagacaccgcaatcgagcaccgttgactcacaagatgaacaaaatggtgacgtcagaagaacagatgaagttgccatccaccaagaaggcagagccgccaacttgggcacaactaaagaagctgacgcagttagctacaaaatatctagagaacacaaaggagcagctgcagctaactatacctactgggcctatgtgcctttcccgcccttaattcgggcagtcacatggatggataatcctatagaagtatatgttaatgatagtgtatgggtacctggccccatagatgatcgctgccctgccaaacctgaggaagaagggatgatgataaatatttccattgggtatcgttatcctcctatttgcttagggacagcaccaggatgtttaatgcctgcagtccaaaactggttggtagaagtacctattgtcagtcccatcagtagattcacttatcacatggtaagcgggatgtcactcaggccacgggtaaattatttacaagacttttcttatcaaagatcattaaaatttagacctaaagggaaaccttgccccaaggaaattcccaaagaatcaaaaaatacagaagttttagtttgggaagaatgtgtggccaatagtgcggtgatattacaaaacaatgaatttggaactattatagattgggcacctcgaggtcaattctaccacaattgctcaggacaaactcagtcgtgtccaagtgcacaagtgagtccagctgttgatagcgacttaacagaaagtttagacaaacataagcataaaaaattgcagtctttctacccttgggaatggggagaaaaaggaatctctaccccaagaccaaaaatagtgtacccaacagctctgaagagacagcaaccatcgagaacgggccatgatgacgatggcggttttgtcaaaaagaaaagggggaaatgtggggaaaagcaagagagatcagattgtcactgtgtctgtgtagaaagaatacccagggacacaaaaactgcggaaggccgcagggacctctgcctaggaaagccaggtattgtccaaggtttctccccatgtgatagtctgaaatatggcctcgtgggaagggaaagacctgaccgtcccccagcccgacacccgtaaaggggtgaaggtacgctcgagcgtggtcattgaggacaagtcgacgagagatcccgagtacgtctacagtcagccttacgaacaaggaactttagatctaaaagattggaaaagaattggtaaggaactaaaacaagcaggtaggaagggtaatatcattccacttacagtatggaatgattgggccattattaaagcagctttagaaccatttcaaacagaagaagatagcgtttcagtttctgatgcccctggaagctgtttaatagattgtaatgaaaagacaaggaaaaaatcccagaaagaaacggaaagtttacattgcgaatatgtagcagagccggtaatggctcagtcaacgcaaaatgttgactataatcaattacaggaggtgatatatcctgaaacgttaaaattagaaggaaaaggtccagaattagtggggccatcagagtctaaaccacgagggacaagtcctcttccagcaggtcaggtgcccgtaacattacaacctcaaaagcaggttaaagaaaataagacccaaccgccagtagcctatcaatactggcctccggctgaacttcagtatcggccacccccagaaagtcagtatggatatccaggaatgcccccagcaccacagggcagggcgccataccctcagccgcccactaggagacttaatcctacggcaccacctagtagacagggtagtgaattacatgaaattattgataaatcaagaaaggaaggagatactgaggcatggcaattcccagtaacgttagaaccgatgccacctggagaaggagcccaagagggagagcctcccacagttgaggccagatacaagtctttttcgataaaaatgctaaaagatatgaaagagggagtaaaacagtatggacccaactccccttatatgaggacattattagattccattgcttatggacatagactcattccttatgattgggagattctggcaaaatcgtctctctcaccctctcaatttttacaatttaagacttggtggattgatggggtacaagaacaggtccgaagaaatagggctgccaatcctccagttaacataggatgcagatcaactattaggaataggtcaaaattggagtactattagtcaacaagcattaatgcaaaatgaggccattgagcaagttagagctatctgccttagagcctgggaaaaaatccaagacccaggaagtgcctgcccctcatttaatacagtaagacaaggttcaaaagagccctatcctgattttgtggcaaggctccaagatgttgctcaaaagtcaattgccgatgaaaaagcccgtaaggtcatagtggagttgatggcatatgaaaacgccaatcctgagtgtcaatcagccattaagccattaaaaggaaaggttcctgcaggatcagatgtaatctcagaatatgtaaaagcctgtgatggaatcggaggagctatgcataaagctatgcttatggctcaagcaataacaggagttgttttaggaggacaagttagaacatttggaggaaaatgttataattgtggtcaaattggtcacttaaaaaagaattgcccagtcttaaacaaacagaatataactattcaagcaactacaacagtctgcaggtgtacccaacagctccgaagagacagcgaccatcgagaacgggccatgatgacgatggcggttttgtcgaaaagaaaagggggaaatgtggggaaaagcaagagagatcagattgttactgtgtctgtgtag

SEQ ID NO: 133277 - DNA, 4835 bp, Homo sapiens
atggccaactttcaggagcacctgagctgctcctcttctccacacttacccttcagtgaaagcaaaaccttcaatggactacaagatgagctcacagctatggggaaccacccttctcccaagctgctcgaggaccagcaggaaaaggggatggtacgaacagagctaatcgagagcgtgcacagccccgtcaccacaacagtgttgacgagcgtaagtgaggattccagggaccagtttgagaacagcgttcttcagctaagggaacacgatgaatcagagacggcggtgtctcaggggaacagcaacacggtggacggagagagcacaagcggaactgaagacataaagattcagttcagcaggtcaggcagtggcagtggtgggtttcttgaaggactatttggatgcttaaggcctgtatggaatatcattgggaaggcatattccactgattacaaattgcagcagcaagatacttgggaagtgccatttgaggagatctcagagctgcagtggctgggtagtggagcccaaggagcggtcttcttgggcaagttccgggcggaagaggtggccatcaagaaagtgagagaacagaatgagacggatatcaagcatttgaggaagttgaagcaccctaacatcatcgcattcaagggtgtttgtactcaggccccatgttattgtattatcatggaatactgtgcccatggacaactctacgaggtcttacgagctggcaggaagatcacacctcgattgctagtagactggtccacaggaattgcaagtggaatgaattatttgcacctccataaaattattcatcgtgatctcaaatcacctaatgttttagtgacccacacagatgcggtaaaaatttcagattttggtacatctaaggaactcagtgacaaaagtaccaagatgtcatttgctggcacggtcgcatggatggcgccagaggtgatacggaatgaacctgtctctgaaaaagttgatatatggtcttttggagtggtgctttgggagctgctgacaggagagatcccttacaaagatgtagattcttcagccattatctggggtgttggaagcaacagcctccaccttccagttccttccacttgccctgatggattcaaaatccttatgaaacagacgtggcagagtaaacctcgaaaccgaccttcttttcggcagacactcatgcatttagacattgcctctgcagatgtacttgccaccccacaagaaacttacttcaagtctcagaaaccagagctccctggagaaatggttgattccatggctggggcaggaaacgtgcaaagtgatcctggaaacccgtgtgccagaaagttatcaccatggtcaggcatcatcgttgaaccagtgtttccagacgcagaagaaacatgtccttcattcaccaggctgagctttcacagtgcagtggttggtacgggactaaatgtgaggctgatgctctacacaaggaaaaacctgacctgcgcacaaaccatcaactcctcagcttttgggaacttgaatgtgaccaagaaaaccaccttcattgtccatggattcaggccaacaggctcccctcctgtttggatggatgacttagtaaagggtttgctctctgttgaagacatgaacgtagttgttgttgattggaatcgaggagctacaactttaatatatacccatgcctctagtaagaccagaaaagtagccatggtcttgaaggaatttattgaccagatgttggcagaaggagcttctcttgatgacatttacatgatcggagtaagtctaggagcccacatatctgggtttgttggagagatgtacgatggatggctggggagaattacagatggctattttaaatctatggaaactgaaaaggtagaagtggatggaaaaaggggagagaagaaatcaggcaaatggcgtatgttaactgacttaagggccgtaaacgccgtaattcaacccatggggcctctccaacccgggttgccctctccggccatgatcccaaaagattggcctttaattataattgatctaaaggattgcttttttaccatccctctggcagagcaggattgtgaaaaatttgcctttactataccagccataaataataaagaaccagccaccaggtttcagtggaaagtgttacctcagggaatgcttaatagtccaactatttgtcagacttttgtaggtcgagctcttcaaccagttagagaaaagttttcagactgttatattattcattatattgatgatattttatgtgctgcagaaacgaaagataaattaattgactgttatacatttctgcaagcagaggttgccaatgctggactggcaatagcatctgataagatccaaacctctactccttttcattatttagggatgcagatagaaaatagaaaaattaagccacaaaaaatagaaataagaaaagacacattaaaaacactaaatgattttcaaaaattactaggagatattaattggattcggccaactctaggcattcctacttatgccatgtcaaatttgttctctatattaagaggagactcagacttaaatagtaaaagaatattaaccccagaggcaacaaaagaaattaaattagtggaagaaaaaattcagtcagcgcaaataaatagaatagatcccttagccccactccaacttttgatttttgccactgcacattctccaacaggcatcattattcaaaatactgatcttgtggagtggtcattccttcctcacagtacagttaagacttttacattgtacttggatcaaatagctacattaatcggtcagacaagattacgaataataaaattatgtggaaatgacccagacaaaatagttgtccctttaaccaaggaacaagttagacaagcctttatcaattctggtgcatggcagattggtcttgctaattttgtgggaattattgataatcattacccaaaaacaaagatcttccagttcttaaaaatgactacttggattctacctaaaattaccagacgtgaacctttagaaaatgctctaacagtatttactgatggttccagcaatggaaaagcagcttacacagggccgaaagaacgagtaatcaaaactccatatcaatctgctcaaagagcagagttggttgcagtcattacagtgttacaagattttgaccaacctatcaatattatatcagattctgcctatgtagtacaggctacaagggatgttgagacagctctaattaaatatagcatggatgatcagttaaaccagctattcaatttattacaacaaactgtaagaaaaagaaatttcccattttatattactcatattcgagcacacactaatttaccagggcctttgactaaagcaaatgaagaagctgacttactggtatcatctgcactcataaaagcacaagaacttcatgctttgactcatgtaaatgcagcaggattaaaaaacaaatttgatgtcacatggaaacaggcaaaagatattgtacaacattgcacccagtgtcaagtcttacacctgcccactcaagaggcaggagttaatcccagaggtctgtgtcctaatgcattatggcaaatggatgtcacgcatgtaccttcatttggaagattatcgtatgttcatgtaacagttgatacttattcacatttcatatgggcaacttgccaaacaggagaaagtacttcccatgttaaaaaacatttattgtcttgttttgctgtaatgggagttccagaaaaaatcaaaactgacaatggaccaggatattgtagtaaagctttccaaaaattcttaagtcagtggaaaatttacacatacaacaggaatcccttataattcccaaggacaggccataattgaaagaactaatagaacactcaaagctcaattggttaaacaaaaaagggaaaaagacagtaaggagtataacacttcccagatgcaacttaatctagcaccctatactttaaattttttaaacatttatagaaatcagaccactacttctgcagaacaacattttactggtaaaaagaacagcccacatgagggaaaactgatttggtggaaagaaaacaaaagtaaaacatgggaaacagggaaggtgataacatgggggagaggtttttcttgtgtttcaccaggagaaaatcagcttcctgtttggatacccactagacatttgaagttctacaatgaacccatcggagatgcaaaaaaaagcacctccacggagatggtaacaccagtcacatggatggataatcctatagaagtatatgttaatgatagtgtatgggtacctggccccacagatgatcgctgccctgccaaacctgaggaagaagggatgatgataaatatttccattgggtatcgttatcctcctatttgcctagggagagcaccaggatgtttaatgcccacagtccaaaattggttggtagaagtacctattgtcagtcccatctgtagattcacttatcacatggtgtacccaacagctccaaagagacagcgaccatcgagaacgggccatgatgatgatggtggttttgtcgaaaagaaaagggggaaatgtggggaaaagcaagagagatcagattgttactgtgtctgtgtagaaagaagtggagattcaccgaaaattgatgagctctcctccttcacacgtaactttaaggcgatcatgtcggggacaccacttgcagagcttatagtttacaatgaatgccacgaaatgg

SEQ ID NO: 133278 - DNA, 4534 bp, Homo sapiens
gctccaagatgttgctcaaaagtcaattgccgacgaaaaagcccataaggtcatagtggagttgatggcatatgaaaacgccaatcctgagtgtcaatcagccattaagccattaaaaggaaaggttcccacaggtctctcgttccaccttacgagaaacacccacaggtgtggaggggcaacccaccccttcatctggtgcccaacgtggaggcttttctctagggtgaaggtactctcaagcgtggtcattgaggacaagtcgacgagagatcccgagtacgtctacagtcagccttgcgaacaaggaactttagatctaaaagattggaaaagaattggcgaggaactaaaacaagcaggtagaaagggtaatatcattccacttacagtatggaatgattgggccattattaaagcagctttagaaccatttcaaacaaaagaagatagcgtttcagtttctgatgcccctggaagctgtgtaatagattgtaatgaaaagacagggagaaaatcccagaaagaaacagaaagtttacattgcgaatatgtaacagagccagtaatggctcagtcaacgcaaaatgttgactataatcaattacagggggtgatatatcctgaaacgttaaaattagaaggaaaaggtccagaattagtggggccatcagagtctaaaccacgagggccaagtcctcttccagcaggtcaggtgcccgtaacattacaacctcaaacgcaggttaaagaaaataagacccaaccgccagtagcttatcaatactggccgccggctgaacttcagtatctgccacccccagaaagtcagtatggatatccaggaatgcccccagcactacagggcagggcgccatatcctcagccgcccactgtgagacttaatcctacagcatcacgtagtggacaaggtggtacactgcacgcagtcattgatgaagccagaaaacagggagatcttgaggcatggcggttcctggtaattttacaactggtacaggccggggaagagactcaagtaggagcgcctgcccgagctgagactagatgtgaacctttcaccatgaaaatgttaaaagatataaaggaaggagttaaacaatatggatccaactccccttatataagaacattattagattccattgctcatggaaatagacttactccttatgactgggaaagtttggccaaatcttccctttcatcctctcagtatctacagtttaaaacctggtggattgatggagtacaagaacaggtacgaaaaaatcaggctactaagcccactgttaatatagacgcagaccaattgttaggaacaggtccaaattggagcaccattaaccaacaatcagtgatgcagaatgaggctattgaacaagtaagggctatttgcctcagggcctggggaaaaattcaggacccaggaacagctttccctattaattcaattagacaaggctctaaagagccatatcctgactttgtggcaagattacaagatgctgctcaaaagtctattacagatgacaatgcccgaaaagttattgtagaattaatggcctatgaaaatgcaaatccagaatgtcagtcggccataaagccattaaaaggaaaagttccagcaggagttgatgtaattacagaatatgtgaaggcttgtgatgggattggaggagctatgcataaggcaatgctaatggctcaagcaatgagggggctcactctaggaggacaagttagaacatttgggaaaaaatgttataattgtggtcaaatcggtcatctgaaaaggagttgcccagtcttaaataaacagaatataataaatcaagctattacagcaaaaaataaaaagccatctggcctgtgtccaaaatgtggaaaaggaaaacattgggccaatcaatgtcattctaaatttgataaagatgggcaaccattgtcgggaaacaggaagaggggccagcctcaggccccccaacaaactggggcattcccagttcaactgtttgttcctcagggttttcaaggacaacaacccctacagaaaataccaccacttcagggagtcagccaattacaacaatccaacagctgtcccgcgccacagcaggcagcgccacatacaattaagacttttacattgtacttggatcaaatggctacattaattggtcagggaagattacgaataataacattgtgtggaaatgacccagataaaatcactgttcctttcaacaagcaacaagttagacaagcctttatcagttctggtgcatggcagattggtcttgctaattttctgggaattattgataatcattacccaaaaacaaaaatcttccagttcttaaaattgactacttggattctacctaaaattaccagacgtgaacctttagaaaatgctctaacagtatttactgatggttccagcaatggaaaagcggcttacacagggccgaaagaacgagtaatcaaaactccgtatcaatcagctcaaagagcagagttggttgcagtcattacagtgttacaagattttgaccaacctatcaatattatatcagattctgcatatgtagtacaggctacaagggatgttgagacagctctaattaaatatagcacggacgatcatttaaaccagctattcaatttattacaacaaactgtaagaaaaagaaatttcccattttatattactcatattcgagcacacactaatttaccagggcctttgactaaagcaaatgaacaagctgacttactggtatcatctgcattcataaaagcacaagaacttcttgctttgactcatgtaaatgcagcaggattaaaaaacaaatttgatgtcacatggaaacaggcaaaagatattgtacaacattgcacccagtgtcaagtcttacacctgtccactcaagaggcaggagttaatcccagaggtctgtgtcctaatgcgttatggcaaatggatggcacgcatgttccttcatttggaagattatcatatgttcatgtaacagttgatacttattcacatttcatatgggcaacttgccaaacaggagaaagtacttcccatgttaaaaaacatttattatcttgttttgctgtaatgggagttccagaaaaaatcaaaactgacaatggaccaggatattgtagtaaagctttccaaaaattcttaagtcagtggaaaatttcacatacaacaggaattccttataattcccaaggacaggccatagttgaaagaactaatagaacactcaaaactcaattagttaaacaaaaagaagggggagacagtaaggagtgtaccactcctcagatgcaacttaatctagcactctatactttaaattttttaaacatttatagaaatcagactactacttctgcaaaacaacatcttactggtaaaaagcacagcccacatgaaggaaaactaatttggtggaaagataataaaaataagacatgggaaatagggaaggtgataacgtgggggagaggttttgcttgtgtttcaccaggagaaaatcagcttcctgtttggatacccactagacatttgaagttctacaatgaacccatcggagatgcaaagaaaagggcctccacagagatggtaaccccagtcacatggatggataatcctatagaagtatatgttaatgatagtgtatgggtacctggccccacagatgatcgctgccctgccaaacctgaggaagaagggatgatgataaatatttccattgtgtatcgttatcctcctatttgcctagggagagcaccaggatgtttaatgcctgcagtccaaaattggttggtagaagtacctactgtcagtcctaacagtagattcacttatcacatggtaagcgggatgtcactcaggccacgggtaaattatttacaagacttttcttatcaaagatcattaaaatttagacctaaagggaaaccttgccccaaggaaattcccaaagaatcaaaaaatacagaagttttagtttgggaagaatgtgtggccaatagtgcggtgatattacaaaacaatgaattcggaactattatagattgggcacctcgaggtcaattctaccacaattgctcaggacaaactcagtcgtgtccaagtgcacaagtgtacccaacagctccgaagagacagcgaccatcgagaacgggccatgatgacgatggcggttttgtcgaaaagaaaagggggaaatgtggggaaaagcaagagagatcagattgttactgtgtctgtgtagaaagaagtggatattttaaggccaaggaaatgtcaaatgacttgccttttgttctggtaaatcagagaaaatgggcctatcacttaatgttaatagcacttggaatgccgactctagagatccccggtcgcggcgagatcatgaaaccagaattaccgcctctccactggactgatacccgtacccccagccaaaacgacacaccgcagtag

SEQ ID NO: 133279 - DNA, 4782 bp, Homo sapiens
gcgaaaaaatcatgaccaagatgggatatataccaggaaagggactagggaaaaatgaagatggcattaaagttccaggggaggctaaaataaatcaagaaagagaaggaatagggtatcctttttaggggcggccactgtagagcctcctaaacccataccactaacttggaaaacagaaaaaccggtgtgggtaaatcagtggccgctaccaaaacaaaaactggaggctttacatttattagcaaatgaacagttagaaaagggtcacattgagccttcgttctcaccttggaattctcctgtgtttgtaattcagaagaaatcaggcaaatggcgtatgttaactgacttaagggccgtaaatgccgtaaacgccgtaattcaacccatggggccttctccaaccccgggttgcccttctccggcccatgatccccaaaaggatgggccctttaattataatggatctaagggattgcttttttacccatccctctggcgggagcaggattgcggaaaaatttgcctttactataccagccataaataataaagaaccagccaccaggtttcagtggaaagtgttacctcagggaatgcttaatagtccaactatttgtcagacttttgtaggtcgagctcttcaaccagttagagacaagttttcagactgttatattattcattatattgatgatattttatgtgctacagaaacgagagataaattaattgactgttatacatttctgcaagcagaggttgccaatgcaggactggcaatagcatctgataagatccaaacctctactccttttcattatttagggatgcagatagaaaatagaaaaattaagccaccaaaaatagaaataagaaaagacacattaaaaacactaaatgattttcaaaaattgctgggagatattaattggattcggccaactctaggcattcctacttatgccatgtcaaatttgttctctatcttaagaggagactcagacttaaatagtaaaagaatgttaaccccagaggcaacaaaagaaattaaattagtggaagaaaaaattcagtcagcgcaaataaatagaatagatcccttagccacactccaacttttgatttttgccactgcacattctccaacaggcatcattattcaaaatactgatcttgtggagtggtcattccttcctcacagtacagttaagacttttacattgtacttggatcaaatggctacattaattggtcagacaagattacgaataataaaattatgtggaaatgacccagacaaaatagttgtccctttaaccaaggaacaagttagacaagcctttatcaattctggtgcatggcagattggtcttgctaattttgtgggaattattgataatcattacccaaaaacaaagatcttccagttcttaaaaatgactacttggattctacctaaaattaccagacgtgaacctttagaaaatgctctaacagtatttactgatggttccagcaatggaaaagcagcttacacagggccgaaagaacgagtaatcaaaactcaatatcaatcggctcaaagagcagaattggttgcagtcattacagtgttgcaagattttgaccaacctatcaatattatatcagattctgcatatgtagtacaagctacaagggatgttgagacagctctaattaaatatagcatggatgatcagttaaaccagctattcaatttattacaacaaactgtaagaaaaagaaatttcccattttatattacacatattcgagcacacactaatttaccagggcctttgactaaagcaaatgaacaagctgacttactggtatcatctgcactcataaaagcacaagaacttcatgctttgactcatgtaaatgcagcaggattaaaaaacaaatttgatgtcacatggaaacaggcaaaagatattgtacaacattgcacccagtgtcaagtcttacacctgcccactcaagaggcaggagttaatcccagaggtctgtgtcctaatgcattatggcaaatggatgtcacgcatgtaccttcatttggaagattatcatatgttcacgtaacagttgatacttattcacatttcatatgggcaacttgccaaacaggagaaagtacttcccatgttaaaaaacatttattgtcttgttttgctgtaatgggagttccagaaaaaatcaaaactgacaatggaccaggatattgtagtaaagctttccaaaaattcttaagtcagtggaaaatttcacatacaacaggaattccttataattcccaaggacaggccatagttgaaagaactaatagaacactcaaaactcaattagttaaacaaaaagaagggggagacagtaaggagtgtaccactcctcagatgcaacttaatctagcactctatactttaaattttttaaacatttatagaaatcagactactacttctgcagaacaacatcttactggtaaaaagaacagcccacatgaaggaaaactaatttggtggaaagataataaaaataagacatgggaaatagggaaggtgataacgtgggggagaggttttgcttgtgtttcaccaggagaaaatcagcttcctgtttggatacccactagacatttgaagttctacaatgaacccatcagagatgcaaagaaaagcacctccgcggagacggagacatcgcaatcgagcaccgttgactcacaagatgaacaaaatggtgacgtcagaagaacagatgaagttgccatccaccaagaaggcagagccgccaacttgggcacaactaaagaagctgacgcagttagctacaaaatatctagagaacacaaaggtgacacaaaccccagagagtatgctgcttgcagccttgatgattgtatcaatggtggtaagtctccctatgcctgcaggagcagctgcagctaactataccaactgggcctatgtgcctttcccgcccttaattcgggcagtcacatggatggataatcctatagaagtatatgttaatgatagtgtatgggtacctggccccatagatgatcgctgccctgccaaacctgaggaagaagggatgatgataaatatttccattgggtatcgttatcctcctatttgcctagggagagcaccaggatgtttaatgcctgcagtccaaaattggttggtagaagtacctactgtcagtcccatcagtagattcacttatcacatggtaagcgggatgtcactcaggccacgggtaaattatttacaagacttttcttatcaaagatcatttaaatttagacctaaagggaaaccttgccccaaggaaattcccaaagaatcaaaaaatacagaagttttagtttgggaagaatgtgtggccaatagtgcggtgatattacaaaacaatgaatttggaactattatagattgggcacctcgaggtcaattctaccacaattgctcaggacaaactcagtcgtgtccaagtgcacaagtgagtccagctgttgatagcgacttaacagaaagtttagacaaacataagcataaaaaattgcagtctttctacccttgggaatggggagaaaaaggaatctctaccccaagaccaaaaataataagtcctgtttctggtcctgaacatccagaattatggaggcttactgtggcctcacaccacattagaatttggtctggaaatcaaactttagaaacaagagatcgtaagccattttatactgtcgacctaaattccagtctaacagttcctttacaaagttgcataaagcccccttatatgctagttgtaggaaatatagttattaaaccagactcccagactataacctgtgaaaattgtagattgcttacttgcattgattcaacttttaattggcaacaccgtattctgctggtgagagcaagagagggcgtgtggatccctgtgtccatggaccgaccgtgggaggcctcaccatccgtccatagttttgactgaagtattaaaaggtgttttaaatagatccaaaagattcatttttactttaattgcagtgattatgggattaattgcagtcacagctacgggtgctgtagcaggagttgcattgcactcttctgttcagtcagtaaactttgttaatgattggcaaaaaaattctacaagattgtggaattcacaatctagtattgatcaaaaattggcaaatcaaattaatgatcttagacaaactgtcatttggatggtgagaccagactcatgagcttagaacatcgtttccagttacaatgtgactggaatacgtcagatttttgtattacaccccaaatttataatgagtctgagcatcactgggacatggttagacgccatctacagggaagagaagataatctcactttagacatttccaaattaaaagaacaaattttcgaagcatcaaaagcccatttaaatttggtgccaggaactgaggcaattgcaggagttgctgatggcctcgcaaatcttaaccctgtcacttgggttaagaccattggaagtactacgattataaatctcatattaatccttgtgtgcctgttttgtctgttgttagtctgcaggtgtacccaacagctccgaagagacagcgaccatcgagaacgggccatgatgacgatggcggttttgtcgaaaagaaaagggggaaatgtggggaaaagcaagagagatcagattgttactgtgtctgtgtag

SEQ ID NO: 133280 - DNA, 2194 bp, Homo sapiens
ttcaatcaagaaaagacctttgatcaggagaagacttctcgtctcatttctggggacacattcaggatttctccaaagcaggtgaaggtacgctcgagcgtggtcattgaggacaagtcgacgagagatcccgagtacatctacagttagccttacggtaagcttgtgcgctcggaagaagctagggtgataatggggcaaactaaaagtaaaattaaaagtaaatatgcctcttatctcagctttattaaaattcttttaaaaagagggggagttaaagtatctacaaaaaaatctaatcaagctatttcaaataatagaacaattttgcccatggtttccagaacaaggaactttagatctaaaagactggaaaagaattggtaaggaactaaaacaagcaggtaggaagggtaatatcattccacttatagtatggaatgattgggccattattaaagcagctttagaaccatttcacacagaagaagatagcgtttcagttcctgacgaccctagaagctgtatagtagattgtaatgataagacaaggaaaaaatcccagaaagaaaccgaaagtttacattgcgaatatgtagcagagccggtaatggctcagtcaacgcaaaatgttgactataatcaattacaggaggtgatatatcctgaaacgttaaaattagaaggaaaaggtccagaattaatggggccatcagagtctaaaccacgaggcacaagtcctcttccagcaggtcaggtgctcgtaagattacaacctcaaaagcaggttaaagaaaataagacccaaccgcaagtagcctatcaatactggccgctggctgaacttcagtatcggccacccccagaaagtcagtatggatatccaggaatgcccccagcaccacagggcagggcgccataccatcagccgcccactaggagacttaatcctatggcaccacctagtagacagggtagtgaattacatgaaattattgataaatcaagaaaggaaggagatactgaggcatggcaattcccagtaacgttagaaccgatgccacctggagaaggagcccaagagggagagcctcccacagttgaggccagatacaagtctttttcgataaaaatgctaaaagatatgaaagagggagtaaaacagtatggacccaactccccttatatgaggacattattagattccattgcttatggacatagactcattccttatgattgggagattctggcaaaatcgtctctctcaccctctcaatttttacaatttaagacttggtggattgatggggtacaagaacaggtccgaagaaatagggctgccaatcctccagttaacatagatgcagatcaactattaggaataggtcaaaattggagtactattagtcaacaagcattaatgcaaaatgaggccattgagcaagttagagctatctgccttagagcctgggaaaaaatccaagacccaggaagtacctgcccctcatttaatacagtaagacaaggttcaaaagagccctaccctgattttgtggcaaggctccaagatgttgctcaaaagtcaattgccgatgaaaaagccggtaaggtcatagtggagttgatggcatatgaaaacgccaatcctgagtgtcaatcagccattaagccattaaaaggaaaggttcctgcaggatcagatgtaatctcagaatatgtaaaagcctgtgatggaatcggaggagctatgcataaagctatgcttatggctcaagcaataacaggagttgttttaggaggacaagttagaacatttggaggaaaatgttataattgtggtcaaattggtcacttaaaaaagaattgcccagtcttaaacaaacagaatataactattcaagcaactacaacaggtagagagccacctgacttatgtccaagatgtaaaaaaggaaaacattgggctagtcaatgtcgttctaaatttgataaaaatgggcaaccattgtcgggaaacgagcaaaggggccagcctcaggccccacaacaaactggggcattcccaattcagccatttgttcctcagggttttcagggacaacaacccccactgtcccaagtgtttcagggaataagccagttaccacaatacaacaattgtccctcaccacaagcggcagtgcagcagtag

SEQ ID NO: 133281 - DNA, 7391 bp, Homo sapiens
aacaaggaactttagatctaaaagattggaaaagaattggtaaggaactaaaacaagcaggtaggaagggtaatatcattccacttacagtatggaatgattgggccattattaaagcagctttagaaccatttcaaacagaagaagatagcatttcagtttctgatgcccctggaagctgtttaatagattgtaatgaaaagacaaggaaaaaatcccagaaagaaacggaaggtttacattgtgaatatgtagcagagccggtaatggctcagtcaacgcaaaatgttgactataatcaattacaggaggtgatatatcctgaaacgttaaaattagaaggaaaaggtcaggtgcccgtaagattacaacctcaaacgcaggttaaagaaaataagacccaaccgccagtagcttatcaatactggccgccggctgaacttcagtatcggccacccccagaaagtcagtatggatatccaggaatgcccccagcaccacagggcagggcgccataccctcagccacccactaggagacttaatcctacggcaccacctagtagacagggtagtgaattacatgaaattattgataaatcaagaaaggaaggagatactgaggcatggcaattcccagtaacgttagaaccgaagccacctggagaaggagcccaagagggagagcctcccacagttgaggccagatacaagtctttttcgataaaaatgctaaaagatatgaaagaaggagtaaaacagtatggacccaactccccttatatgaggacattattagattccattgctcatggacatagactcattccttatgattgggagattctggcaaaatcgtctctctcaccctctcaatttttacaatttaagacttggtggattgatggggtacaagaacaggtccgaagaaatagggctgccaatcctccagttaacatagatgcagatcaactattaggaataggtcaaaattggagtactattagtcaacaagcattaatgcaaaatgaggccattgagcaagttagagctatctgccttagagcctgggaaaaaatccaagacccaggaagtacctgcccctcatttaatacagtaagacaaggttcaaaagagccctatcctgattttgtggcaaggctccaagatgttgctcaaaagtcaattgccgatgaaaaagcccgtaaggtcatagtggagttgatggcatatgaaaacgccaatcctgagtgtcaatcagccattaagccattaaaaggaaaggttcctgcaggatcagatgtaatctcagaatatgtaaaagcctgtgatggaatcggaggagctatgcataaagctatgcttatggctcaagcaataacaggagttgttttaggaggacaagttagaacatttggaggaaaatgttataattgtggtcaaattggtcacttaaaaaagaattgcccagtcttaaacaaacagaatataactattcaagcaactacaacagggttttcagggacaacaacccccactgtcccaagtgtttcagggaataagccagttaccacaatacaacaattgtcccccgccacaagcggcagtgcagcagtagatttatgtactatacaagcagtctctctgcttccaggggagcccccacaaaaaatccccacaggggtatatggccccctgcctgaggggactgtaggactaatcttgggaagatcaagtctaaatctaaaaggagttcaaattcaaattaagtgtgtttgatccagactataaaggcgaaattcagttggttattagcttttcaattccttggagtgtcagtccaggaagacaggagtgctcaatatttactcctgccatatataaagggtggaaatagtgaactaaaaaaaataggagggcttggaagcactgatccaccaggaaaggctgtcatattgggcaaatcaagtctcagaggacagacctgtgtgtaaggccattattcaaggaaaacagtttgaagggttggtagacactggagcagatgtctctatcattgctaaagcaaatcactggccaaaaaattggcctaaacaaaaggctgttacaggacttgtcggcgtaggcacagcctcagaagtgtatcaaagtactgagattttacattgtttagggccagataatcaagaaagtactgttcagccaatgattacttcaattcctcttaatctgtggggtcgagatttattacaacaatggggtgcggaaatcaccatgcccgctccattatatagccccacgagtcaaaaaatcatgaccaagatgggatatataccaggaaagggactaggaataaaatgaagatggcattaaagttccagttgaggctaaaataaatcaagaaagagaaggaataggagcaggattgtgaaaaatttgcctttactataccagccataaataataaagaaccagccaccaggtttcagtggaaagtgttacctcagggaatgcttaatagtccaactatttgtcagacttttgtaggtcgagctcttcaaccagtgagagaaaagttttcagactgttatattattcattatattgatgatattttatgtgctgcagaaacgaaagataaattaattgactgttatacatttctgcaagcagaggttgccaatgctggactggcaatagcatccgataagatccaaacctctactccttttcattatttagggatgcagatagaaaatagaaaaattaagccacaaaaaatagaaataagaaaagacacattaaaaacactaaatgattttcaaaaattactaggagatattaattggattcggccaactctaggcattcctacttatgccatgtcaaatttgttctctatcttaagaggagactcagacttaaatagtcaaagaatattaaccccagaggcaacaaaagaaattaaattagtggaagaaaaaattcagtcagcgcaaataaatagaatagatcccttagccccactccaacttttgatttttgccactgcacattctccaacaggcatcattattcaaaatactgatcttgtggagtggtcattccttcctcacagtacagttaagacttttacattgtacttggatcaaatagctacattaatcggtcagacaagattacgaataacaaaattatgtggaaatgacccagacaaaatagttgtccctttaaccaaggaacaagttagacaagcctttatcaattctggtgcatggcagattggtcttgctaattttgtgggacttattgataatcattacccaaaaacaaagatcttccagttcttaaaattgactacttggattctacctaaaattaccagacgtgaacctttagaaaatgctctaacagtatttactgatggttccagcaatggaaaagcagcttacacagggccgaaagaacgagtaatcaaaactccatatcaatcggctcaaagagacgagttggttgcagtcattacagtgttacaagattttgaccaacctatcaatattatatcagattctgcatatgtagtacaggctacaagggatgttgagacagctctaattaaatatagcatggatgatcagttaaaccagctattcaatttattacaacaaactgtaagaaaaagaaatttcccattttatattacttatattcgagcacacactaatttaccagggcctttgactaaagcaaatgaacaagctgacttactggtatcatctgcactcataaaagcacaagaacttcatgctttgactcatgtaaatgcagcaggattaaaaaacaaatttgatgtcacatggaaacaggcaaaagatattgtacaacattgcacccagtgtcaagtcttacacctgcccactcaagaggcaggagttaatcccagaggtctgtgtcctaatgcattatggcaaatggatgtcacgcatgtaccttcatttggaagattatcatatgttcatgtaacagttgatacttattcacatttcatatgggcaacttgccaaacaggagaaagtacttcccatgttaaaaaacatttattgtcttgttttgctgtaatgggagttccagaaaaaatcaaaactgacaatggaccaggatattgtagtaaagctttccaaaaattcttaagtcagtggaaaatttcacatacaacaggaattccttataattcccaaggacaggccatagttgaaagaactaatagaacactcaaaactcaattagttaaacaaaaagaagggggagacagtaaggagtgtaccactcctcagatgcaacttaatctagcactctatactttaaattttttaaacatttatagaaatcagactactacttctgcagaacaacatcttactggtaaaaagaacagcccacatgaaggaaaactaatttggtggaaagataataaaaataagacatgggaaatagggaaggtgataacgtgggggagaggttttgcttgtgtttcaccaggagaaaatcagcttcctgtttggttacccactagacatttgaagttctacaatgaacccatcggagatgcaaagaaaagggcctccacggagatggtaacaccagtcacatggatggataatcctatagaagtatatgttaatgatagtatatgggtacctggccccatagatgatcgctgccctgccaaacctgaggaagaagggatgatgataaatatttccattgggtatcgttatcctcctatttgcctagggagagcaccaggatgtttaatgcctgcagtccaaaattggttggtagaagtacctactgtcagtcccatcagtagattcacttatcacatggtaagcgggatgtcactcaggccacgggtaaattatttacaagacttttcttatcaaagatcattaaaatttagacctaaagggaaaccttgccccaaggaaattcccaaagaatcaaaaaatacagaagttttagtttgggaagaatgtgtggccaatagtgcggtgatattataaaacaatgaatttggaactattatagattgggcacctcgaggtcaattctaccacaattgctcaggacaaactcagtcgtgtccaagtgcacaagtgagtccagctgttgatagcgacttaacagaaagtttagacaaacataagcataaaaaattgcagtctttctacccttgggaatggggagaaaaaggaatctctaccccaagaccaaaaatagtaagtcctgtttctggtcctgaacatccagaattatggaggcttactgtggcctcacaccacattagaatttggtctggaaatcaaactttagaaacaagagattgtaagccattttatactgtcgacctaaattccagtctaacagttcctttacaaagttgcgtaaagcccccttatatgctagttgtaggaaatatagttattaaaccagactcccagactataaacctgtgaacattgtagattgcttagtagcattgattcaacttttaattggcaacacggtattgtgctggtgagagcaagagagggcgtgtggatccctgtgtccatgggccgaccatgggaggcctcaccatccgtccatattttggctgaagtattaaaaggtgttttaaatagatccaaaagattcatttttactttaattgcagtgattatgggattaattgcagtcacagctacggctgctgtagcaggagttgcattgcactcttctgttcagtcagtaaactttgttaatgattggcaaaagaattctacaagattgtggaattcacaatctagtattgatcaaaaattggcaaatcaaattaatgatcttagacaaactgtcatttggatgggagacagactcatgagcttagaacatcgtttccagttacaatgtgactggaatacgtcagatttttgtattacaccccaaatttataatgagtctgagcatcactgggacatggttagacgccatctacagggaagagaagataatctcactttagacatttccaaattaaaagaacaaattttcgaagcatcaaaagcccatttaaatttggtgccaggaactgaggcaattgcaggagttgctgatggcctcgcaaatcttaaccctgtcacttgggttaagaccattggaagtacatcgattataaatctcatattaatccttgtgtacccaacagctctgaagagacagcgaccatcgagaacgggccatgacaacgatggcggttttgtggaaaagaaaagggggaaatgtggggaaaagcaagagagatcagattgtcactgtgtctgtgtagaaagaatggcagcattagattctcataggagcacaaaccctattgtgaactgcatatgccagggatctaggttgcatgctccttatgagaatttagtgcctgatgatccgtcactatctcctgtcacccctggatgggaccatctagttgcaggaaaacaagctcagggttcccacagattctatattacgttttctgagctgttcaatctttcagacaaccagcttgtgtctgaacatatgccaagccccactcctcaagatggaggaggagctgctgctcccggtggggactccccagtaggccactgggggaagccccacgacccagacagcaggcagggcccccagagacagctcatgcagcagatccgcagccccggggccctcaggcaccgccgcggctgccgccctcgctcagtcccgagcgcgtccaccctggccagccagctgcccccgctgaacctgcgccgggcgctccggctctccgttcgggccccagccaaccccgcgggctcaggctcccagttcctgtcccagcctgcgccggctccagcgcccccggctctccagctgctcttcccgactcctatccttggccgcccccagcgcggaaccgacccgcgaccctaccgccaacatcgcgggtctcgcctctcgcagcctttttggcgtccgcgcctcagcgttgaagccagggcccctcgtgagctcggcgcccagcctgtcaagtcctcttctgcctcagctctcacagcagtgtcttccccgcctgctggtcgccatcgcgccacagccaatgtctcctgttgctgtccgcccccgcgaagcgctgcaagggccagcgcccaacctgtcgctgcggaagaccggggcatagaacctgtcctggtgctgggcaagcgcttccgccccaagtccccgacctgggcaacctggaggagcccagagaatagcgctcaggacccagaggctggacagccagcccgcccgcccgtccctggccacgaggcgccccggacctga

SEQ ID NO: 133282 - DNA, 870 bp, Homo sapiens
ctagaccttgggtagctctgcctctgtggctttgcatggtgaagtctccatggtggctttcacgggtcggagttgggtgcctgtggcttttccagggttagtgttcaagcttccagtggctctaccattctcaggtctggagggtggcggctcccttcccataactctgccagagagtgccctggtgggaactctgtgtgggaactctaaccccacatttcccctcattattgtcctagtggaggtgctctgtgggggctctgcccctgcatcaggcctctgcctgggcacccaggcattccaatacatcctctgaaatctaggagaaagctgccaagactcctttgcttttgtgttctgtgtgcctacaggcttaacaccatgtagaaactgccaaggcttatgggttgcattctccaaagtggcatcctgagcttcacctgggaccctctgagccacagctggagctggtgcagctctgtgtgtattctcgttaatgataaattccaaatttaagtaattcctttgttcctgtatcttgccgtaggtgtttagaatcagccagacttcctcttgaatgctttgttgcttagaaatttcttccgctaggggaacatcacacaccggggatgtgatagttgagtccttccccaaactctccccccccattctccgtggagctggtaaagtggcttccacagtcttacttccaaatgaattatcaaggcaagaaggatgaacttcacgtattgagcccaagttagatctccttatgattataggtttacatggtgttcctaagaatctcttctcagcgtctgcattttcttcattggcagctgcatccactctcaagtcttcagctgtcat

SEQ ID NO: 133283 - DNA, 1413 bp, Homo sapiens
tccccggtgtgtgatgttcccctagcggaagaaatttctaagcaacaaagcattcaagaggaagtctggctgattctaaacacctacggcaagatacaggaacaaaggaattacttaaatttggaatttatcattaacgagaatacacacagaagtttggaaaataagagtttggaaaatttgcagcctagccatgtggtagagaagaaaaaaaaaacattttcaggagaggaattcaagcaagctatagagcaatcacttgctggagagatttgtgtaactaaatggagccaagtgcaaatacccaagaccgtcgaaaaaggcctcaaaggaagcagacggattgacacagaaatagttcgtatattccacagcaatgaccggaattctgaatcttcttttgcaccagaggtggtagaaacaaagacaagcacgggagagacacctgccaagaataccacagctgtcagctgtggtcaccatagaaaccctttagagaaagtaaaggaattttgcagagctgaagataagtgcctgagaaagaagtttgcccataagatgcttcaaaaggcaaggaggaagctcatctatgaaaaagtgaaacactgtcacaaggaatataggcagatgtacagaactgaaattcaaatggcgacgatggcaagaaaagctggcaacttcttcgtacatccaaaacccaaattggcgtttgtcatcaggatcagtgctatcagtggtgtgagccccaagtggaaaaataaacaactttgtcctctaaatcatgtttttggacttggtatgggcgacttgcgggcgtttggcttagccgacgggacagggccttccgggggggagatcactggtatgagggacctacgcggccctctgtcggtgcgcgccccctcggcgggcgtcgctgaaattcccagacatttgattgtatttgaagatgtagttaatgggaagtttctacagacatccaggtgtgagatatctggaagtaagaataaagtttggcagacactgttaaaaaacaaaagagagaggcaaaggcttccaacaggatttggaaggcttgcagatcagagggcgtatggcgaagccaaaaataactgtggccaagtgggtctagtggagactctgtgggaaaggcaccttcttagaattggtgtctacattgccacatcttcccttgcggtgcccactctttcttcaaattacaatggcctggcccatgaccaatcctgctcagacactgtgcaaagaagcactggagcacctgaagcatgggacagagggtactgtgtgggcagaggagcccaaggcatccccatcttcttcctggacagaccccttacctcactgtttgatgaagcaagaggaagcagctctgcttccctacttcatgtctaa

SEQ ID NO: 133284 - DNA, 307 bp, Homo sapiens
acgcgggaaccatggagggtgtagaagagaagaagaaggaggttcctgctgtgccagaaacccttaagaaaaagcgaaggaatttcgcagagctgaagatcaagcgcctgagaaagaagtttgcccaaaagatgcttcgaaaggcaaggaggaagcttatctatgaaaaagcaaagcactatcacaaggaatataggcagatgtacagaactgaaattcgaatggcgaggatggcaagaaaagctggcaacttctatgtacctgcagaacccaaatttggcgtttgtcatcagaatcagaggtatca

SEQ ID NO: 133285 - DNA, 762 bp, Homo sapiens; identical to SEQ ID NO: 115053

SEQ ID NO: 133286 - DNA, 570 bp, Homo sapiens
ttatttttgtgttgttctctgtatttcctgaattagaatgttggcctgccttgctagattggggaagttctcctggattatatcctgcagagtgttttccaacttggttccattctccccatcactttcaggtacaccaatcacacgtagatttggtcttttcacatagtcccatatttcttggaggctttgttcatttctttttattcttttttctctaaacttctcttctcgcttcttttcattcatttcatcttccatcactgataccctttcttccagttgatcgaatcggctactgaggcttgtgcattcgtcatgttcttgtgccctcagctgcaggtctgttggagtttgctggaggtccactccagacactgtttgcctgggtatcagcagcagaggctgcagaacagcagatatgggtgaacagcaaatgttgctgcctgatcgttcctctggaagttttgtctcagaggagtacctggccgtgtgaggtgtcggtctgaccctgtcttctgcgtcgctcatgctgggagctgtagactggagctgttcccattcagccat

SEQ ID NO: 133287 - DNA, 642 bp, Homo sapiens; identical to SEQ ID NO: 115054

SEQ ID NO: 133288 - DNA, 1980 bp, Homo sapiens; identical to SEQ ID NO: 115055

SEQ ID NO: 133289 - DNA, 456 bp, Homo sapiens
tcaatgcaggctcttttccggttccatatgaactttagttttttccaattctgtcattggtagcttgatgtggatggcattgaatatataggttaccttgggcagtatggccattttcacgatattgattcttcctaaccatgagcatggaatgctcttccatttgtttgtgtcctcctttatttcgctgagcagtggtttgtagatctccttgaagaggtccttcacatcctttgtaagttggattcctaggtattttattctctttgaagcaactgtgaatgggagttcactcatgatttggctctctgtttgtctcagctgcaggtctgttggagtttgctggaggtccactccagaccctgtttccctgggtatcaccagcagaggctgcagaacagcaaatattgcagaacagcaaatatcgctgagtgatccttcctctggaagcttcat

SEQ ID NO: 133290 - DNA, 475 bp, Homo sapiens
caatctttgctgttctgcagcctctgctggtgatacccaggcaaacagggtctggagtggaactccaacaaactccagcagacctgaagtgtcatctggggccatggacggagaggggtgggggctaccagtggacccactgactcctggacatcaggatgctctgccatggcaaaggtgttatcatccatgttcttcgtcttcagttcctcctcggcaggcctgcgcctcaccggcttcatgcagctcttcagctgcctggcctcagcctccacgggaccctggcactcgggctgtggctccagctgcggcagctgctgctgctggggcagcccttcggcatcagtgggtgtgggagcgggtgcgatccggagcaggactgtgtagttgcggccgtggttgttggcccagaaagtgccctcaggggtctcatagcgcaccacgaagtcgaggcgcgccccatcgcccgcgccct

SEQ ID NO: 133291 - DNA, 642 bp, Homo sapiens; identical to SEQ ID NO: 115059

SEQ ID NO: 133292 - DNA, 946 bp, Homo sapiens
tcatgcgtcatgtagttctcgtaccatgcttttcagctccatgaggtcatttaagttcttctctatgctgtttattctagttagccatttgtctaatcttttttcaaggtttttagcttctttgtgatgggttcgaacatcctcctttagctctttggtctttgatgatggtgacgtacacatggggttttggtgtgggtgtcctttctgtttgttagttttccttctaacagtcaggaccatcagctgcaggtctgttggagtttgctggaggtccactccagaccctgtttgcctgggtatcaccagcagaggctgcagcacagcaaatattgcagaacgacaaatgttgctgcctgatccttcctctggaagcttcatctcagaggggcacccagctttcagttcaatctcagactgctgtgctagcagtgaccgaggctccgtgggcgtgggaccctctgagctagatgcgggatataatctcctggtgtgccatttgctaagacttctgaagcctacttctatcaattcgtcaaaatcattctccatccagttttgtttccttgctgttgaggagttgtgatcctttggaggagaagaggtgctctggtttttggaattttcagcttttctgctctggtttctccccatctttgtggttttatctacctttggtctttgatgatggtcacctacagatggggttttggtgtggatgtcttttttgttgaggttgatgctattcctttctgtttgttagttttccttttaacagtcaggtccctcagctgcaggtctgttggagtttgctggaggtccactccagaccctgtttgcctgggtatcaccagcggaggctgcagaacagcaaatattgtagaacagcaaatattgctgcctgatcctctctggaagcttcatctcaaggcgcacctggctgtat

SEQ ID NO: 133293 - DNA, 5131 bp, Homo sapiens
tcagagagccttgggccagagttccaggggctctgagagtggctgccaggtgagctgaacagtccaatttccagtggggtcccgcacagatgggacacggcttaggaggaatcctgggctgcaggcattccttggcctggtggtcagatttctggcacttgtagcaagctcctggggaaggaggttctggaggaacgcctggccgctgcggttcaggcgtttggaagttcttgtgtgcggatttgaaattggtgagatgtttcttgggctggtcggtctgaggacctgaggtcgtaggtggatctttctcacggagcaaagagcaggaggacaggggattgatctcccaagggaggtcccccgatccgagtcacggcaccaaatttcatgcgtgtccgtgtgaagagaccaccaaacaagctttgtgtgagcaacatggctgtttatttcacctgggtgcaggtggggtgtttgctcttctggccgcactgcttcggcatttggatacttgggaactttgcaaatacttgcccaagattccagcatttcttgaatcagtggcacaccctgttcatcagcattcattaagcacctagtctctatgagagccaaggattggatctcagaaagtttcacagagaagacattggagcttggtctgttgtttcctgactttttaatgatcgccattctaactggtatgagatggtatctcaatgtggttttgatttgcatttctctgatggccagtgatgatgagcattttttcatgtgccttttggctgtataaatgtcttcttttgagaagtgtctgttcatatccttcacccacttgttgatggggttgtttgttcttttcttgtaaatttgtttgagttctttgtagattctggatattagccctttgtcagatgggtagattgtaaaaattttctcccattctgtaggttgcctgttcactgtgatggtagtttcttttgctgtgcagaagctctttagtttaattagatcccatttgtcaattttggcttttgttgccattgcttttggtgttgtagacatgaagtccttgcccatgcctatgtcctgaatggtattgcctaggttttcttctagggtttttatggttttaggtctaacatttaagtctttaatccatcttgaattaatttttgtataaggtgtaaggaagggatccagtttcagctttctcctacatatggctagccagttttcccagcaccatttattaaatagggaatcatttccccatttcttgtttttgtcaggtttgtcaaagatcagatggttgtagatatgtggcattatttctgagggctccgttctgttccattggtctatatctctgttttggtaccagtaccatgctgttttggttactgtagccttgtagtatagtttgaagtcaggtagtgtgatgcctccagctttgttcctttggcttaggattgacttggcaatgcgggctcttttttggttccatatgaactttaaagtagttttttccaattctgtgaagaaagtcattggtagcttgatggggatggcattaaatctataaattaccttgggcagtatggccattttcacgatattgattcttcctacccatgagcatggaatgttcttccatttgtttgtatcctcttttatttccttgagcagtggtttgtagttctccttgaagagatccttcacatcccttgtaagttggattcctaggtattttattctctttgaagcaattgtgaatgggagttcactcatgatttggctctctgtttgtctgttattggtgtataaaaatgcttgtgatttttgcacattgattttgtatcctgagactttgctgaagttgcttatcagcttatggagattttgggttgagacgatggggttttctcgatatacaatcatgtcatctgcaaacagggacaatttgacttcctcttgtcctaattgaatgccctttatttccttctcctgcctgattgccctggccagaacttccaacactatgttgaataggagtggtgagagagggcacccctgtcttgtgccagttttcaaagggaatgcttccagtttttgcccattcagtatgatattggctgtgggtttgtcatagatagctcttattattttgagatacgtcccatcaatacctaatttattgagagtttttagaatgaagggttgttgaattttgtcaaaggccttttctgcatctattgagataatcatatggtttttgtcattcgttctgtttatatcctggattacgtttattgatttgcatatgttgaacgagccttgcatcccagggatgaagcccacttgatcatggtggataagcttcttgatgtgctgctggattcggtttgccagtattttattgaggatttttgcatcaatattcatcaggggtattggtctaaaattctcttttttggttgtgtctctgccaggctttggtatcaggatgatgctggcctccagctcctccttgtacctctggtggaatttggctatgaatccatctggtcctggactttttttgattggtaagctattaattattgcctcaatttcagagcctgttattggtttattcagagattcaacttcttcctggtttagtcttgggagggtgtatgtgttgaggaatttatccatttcttctagattttctagtttatttgcatagaggtgtttatagtattctctgatggtagtttgtatttctgtgggatcagtggtgatatcccctttatcattttttattgcatctatttgattcttctctcttttcttctttattggtcttgctagtggtctatcaattttgttgatcttttcaaaaaaccagctcctggattcattgattttttgaaggattttttgtgtctctatttccttcagttttgctctgatcttagttatttcttgccttctgctagcttttgaatgtgtttgttcttgcttctctagttcttttaattgtgatgttagggtgtcaattttagatctttcctgctttctcttgtgggcatttagtgctatgaatttccctctacacactgctttgaatgtgtcccagagattctggtatgttgtgtctttgttctcgttggtttcaaataatgtatttatttctgccttcattttgttatgtacccagtagtcattcaggagcaggttgttcagtttccatgtagttgagcggttttgagtgagtttcttaatcctgagttcgagtttgattgcactgtggtctgagagacagtttgttataatttctgttgttttatatttgctgaggagtgctttacttccaactatgtggtcaattttggaataaatgtggtgtagtgctgagaagaatgtatattctgttgatttggggtggagagttctgtagatgtctattaggtccacttggtgcagagctgagttcaaatcctggatatccttgttaactttctgtctcgttgatctgtctaatgttgacagtggggtgttaaagtctcccattattaatgtgtgggagtctaagtctctttgtaggtctctaaggacttgctttatgaatctgggtgctcctgtattgggtgcatatatatttagggtagttagctcttcttgttgaattgatccctttaccatcatgtaatggccttctttgtctcttttgatctttgttggtttaaagtccgttttatcagagactaggattgcaacccctgcctttttttgttttccatttgcttggtagatctccctccatccctttattttgatcctgtgtgtgtctctgcacgtgagatgggtctcctgaatacagcacactgatgggtcttgactctttatccaatttgccagtctgtgtcttttaattggagcatttagcccatttacatttaaggttaatattgttatgtgtgaatttgatcctttggtctttgatgatggtgatgtacagatggggttttggtgtgggatgtcctttctgtttgttagttttccttctaacagtcaggaccctcagctgcaggtctgttggagtttgctggaggtccactccagaccctgtttgcctgggtatcagcagcagaggctgcagaacagcggatattggtgaacagcagatgttgctgcctgatcgttcctctggaagttttgtctcagaggagtagccagccatgtgaggtgtcaatctgccccatatgatgtattctgccatgggataacccttgccaaatgctggtgcagtgctcttggactccccagtctccagagctgtgagccaaatgcactgttctttataaattacccagtctgtggtattctgctccatgttgtaaagttgagggcacaatgggaagtaggacctaagtctccacagctcctcatataatgtactaggcagcgataataatggagtcctcttggggagtatggccattttcacaatattgattcttcttatccatgagcatggaatgttcttccatttgtttgtatcctcttttatttccttgagcagtggtttgtagttctccttgaagaggtccttcacatcccttgtaagctggattcctaggtattttattctctttgaagcaattgtgaatgggagttcactcatgatttggctctctgtttgtctgttattggtgtataagaaagcttgtaatttttgcacattgtttttgtatcctgagactttgctgaagttgcttatcagcttatggagattttgggttgagatgatggggttttctagatatacaatcatgtcatctgcaaacagggacaatttgacttcctcttttcctaattgaatgccctttatttccttctcctgcctgattgccctggccagaacttccaacactatgttgaataggagtggtgagagagggcatccctgtcttgtgccagttttcaaagggaatgcttccagtttttgcccattcagtatgatattggctgtgggtttgtcataaacagctcttattattttgagatacgtcccatcaatacctaatttattgagagtttttagcatgaagggctgttgaattttgtcaaaggcccaaaacagcat

SEQ ID NO: 133294 - DNA, 948 bp, Homo sapiens
atggtcttagaaaaggctagagaagaggtagatccccccagtatgctgattcccccagtaacccagtgtgggcagctgcccaggtcacagtgcccacagccaaccctaagtagaatgttaacactggaggtagggataagcttgggcattattgtgctcatgatttcactctggccagacaccgtaaaggaataccaaagcagagaagccttgagtttcaagaagtacaacaagaacccaggtctgctgaagtttgctggagatccactccagaccctgtttgcctgggtatcaccagcagaggctgcagaacagcagatttctgccctttgtttcctttggaagcttcgtcccagaggggcacccaccagatgccagccactgctttcttatacgaggtgtctgtcagcccctgctggaagctttgtttacaccatgaggggaaaacctcctattcaagcctcagtaatggcagacgcctctccccccaccaagattgagcatcccaggacaacttcagactgctgtgttgccagcaagaatttcaagccagtggatcttagcttgctgtgctccatgggagtgggatctgctgagctagaccactgggctacctggcttcaatcccctttccagggtagtgaacggttctgtcttgctggtgttccaggcaccactggggtatgaaaagaaactcctgcagctagctcggtgtctgcccaaatggctgcccagttttgtgcttgaaacccaggaccctggtggtgtaggcacccaagggaatcctctgggtctgtgggttgcgaagaccatgggaaaagcgtagtatctgtgccggagtgcaccattcctcatggcacagtccctcatggcttcccttggctaggggagggagttcctcaaccccttgcacttcctgggtgaggagatgccccaccctgcatctgc

SEQ ID NO: 133295 - DNA, 1345 bp, Homo sapiens
tcatttttagttattctgatagtttttatgattggctttttgtttgactagaccagatttgactttaatgaaaacctaagtgttaacaaatagacatttcaccaaagcaacctgttatctcttcgcacttagtttgaattcatttttaatcctttaatagtccacagtaatattgtcctaaagagggtacattggattttaattttgctttcaatatgacggctgtcaatgttgccctgattcgtgataccaagtggctgactttagaagtctgtagagaatttcagagaggaacttgctctcgagctgatgcagattgcaagtttgcccatccaccaagagtttgccatgtggaaaatggtcgtgtggtggcctgttttgattctctaaagagtgtgacagctgtccccttcttgttcatggccttgggacttagccgtgaaccagaaacagtccctgcctccatggtgcagacattctcattgggagttggaggaggagcagggtcggtgtaacccgacgagaactgcaagtaccttcaccctcctccacacttaaaaacgcagctggagattaatgggcggaacaatctgattcaacagaagactgccgcagccatgttcgcccagcagatgcagcttatgctccaaaacgctcaaatgtcatcacttggttcttttcctatgactccatcaattccagctaatcctcccatggctttgaatcgcttagataccacatcctggggatgggcctcgttcctgcagaacttgtaccaaatacacctgttctgattcctgggaaacccacctctttgcaattgccagggagctgtttgggcccaaaactgatggcgtttcagataaactgggaggttttgccgaggaattttcagcgtgggaaattgttacccgtggggagaatgattggccgctatggctcaccctactgatgcttccatgattgaaggcgagtgataatactgtgacaatctgcatgggttacatcaaaggcaggaggacagtgggtgtctggggaataaaagccaagagctccaaacagaggattttggatacaaagggcagccaccagggaaatagctttgtgagagggacagactatctgattcccatttgtacaaacatgtccaaagcaaaaggcacagcatttctaaagtggatgcagaaattagtatacaatggcagttctggccagtgcagcccagcatttttctgttgtgcatggaaagaacacagtgaaaaggcaggcagggcatccggtgcaaagtgcaacagacatagacacacaaatccagttttcctgatgagagagggagctatctctt

SEQ ID NO: 133296 - DNA, 707 bp, Homo sapiens
  misc_feature (1)...(707): n = a,t,c or g
atcgagaccctagaccagcgcggnggaanncatcaccgaagcgggagccggccaaaatgaaagtttaatcccctttgtgacttcccgaccgagagcaagaattcgcaaaagggcttttcaatgcacctttcccacattccgaagggaagattattgtccttcccccctctttccccaaagagcctgagaccagaaggtaccaaccgtgccgattcccatgcccccatcccgaaaaggatgattgaaagttccaggttgtaccgtggacacctttaagggtccgccaaattggccaaagtagtccccaggtttacaaggaagaaatatgttatctacattgaacgggctgcagcgggaaaaggcttaatggcacaactgtccaccgtaggcattcaccccagcaagcaggtggttatcactaaggctaaaactgggacaaagacccgcaaaaagatccctccgaaccggaaagcccaatctcgccaagtaggaaaggaaaaagggcaaatacaaggagagaacccattgagaagatgcaggaataaaagtaatacttatataacaagcaaagaaataaaactgtgaaacaaagaggaaaaaaacagaaaaaagatactagaacggaaagccaaatcttgccaaataagaaaaggaaaagggcgaatacaaggaagaaaccatcgggacgatgcgggagtgcggtcttc

SEQ ID NO: 133297 - DNA, 1517 bp, Homo sapiens
tttcgtacggtgaggtcagcttcacattctcaggaactctccttctttgggtctggctgaagttgaggatctcttactctctaggccacggaattaacccgagcaggcatggaggcctctgctctcacctcatcagcagtgaccagtgtggccaaagtggtcagggtggcctctggctctgccgtagttttgcccctgggtgagtgttcctgggaggggctggtgctgggggcgaggaggcggctgggaagggcgggggtcctgtcccgggacccgtgggagagaaaatgggggacacccgcagccttgctgccctgtcctgtcttctcacagcaggcgtccaccctaactttccatcgtgtgggggagcaaatcatgtatatccagtgctgtgagtggctccagtcatggaggagcaaggatgagttctgcctggaagaatctgggaaggcttcatgggtggtcaggggaggaggtggggatgaggggctaagtatgaaccaaggagctagaaatacagcactggaagctggaagcagggggcttggagactgggagctggagtgcgtgtgggcagggtgtggcagcagccggcagaggccatttccccttggcagaacattcaccatgtgaccctgagcatgtctttgaactcctctgagctcctgtttcctctccagagaaaaggcgacccagctcctcttccctgcagttgtggctgtgcccatggtgctcagtgccatgggcttcactgcggcgggaatcgcctcgtcctccatagcagccaagatgatgtccgcggcggccattgccaatgggggtggagttgcctcgggcagccttgtggctactctgcagtcactgggtaagtatcctggcggggcttgcccacagtcctgcccacagagcttccccgacaggcatgtcccactctgtccaccctctgcttcttcccaggagcaactggactctccggattgaccaagttcatcctgggctccattgggtctgccattgcggctgtcattgcgaggttctactagctccctgcccctcgcccaattggagcctgaaccccgcaaaagaaacctgcttgggtaacgccctggacccccataaaggcccacagccagaaatgacatggacaagtggttccacttagcagccccaagaaagctggacattaagttgtcagtaaagagagcagaaagagtcagctttgccctataggaccctgaaggctcagccactagagcagcatgggctttggaggtgggcatgaaggtagattgagagcaggagggctggctggaagtctgcttaagaagcaggaaaaccccaggattccccctccagtagaccactggagagttatctttggagaggttgagtctctggactgctgtttgagcacgtgtgtcctggagggcgccctgttcccattggccctggatggcactctgccctcttctctctgggacctgtaagcaataaactgtttctgttatttcatgcat

SEQ ID NO: 133298 - DNA, 440 bp, Homo sapiens; identical to SEQ ID NO: 125856

SEQ ID NO: 133299 - DNA, 343 bp, Homo sapiens
tcggcacgagccaaggtgctcggtccttccgaggaagctaaggctgcgttggggtgaggccctcacttcatccggcgactagcaccgcgtccggcagcgccagccctacactcgcccgcgccatggcctctgtctccgagctcgcctgcatctactcggccctcattctgcacgacgatgaggtgacagtcacggaggataagatcaatgccctccagctgaggagaagaaagtggaagcaaagaaagaagaatccgaggagtctgatgatgacatgggctttggtctttttgactaaacctcttttataacatgttcaataaaaagctgaactttactgcta

SEQ ID NO: 133300 - DNA, 906 bp, Homo sapiens
  misc_feature (1)...(906): n = a,t,c or g
tttcctcagttgcggccaaggtgctcggtccttccgaagaaggctaaggctgccgttggggtgaggccctcacttcatccggcgaactagcaccgcgttccggcagcgccagcccctacaattcgcccgcgcccatggccctctgtctccgaagctcgccctgcatcctaactcggcccctcattcctgcacgacgatgaggtgacagtcacggaggataagatccaaatgcccctcattaaagcagccggtgtaaatgttgagcctttttggcctgggcttgttttgcaaaggccctgggcaaacgttcaacattggggagcctcattcttgcaatgttagggggcccggtgggacctggctcccagccagctgggtgcttgcaaccagcagggaggttcctgccccccttccacttgttgctggttccagctggagggagaagaaaagtgggaagcaaaggaaaggaagattccgagggagttttgattgattgacatgggctttggtctttttgactaaacctcttttataacatgttcaataaaaaagctgaactttaaaaagnnnnnnnnnnnnnncctgcgggggggggccccctttaaaaaaaacaaattttcccccccggggcgggaaaaataaatttttttttaaggggccccnnnnnnnnnntcacgggccgggttttaaaaaccgggagaagggaaaaacccgggggttccccaaaaaaaagcccttggaaaaaaacanttnnaccgctaaaatccgtctaactctcatacacccccctattaatctcatgaccaatcagcaccaatcacaatcccacaaatccaatatcacctgtcactttcactacacctttactatataaccctactccttaaccactataatatcataccg

SEQ ID NO: 133301 - DNA, 479 bp, Homo sapiens
gagggggcaaagcccagaatggcgtaggagaagagctgttgcttcagagaagggttcctggcataaccaatgatgaggctcccaaacacagttccaatcccagccccagaaccagccaccccaactgtggcagccccagctccaatgaacttggctgctgtgtcgatgtcccttgaaatggcgctggtttggaagctgcggctagagacaagtgaggtaaggggacatgagactgccaagctgctgaggctctcatctgtcagtatctccggtcgtttcagcaccactgcagatagcggacggctcagcagctgtgaggtgctcttgaccaaggagggagtggagacaaacttggagcaggcgaacattttcagggggtgaggagctgtggcaggagagaggatcagctcaggcatcacagcgccgcctgccagggctgtggcggtatccggccggttgctccacctggcgttcgagag

SEQ ID NO: 133302 - DNA, 458 bp, Homo sapiens
gggctgggattggaactgtgtttgggagcctcatcattggttatgccagagtctgactctgtcacccaggctggagtgcaactgtgtaatctcagctcactgcaacctctgcctctcgggttcaagcaattctcctgcctcagcctcccaagtagctgggattacaggaacccttctctgaagcaacagctcttttcctacgccattctgggctttgccctctcggaggccatggggctcttttgtctgatggtagcctttctcatcctctttgccatgtgaaggagccgtctccacctcccatagttctcccgcgtctggttggccccgtgtgttccttttcctatacctccccaggcagcctggggaacgtggttggctcagggtttgacagagaaaagacaaataaatactgtattaataagaaaaaaaaaaaaaaaaaaaaaaaaaaaaggcgg

SEQ ID NO: 133303 - DNA, 15040 bp, Homo sapiens
gagctcagccaaatccatgttgagtttagcaccatcactacccttcgggccttgtactctcacgaaggcactcagccaactgtggaaaagaaatatacacaggagactcaagaaacatcttattaatacagtatttatttgtcttttctctgtcaaaccctgagccaaccacgttccccaggctgcctggggaggtataggaaaaggaacacacggggccaaccagacgcgggagaactatgggaggtggagacggctccttcacatggcaaagaggatgagaaaggctaccatcagacaaaagagccccatggcctccgagagggcaaagcccagaatggcgtaggagaagagctgttgcttcagagaagggttcctggtagaaggagaagagaaaagactgaatttctagttcacacaaagaaaaggataaatatctaagatgggctcagggagaatccccctcttcaagattatctcacataataaagaagcttttagggtaacaccatcatgcccaaattcttgccctgattccccaaaggctctacaggaactgaatgaagggggagcaggcaatctaaaatcctgtaacatggcccaggtataatcatgaccttcactaatggttcacccatctcattaccacaaattaagacctcttggcccagacacttaatatccagggcccaaataggatggaagggtctatctagagcagtgttttcaaactttaagcagaactccaatatagtaaacatctaaaagccaaactgcaatggtacaaaagtagtggggaaattttaacggcttggtctcccctttattctctaagacagtctctggggcataacctcagaatcctaaggatttatggaacaccgctcttctagaagacaagagtaagagggacagattatgttctctcatttcaaatagtcagaagatctggggctttaagaaactacaaatgggctgggtgcggtggctcacacctgtaatcccagcactttgggaggccaaagcaggcggatcacttgaagccagaagttggagaccagcctggccaacatggtgaaaccccgtctctactaaaaatacaaaaattaggccaggcgcggtggctcacgcctgtaatcccagcactttgggaggccgagatgagtagattgcttgaggtcaggagttcgagaccagcctggccaacctggtgaaaccctgtctctaccaaaaatacaaaaattgctgggcgcagtggctcatgtctgtaatcccagcactttgggaggccgaagtgggcagatcacgaggtcaggaaatcgagaccatcctagctaatacggtgacaccctgtctctactaaaaatacaaaaaattagccaggcgtgttggcaggcgcttgtagtcccagctactcaggaggctgaggcaggagaacggcgtgaacccgggaggcagaggatgcagtgatccaagaccgcagccactgtactccagcctgggcgacagagcaagactctgtctcaaaaaaaaaaaagaaagaaaaaaaatacaaaaattagctgggggtagcggtgcgtacctgtaatcccagctacttgggaggctgaggcaagagaattgcttgaacccgagaggcagaggttgcagtgagctgagattacacagttgcactccagcctgggtgacagagtcagactctgtctcaaaaaaataaaataaaataaaataaaaaaataaaaaattagccgggcgtggtggtgggcacctgtaatcccagctacttgggaggctgaggcaggagaatcatttgaacccgggaggcagagattgcagtgggctgagattgtgccactgcacttcagtctgggagacagcgagactcagtctcaaaaaaaaaaaaaaaaaagaagttacaaatggtctatggggtttatgagttgaagtagtatggataaaggactcccagtgttgaaggcccatatataatctgtatttcccttactctgatacctccagaagtcttgatgggtaaggtaaatcgacaccaacatttaacagaatagtgaataaagcagcagtcagacttcttgtttaatacaaattcttaaaaagaactctatttctcaaaagacattaagagaacttcctggtctctagaggattaatttggttttaactgagttatccagagctgggagtactaaacagtcccaggtgtcagaaaccaggggctggctgcagtgccagttttcccaggagtgacagagggaaattcccagagatgggaaaaaatagcagtaaagccactatgttcactgagtctctagaacagggaaggtaaactttttctgtaaagggccacattgtaaataattttaggttttgtgggccgcatatagtctcttttgctttaaaacaaaaatgaagccttttaaaaatgcgaaactatttttttttttgagatggagtttcactcttttgcccaggctggagtgcagtggcgtgatctctactcactgcaacctccgccttcagggttcaagtgattttcctgcctcagcctcctgagtagctgggattacaggcatctgccaccatgcctggctaatttctgtatttttagtagagaaggggtttcaccatgttggccaggctagtctcgaactcctgacctcgtgatccgcccgcctcggcctcccaaagtgctgggattataggcgtaaggcaccacacccggccataaaattatttttagctcaatcatacaaaacctggctatggcccagatttggcccttaggccttagtttgccaacacatgctctagaccaaagctgttcatgaaactttcttcaatgacacaatgatataaacattctaatacatacatacatacacacacatatatatatatatatatatatatatatatatatatatatataaatttttttttttttgatggtctcactctgttgcccagactggaatgcagtggcaccatcttggctcactgtaacctctgtctcccgggttcaagcaattctcctgtctcatcctcccgagtagctgggactacaggcgcccaccacaacgcctggctaatttttgtatttttagcagagacagggtttcaccatattgaccaggctggtctcaaactcctgacgtcaggtgatccactcgccttgacctcccaaagtgcaggattacaggcatgaaccacctcgcccagcctatatttgtttttttcttttttttttttccccaaagtctcactctgtcacctaggctggagtacagtggcatgatctcggctcacagctcactgcaacctccacctcccgggttcaagcgattcttctgcctcagcctcctgaatagctgggattataggtgcacgccccccttacccaggtaatttttgtatttttagtagagatggggtttcgccatgttggccaggctggtctcgaactcctgacctcaagcgattcacctgccctggcctcccaaagtgctgggattagtgagccactgtgcccagccaaacattctatatttgcattgttgaatatggtagcctctagccacatctggctactgagcactcgaaatatggttagcgtgactgaagaactgaaaactgaaactatgtatttttaattaattaaaactaaaattcaggtcaagcgcgggggctcatgcctgtaatcctggcagttagggaggccgaggcaggtggatcacttgaggtcaggagtttgagaccagcctggccaacatggcgaaaccccatctctactaaaaccacaaaaattaggtgggcgtcattgtgtgtgcctgtaatcccagctacttgggaggctgaggcacaagaatcgcttgaacccagaggtagaggtgacagtgagctgagattgcgccactgcactccagcctgggaaacagagcgttactgtctcaaaacaaacaaacaaacaaacaacatgtagctagtggctacagtgtgggatagtatagttctagacccccaaatattttctgacctttggaaagcatatcagataaccagtggagggtccaacttatcttacctggcataacccaatgatgaaggctccccaaacacagtttccaatcccagccccagaaaccagccaccccaacttgtggcaagccccagcttccaattgaactttgggctgctgttgttcgatgttccctttgaaatgggcgctggttttggaagtttgcggttaaggagacaagttgaggttaagggggacatgagactgccaagcttgctgaggctctgtgaaaaagaggcaggtagaaggtaaagttttttgctttggtaacttttgtaccatttaaaaccctttaagctgccaaatcccattgtttctcccccaaacagaaaattgtttaacgccctaaaatgctggcaagtagaaccttttaacgtaggatgtagacttcaaatgcctttaagattcaggtgtggtcaagaagtgtaagactgaggccctagtctattcttgctgccccaaggagatcatcttcctaggactaaatgcttccaactgaagtcagtagactaggccaagtaataccagttagcagcagtgcacaggggcatgtgctgccagtggcaaaagctggagcactatagcatacagcgtattaagtgtcctccatctccacctaaagcccatggccttggccattcatgaattttagcctgtgatgactgtcctcagcattctacctcctggttctggcaggtaaccctccccacccatcacccccaaaaccacagtcccaactccactgtaaggtacctcatctgtcagtatctccggtcgtttcagcaccactgcagatagcggacggctcagcagctgtgaggtgctcttgacctagcaggaatgacatacaggggcaggaaggtcaaggaagactggagaggagtttcagaactatgccacgttgttacatcatcagacaagattttctttcctctcatggcctttccatcttcacatgtacgttagagttttggatcattcttccttttagcaaagtctaaattaaagaaccacaccatttctcttgcttctcagactttgctttaaggaaagaaagtctacttcctttgggccataagggagcatccaaccttgctatatccttttatagctcttgagaacaagaagaaatctaagcctcagaagcatttgcctcactcaacaagggaaatatatacagatgctcctcaacttaccatagggttatgtgccaataaatccatcatactttgaaaaaccatttaatactgctaacctaccaaacaccatagtctggccttcaatgtgctcaaaaagcttacactagcttacattagcttacagttaggtgaaatcacctagcaacacagtacaccgtagagtactggttgtttacccctgtgattgggcaggtgactgggagctgtgggttcctgctgagtattgcaacagagtattgtaccacacattgctagcttgggaaaagataaagattcctaattcgaagtatggtttctttctttctttcttttttttttttgagacggagtcttgctgtatcgccaggctggaatgcagtgtcgtgatctcggctcggctcactacaacctccacctcccaggttcaagcaattctcctgcctcagcctcccaagtagctgggactacaggcgccggcaaccacgcccagctaatttttgtatttttagtagagacaggttttcaccatattggccaggctggttttgaattcctgacctcaggtgatccacccacctcggcttcccaaggtgctgggattacaggcatgagccaccacgcccagcccgaagtatggtttctaatgaatgcatatcatttttgcatcatcataaagttaaaaaaaaaaaatcttaatctaaagttgggggccttctgtatgggtaatggtcagcccacaagaaagaagccagtaactttccctgaacacatccttttggaaaataggaacaaagattcatgctcaaaactcacctccttctggtagccttttctgactaaccccaagccagtgacaccaaaacagacacatggtgattcatagccagggctttaggcatcagataaagtgagattcaaatcttaattctattatcagcagtgtattctcaggataagtcacttaaacctttctaagcctgtattctcatttatgaaatcaaaatatcatctcttggggttgatttgaagagtaaatgagattatgtataccaattagtaaactcagtgagtgctaaggcacatggtaaatgctcaataaatggtactcctttttatttgtgaatgaaccaaccgcctcctctagctactatttcaaaaatttcttccatactgttgtttctgagtcaaatacttttccaatgtgtatttatgtaaattttagcttcctatccaaatttaagtcccagaatgaactccttagctatggctaactcaggacaagatcctacagacagtgcatactcagtccaagttatgtaatctacttatatttaccactctggatggccagcttacacgacatatagtttcaggagtaggaataacttgatcttggtctagattctcatctctattcttctcctaagatggctgggtaagaattaactgggcacagccaggcacggtggctcatgcctataatatcagcaatttaggaggccgaggacggcggatcacctgaggtcaggagttcaagaccagcctgaccaacatggagaaaccctgtctctactcggatcacgaggtcaggagtttgagaccagcccggccaacatggtgtaaccccatctctactaaaaatacaaaaattagctgggtatggtggcaggtgcctgtaaccccagctacttgggagtctgaggcaggtgaactgcttgaacccgggaggcggaggttgtggtggatcgcgccattgcagcctgggcaacaagagcgaaactctgtctcaaaaaaaaaaaaaaaaaaaaaattaactggccgccaagggatatggggcaggagagtatctagcaagcattcactctatcctgttacgcaatcatagcagagggccttccctccccaagaatctttcttacttatttacttatttatttattttttgagacagagtcttgctctgacgcccaggctggagtgcagtggtgcgatcttggctcactgcaacctctacctcctgggttcaagctattctgttgcctcagcctcctgagtagctgggattacaggcgcccgccaccatgcccaactggttttcgtttttttagtagagatggggtttcgccatgttggccaggctggttttgaactcctggcctcaagtgatctgcccgcctggacctcctctcccccagccttgctgtgaagaacaaggtctgatggaaagagagagacaagatgtctctcctttaaaactctcccagaaaagcaggtactcaccaaggagggagtggagacaaacttggagcaggcgaacattttcagggggtgaggagctgtggcaggagagctggaattacagaagcagtattgtaaacgctccttattcactaaactatatccttattagcagaaaaggggccctagaaagcttaactggcccagaaaacagtgactgaccttaagtcattggcagaaatagaattaaaaccctgaagtcatgacttcttccagaaaccccacacagctcccaagatttccttataatgaagtgacttcccctggtctgaacaagtgaacacttgggttcaggtaagacctgttacccatttccatagcctcatgatttgcagttgccacaggaattttcccagagtgtcttttgcctaagttttccttagtttttattcaaaaggaacgcttctcaagacttcatcatctggacctttaaaagttgccgtttaggctgggcacgtggttcacacctgtaatcccagcactttgggaggccgaggcgggcggatcacgaggtcaggagttcgagaccagcctgaccaacatggtgaaaccccacctctactaaaaatacaaaaattagccaggtgtggtagcacgcgcctgtaatcccagctactcaggaggctgaggcaggagaattgcttgaacccaggaggcggaggttgcagtgagacgagaccacgccactgcactccagcctgggtgacagagcgagaccccatctcaaaacaaacaaacaaacaaacaaacaaacaaaaagttgccctttagagtctttgtagttttgggagatatttgttgaaggccaagacactggaaggtctccaacaatctctttgctgatccctggaagtatctgattcctgaaaatacttcaatttcctgtattaataagatgaggaagatcaaggaggaactctgttattagtctatccaaaaggtattagtggctgggcgcagtggctcacgcctgtaatcctagcactttaggaggctgaggcgggtagatcacgaggtcaggagttcgagaccaggctgaccaacatggagaaaccccgtctctactgaaaatacaaaattagtcgggcatggtggtgcatgcctgtaatcccagctactcaggaggctgaggcaggagaattgcttgaatccaggaggcagaggctgcggtgagccaagattgcgccattgtactccagcctgggcaacaagagggaaactgtctcaaaaaaaaaaaaaaaagtattaaattgtgtctccccaagatctaaagaagatctgacaccctataggtatctaagttggtagaagtgaacttacctcaaacagaaggtgagttaaaaacctaaaggcagggtttctccaagtgaagtgagaagcccatctgaactagaattatctgggtggtgtacgtattaaaaaatgcatattcttgggcgcaacttggaccttcctggtcaagatctctgggggagctaggttcagtggctcattcctgtaatcccaacactgagaagctggggcggaaagataacttgaagccaggagtttgagaccagcctgggcaaacatcaagacctcatctctacaaaacataaaattagccaggtgaggtggaagtgcacctgtagtcccagctactccagaagctgaggcaggaggactgcttgaacccaggagctggaggcttcagtgagctatgatcacgccagttgtccagtatgggcaacaacgtgaaaccctgtctataaacaaacaaaaaagatctctgggaataaggctcaagtgccctgtatttcaaacaagtttcccagatgattattaggtatacttaacgcaagagcgtgaccctaaacccagtcttgaaactgtggtagtggtagaggatagacttgaacttggatcttttaagttacatgctttctaatatgtcacaggctgaaatactcagtgaatgcttagggctattaaataccacttcattaaatgaactgaactcagattgtcccaggttaaaacacttctgaatccaacatcttaattgctcttaatttattttttgcccaggctattgtggaactcctggcatcaaaagatcttcccaccttggcctcccagtgttgggattacaggtgtgagccaccacacccagccttaattacttttaagttaatggatgtcttcaactcttgtcctatctagaactctgatttttgcctatatgtaactctaacccaattttgctgccgtactattcaggttttcttgggtcaaaatccaatagttctttaaggcttttagaaaaagaaggggtggttcttttctaagggaattataccttattatcttctttgtaaaatgcagctcttagggggattaagtatgttcatttacaaattaacatacataaagagtttaatgtggtgctggcatataataaacccacaacaaggggtggcaattaagtgatcccaccattggctatctaaccatggcaactctgcaattgttagcctacaacttgggcaaaggcactatccagaatcaggactccaaaatcatcacgggctttttcctcagtgtagatgagtcacaggggtagtaacttaactattcctttccttaaaccttcttttccttgtaacagcagaatctggggaggttaattaatccttcacaggaaagctggcaggcagggtctcatgctggccccactagcttggccttaccccacctttctgggcctgctgcctcaacagaaaccctcatctctagcccaccatttgtgacttttacaacttcaccagcgtgccgggatgcgagaaaggtactggtaaataactagtgattccaaagcaaccagcctctctcttctgccttagctatcccaagccacaacctaacgggaggcgatgttttggctttttttcccacttctaccatgttcaaggtttactttttaaattgaggggtgctgactagagggattggtgactttagacgatccactatctccattgctcggagcacctgaggttctggggcctaaagtctggagatttcagaataaagaaggcacaagtcaggatgagaagagaaagcagagataggaggggagagcctgggggttgtcacaatctgaaagggccagagggcgagaaaagagtgtttgcagggactgggtggaacaggtgaaaagcagcactccaggatctaactttggccagctccaaggtatcctccccctgcgagacatccaagatggcgccaggcccgcgcggttggaggtcaccggcacgcggaagagccaactctaaggctaagggatagcggaagcaagaaagggcgagaggaccagggtgggagcacgcaaggtaagcgcctcaaagcatccgcgcaaggtgaggtgtcccgcgcgcgtgcgcagcgcacagagggctctaggtcccaaggccttacctgctcccactgcagagaagacagagaggggcggagcagcgggaagagcgaaaggaaggctcagcgcatgcgtgacccgggccaacgagtcgctcagccacggatagagtgattgcaacatacaggatcagctcaggcatcacagcgccgcctgccagggctgtggcggtatccggccggttgctccacctggcgttcgagaggagaaactacagggagcgccgactgcagaaatgaggccaactccgcggagtaagccgatccgtaacgtggactgcggtttggtctgtaccgcgtttgggatctcggacttgcgtcccctttccgagcatgcgcagtcgtcacactgccaaaacaaaactcctactcagaattcagtgttaacatacggtcgggattggggttcagtgcctaaaatgcagcaggaggaagatcttgggagtcctgctttctgtcgcgccgggactctggcatcactggatggcaaaccggctccatgggcgaatagtcagcaaaatgccgcagctgcttctggtggcttcgccctttcccccactccccgtttcctcctttccattccggtgataaaccatgagagaagcagcatcagcgagccagaagatagggttaaatatgatccgaatccctctttcctggctcctgggacagtctaggaataacgggcacctgcgacccgctgtaaggttgcgaggtcactccaggcttgcccgagcctctgctcaggtttcaactacgcgagttgggataagcagcgccctcccctcccgcccccatgctctcctgaacgtgggttttctctcccctttcgctcgcccttcccctgatggaaggaggtgggggaggcttcctggccctcatctttcctaggcctccttgtctcccagacaggacctgccctgccctttggaacagggcgacaaggcctatccagttccaaacccctgccgtccctgcatcgtgcttgaacgcagcacgagaaagacgggaaaagctcaccaaaccccataaaaaataaaaaataaaaagaaagccgcggctgtaaataaaggcaaatccgccactctctgaggggccgtttgtcctcccctccttggccccgtccttcccgccgccccctcccggctcccgggccccgcggcgccccggccccgagctcctccatttaatcggatttgggagaaggggaggataaatcacggcagcagctttacggtcccggaggagaggcgagccgcagacaggcacaccccggccggcgataaaaaccgccgctgaaagcccacggagcaatttcccgggaccccgagcgacgccattacaggaatgtaattttgcccggatgaggccccgagtttaattatcctcgcggaggaatttcaatgcggccaatccatcttgcaggcgggcggcagagggatttatatgggcccgttatttcacaccgatcctccatctgcatttttatggccctgagctcctgaaagggaggggaaggagtggggagaaataggagaagcgggcgagaagaggagggtggtagactgcctgtctttcctaaattcgcatttccagctccatcaggattctcacaggttcctctgaaatccccaaatctccagttttagttgttgattgcgccccgagcgggcaggtacgtgggaaatggaactgggatctttgggaatcaatcaacaggtatttatcaagtaccaagtggtgccaggcactgtggagatgctgttaggagaaagacaggctagcaaagacacaagtttatcccctgaggtctccagacatctccattcccaccaaaacggaattcttttaagctgtcagcttcacatcctcagtggcagagaaagtccacagttcttaggagccaccacccccaaacggctgttgcagctgttgcgacaatttagacactcagatatggctaacaatcccagaggaggatcagagaaggggcctgggaggaagctaaagctggctctttccaaaagttgttacagcctgcgatgtttaacactcccttgccctcatagaataatgggttctgcgttcagacaaatctgggttcccaaattgctgtgtgatcttgagctagctgtttaaccccctctaaatctatttcctcctatgtaaattgagaagaataatagtacttatcacacagccaatattgggataatacatatgaagcttttagcaaggtacttggtacccagtaagagttcagtaattgctagcattaaaatcatcatcgtcaccaccaccaccaccaccaccaccatcaccaccatcatcaccatcatcatcactgcttctatagttaagggcattgcaactcaattctgcactgctacctatatggactgtttattgcaaggtccttgagatagtatctcctgaaagagactcaactacactttaaaaacgttttcacctgcataagtcatacaaaacaagttattttacttgctggtgagtggagatctgaggggaggctgagaatcctgggactattactacgaggcttgaagcaagaaatcaaatccgcaagggagcagtgaggctccaaaaaggaggtttgtaaggggaggggtgaatttgaagacagcaaaagatccaagagaagcttagctgagggtcggaggatcttcttaactataggcttggggaagggtccttctttcacttcacaaagggaaaaccggggtccaggaaggaaagggtgtggagacagaactatcctttccaatcagtccctttcttttcctaccagaccatataacaaggttggactgattggccagtttttttaatgactgtgagtggcagattctgactggttggcagcctccctgcccagtggtgacgaagaaatgagattgatctttcctttcttaggattggttaacaaccctcaggggggccacagactcattttaattgactggataggctaagagagaggttcagcttctctcatatagaaattccaagtgtccttttctacaaaggtcaccaaggaagggttttgatttgtttatatatgtttctttggacaagaaaccatagcttagagcagaaaaatcaagatactcatgcaggcatgccacaatgagaaagagccacgaaagaaacaggagtgattttaaaaacgagagagagagagagagagagagagagagagagagagagaccagggcacagagaaatgcgaagaaaaaatattgctagagagaagaggaagggtttaaatggtttgatttccattcctgatggcttaagatgaggatactttatgatgtgttttgctagatgcacatgttgccagcaagtggcatggatagaacagctgtcttcgaggcaggagactggagtctagtcctagccctgctactaaatagttgaataactatgctagttacttcatctctcgaagctttagtttcctcatttggaaaaatcagggagagaagtaggtgatctctaagatttcatccagtgttaactttccaggattttctttctttctgctaaacaggcacttttctgcaagttaaagtggaaactttgcactgccaatactttatacatattgagcttctctatttattagtgattgttaatttcaagctcctgggctgtgatgggctggtgggaactgactgatatattttctacttttccttgctaaatcaattccctaagacatcaggactgtgagacatcggtaaacctccctacttctaaagaaagaaaacagtagatgaaggaagggaaaggatcactggtatccaggcttctgagggaggaatcagtaggagagatggtggcagagggatgaccaaaaacatttttgctggggaagaacttcaccttcctttgaatttgtttattttttaatttattttattttttggagacagggtcttgttctgttacccaggctggggtgcggtgacacgatcatggctcactgcag

SEQ ID NO: 133304 - DNA, 687 bp, Homo sapiens
tcaaacttgcacaaatatagtaaatgaactaacgattttaatcttcagaaccctggatcttgctttccaagtgcctgtcccgccggcgtcgggtctgagcggctccctgtgctcggatggtttgtgggcaaccgctcctttcccccaccgccgcagtccacactcagcgttctggggaagaggctgggtcggaacggagccatcgccgctggagtattcggggcccttttcatcgggtactgcatctacttcgaccgcaaaagactgaagtgaccccaacttaaagatgctgaagctgtccagaaattcttcctggaagagatatagctttggtgaagagatcctagctaaaggtgtagaccacctgacaaatccaagtgctttcttcggtaaccaaaccatttccccctccaaatggattcctttgggcccttccttaggttccaggcctaaggttttttgatagaaagccctcattcctttgggaatccccctttgtttccccatgcccctaaaggggtgactcaacctttccagctgtactcgcattcccagagcagcactgctgcccccttgcttaaaagcacggttgcccccaggaaccaggccagggcagttttgaatctcaggaagaaaaatggtagaaggaggcacagggacaaggcgagagaaggccatcaggatcat

SEQ ID NO: 133305 - DNA, 420 bp, Homo sapiens
ccaaagctgaggccaggggtccccttctcaacaactatgcatgagatgcccttggggcctggtcctcctgttcggcacatgaccacatagatgtctgactcaccagcaccactgatgaaggccttggagccattgaggatgtaatgatctccctgtttcttagcggaggtcagaagagaggcagcatcactcccacttccttctggtcccactctgccatatttggagccatctctcgggcagcaaagtcaaaggccactttttgaaattctttctgctcttcattaagtcccatggaagggtcgatgcaggaggtcaagctccggtggccggtctggacgaggacccggagaccgccgggcaggcagccgaggcgcgccccgaaacgccggcagccgctccacagcatagccgccgcag

SEQ ID NO: 133306 - DNA, 488 bp, Homo sapiens
  misc_feature (1)...(488): n = a,t,c or g
agcacacacaccacatattgggaaggttgtcgtactacaagcgccggacttcttagaaagcatgagcctggagaagaagccttctctaccatagcancttcaaaaaagccaggcatcgcaggactcataaaggtgaatgtacagtttgttcggatgatgaaacgttcaattccctgggctgagctcaatccctatcatcaagctcacaaagctactggtggccccttaaaaaatatggttctcttcactcgccagagattatcaatccagcccctgacccaggaagagtttgattttgttttgagcctggaggaaaaggaaccaagttaactgagatactgctgctggaatgggcgagacattgctgcaaagaagtcaagcttttttcagacaaaaggtgtgagggggcttgcttggtatgcttacctgggcttgtgtacctcagtggtttttgtgtacttttttcaataaaatatcaaagttgaaga

SEQ ID NO: 133307 - DNA, 585 bp, Homo sapiens
gttttgttttttttttttcttcaactttgatattttattgaaaaaagtacacaaaaaccactgaggtacacaagcccaggtaagcataccaagcaagccccctcacaccttttgtctgaaaaaagcttgacttctttgcagcaatgtctcgcccattccagcagcagtatctcagttaacttggttccttttcctccaggctcaaaacaaaatcaaactcttctacaaaaaaaaaaaagggaaaaaggaaggattagtttttaatgtccccttcttgaacaggaaagttgtgccaggcacaggtacatcttacatggtactaaggcgagcagtcattcgttcaaaactatttaccaggtgccaagcactatagagtactgggtaatagtaacaggtaactctggcgagtgaagagaaccatattttttaaggggccaccagtagctttgtgagcttgatgataggatttgagctcagccaggggaatgaaacgtttcatcatccgaacaaactgtacatccacctatgtgacaacagtgtacatgacagaaagacgtgtctaggctgactgtgcccactgtattt

SEQ ID NO: 133308 - DNA, 1306 bp, Homo sapiens
ctactcctgaagcaggcttctagagatcagtatcctcatcacttcattgctaccttctagaatctggtggaccctggagtcccgcacgtactgctgaacagcgtaatccttcaggtagccgtagcccccgtgcatctgcaaggcctggttgcagatggcaaagcattcatctgtagcaaagagcttggccatggagcacaaggccactgcatccttcctctcctcctgcagagccactgctgcattgcggaccatcagccgcgcggccaccagccttgttgccatatcagccagtgtgaattgcaagtactggttactggccagaggctctccaaactgcttccggacattgaggtggtctcgggtgaggatgacagaggcgtgggcagcccccagggagcaggaagcaatattgatcctccctccgttcagtcctctcacggcaatgaggaagccctgcccctcgctcccaattctgttggccacagggacagcacagtcttcgaagatcacagctcgtgttggctgggagttccaccccacctttttctccttcttgccaaagctgaggccaggggtccccttctcaacaactatgcatgagatgcccttggggcctggtcctcctgttcggcacatgaccacatagatgtctgactcaccagcaccactgatgaaggccttggagccattgaggatgtaatgatctccctgtttcttagcggaggtcagaagagaggcagcatcactcccacttcctggttcagtgaggcagtaggaagcaaacttctcccatggtaacagaacggtgggcaaaaatttgtgccctctgttccctcatttcccgaaagctaatcaaatccatcccaggcacacatgttgtggatgccttcatataggctgtggtgctggtgcagcctgttagccaaggcttcaaaaatgacagaggtatcaagacgtgacagcccagacccgcccacatctgtttgtatgtagacccctccgaagcctagctgggctgccttccgcatcacatccactgggaacagctccttctggtcccactctgccatatttggagccatctctcgggcagcaaagtcaaaggccactttttgaaattctttctgctcttcattaagtcccatggaagggtcgatgcaggaggtcaagctccggtggccggtctggacgaggacccggagaccgccgggcaggcagccgaggcgcgccccgaaacgccggcagccgctccacagcatagccgccgcagctccgcgttcagctaagagtctgaacgccttcg

SEQ ID NO: 133309 - DNA, 864 bp, Homo sapiens
ggcacgagcgctgcacagcctgcggcgcaacggaggcggaccgcagtcgagtctgcagagtgttgggtctgtagccagcaaattacttcatcatctagattatccattcagttgatcctaattagcaaggataacaagaatcgtccgcactaaagtcccctgcagcgtgaccatgtcgagaccccggaagaggctggctgggacttctggttcagacaagggactatcaggaaaacgcaccaaaactgagaactcaggtgaggcattagctaaagtggaggactccaaccctcagaagacttcagccactaaaaactgtttgaagaatctaagcagccactggctgatgaagtcagagccagagagccgcctagagaaaggtgtagatgtgaagttcagcattgaggatctcacagcacaggccaaacagacaacatgctgggatggtgttcgtaactaccaggcttcggtaacttccttagagccatgaagctgggagaagaaagccttcttctacccatagcaacttgcaaagaagccaggcatcgcaggactcatgaagatcgtgaaagaggcttacccagaccacacacagttttgagaaaaacaatccccattatgacccatctagcaaagaggacaaccctaagtggtccatgaagagtttgattttgttttgagcctggaggaaaaggaaccaagttaactgagatactgctgctggaatgggcgagacattgctgcaaagaagtcaagcttttttcagacaaaaggtgtgagggggcttgcttggtatgcttacctgggcttgtgtacctccagtggtttttgtgtacttttttcaataaaatatcaaagttgaag

SEQ ID NO: 133310 - DNA, 1180 bp, Homo sapiens
  misc_feature (1)...(1180): n = a,t,c or g
aaggatttccacctccacgctctgcccgaagccgaagaagctcatcgcaccgccgggccgggcgggtctcgcttccatgggacttaatgaagagcagaaagaatttcaaaaagtggcctttgactttgctgcccgagagatggctccaaatatggcagagtgggaccagaaggacaggaaggctgatggaaaagggggagcagtgacccaggaagttcaggcccagctgctggtgaagcacgggcagaagctagtctcccgattccagctcagcagcttttcctacgtggattccgtaaggaccacacagtccaaacaagagcatctccagacagacaagggactatcaggaaaacgcaccaaaactgagaactcaggtgaggcattagctaaagtggaggactccaaccctcagaagacttcagccactaaaaactgtttgaagaatctaagcagccactggctgatgaagtcagagccagagagccgcctagagaaaggtgtagatgtgaagttcagcattgaggatctcaaaggcacagccccaaacagacaacatgctgggatgggtgttcgtaactacccaggctcggaacttccttagagccatgaagctgggagaagaaggccttcttctaccataagcaactgcaaaagagccaggcatcgcaggactcatgaagatcgtgaaaagaggctttacccagaccacacacagtttgagaaaaaacaancccccccattatgacccccatcctagcaaagagggacaacccctaagtggccccatgggtggatggtacagtttggttcgggatgatgaaacgtttccattcccccctggctgagcctcaaatccctatcatcaagctcacaaagcctactggtggcccccttaacaaatatggttctcttcactcgcccagagattatcaatcccagcccctgaccccaggaagagtttgattttgttttgagccctggaggaaaaggaaccaagttaactgagatactgctgctggaatggacgagacattgctgcaaagaagtcaagcttttttcagacaaaaaggtgtgaaaaaagcttgcttggtatgcttacctggggcttgcgtaccctcagtggtttttgtgtacttttttcaataaaatatcaaagttgaagaacaaaaaaaaaaaa

SEQ ID NO: 133311 - DNA, 1055 bp, Homo sapiens
gggtgcgcttacagttcctaaccccgaccctgcgcgcagcccgcactatggcagccccgccgcagctaagggctctgctcgtagtcgtcaacgcactgctgcgcaagcgccgctaccacgctgcgttggccgtgcttaagggcttccggaacggggctgtctatggagccaaaatccggggcccctcacggcgctgggtcatgacctttctcttccgggaatgggcagcctccagggagaagctgtgggccatactgcagggccacatatatccactcctgggaacctgggcacggtttgtgtttcaccttacaagggtcttccgttgccctgcagttccttacattacaagggcaaggacctacccaggcacacgcatttcctggggcgggcctttccttcgggggtatcctgggtgtttgggagaaaacaataaacattcaacagccagatcaaacatgtacctgttgtcaacgcgtccctgtttgccctgaagccgccctggctgtaagaagaaagggcctacatccctgaaaccccaggtgggacccgtttcccgctgcctcactgcggtggtgtgggggctggtgctgtggctctttgagtatcaccgatccaccctgcagccctcgctgcagtcctccatgacctacctctatgaggacagcaatgtatggcacgacatctcagacttcctcgtctataacaagagccgtccctccaattaatgcagccctgaggtgtctggctgtggctcaagatttggccccatgcagaccctcccaaaggatactgccttctcaagatcataggcctcagactccaactggtgttatcccagggttccgtttgctgaagtaaaaacactgattttaaaacccaagtgggtacctttgtatggtggcacaagtggccgaatcaggctgaggaatcctacggcttggttccaactgtgcagctgacttctgtgagactggggccagccacactactctgtaggcctcaggggtcaaggagctcagaggagggccctgaggtctctttacggcgggtat

SEQ ID NO: 133312 - DNA, 852 bp, Homo sapiens; identical to SEQ ID NO: 123497

SEQ ID NO: 133313 - DNA, 1310 bp, Homo sapiens
gggaatctggctgcaggaaaaaccatccaagcgcaagacagagatgctgtgggcatcctcagttccagaactggggaatccatggaaaacctgcagaaaaacttgctgcccaagcagaggaggcgaacgagggaaactttcacaatgtccggagcccttgatgtcctgcaaatgaaggaggaggatgtccttaagttccttgcagcgaggaacccatttggggggcacccaatttttactctccaggggacacggctacttctataaaggaaaaagtgtgggctctcttttatcataaatccaaagagggcccgggaagagccttctgctgccagcccgtcaaattgtgccccataaaaccccttcctgatgtcagtgttatatcctccgggaatactggccaggtttgtggaacagtgagggcctgtgcttgaagtttgctgctgccactggaagccactccaaattgctggccggcttcactcctggaacctttcactaacccagatccaaggcagccttcccgggagccgcggccttcttgtggttacctgacccccaggggctgacccaccagccctctcacggagtgcatcttatgttaacctaccctaccatttgcgctgtggtaacaccagattctcatactgcgatatgtggacattgccatcccatgcaacaacaaggggagctcactcagtgggtttgatgtggtggatgctggctcggggaagtttctgcgccatgcgtggcaccattttcccgtgaacacccatggggaggtcatgcctgatctgtacttctacagagatcctgaagagattgaaaaagaagagcaggctgctgcttaagaagccaggtgaccaaggaggaatttcagggtgaatggactgctcccgctcctgagttccactgctactcagcctgaggttgcagactggtctgaaggtgtacagggtgcccctctggtgccctattcagcaattccccctactgaagactggagctctcagcctgccatggaagactggtctgcagctcccactgctcaggccactgaatggtgtagcaggacgagcctcagacaaaacccctcagacaccgagttaaagaaggaagggctttattcggccaggagcatcagcaagactcatgtctcaaaaaccgagcttcccaatcagggaaccaagaaatgtagcaggacgagccacagacaaaacccctcagtcaccgagttaaagaaggaagggctttatttggccaggagcatcggcaagactcacatctcaaaaacagagctccccgagtga

SEQ ID NO: 133314 - DNA, 2495 bp, Homo sapiens
  misc_feature (1)...(2495): n = a,t,c or g
cacctggtcactctgggccccctacaccctggattggctcctcccaaaggaaggcctcttgtttactcctagatgactcagccttagccacatccgcttaaccctccaatagtccccattccgccagagccagtgtctcctcctctttacaggcctttccttacctccctccatgctgtccacttcctctgtaaagctctcaaccctgtccccttccccctctctcctgggaaagagccctcccatgcctagctgctgctcttagggaccctgtggctaggtgcgcggatggaaatccagccctcaggtcctcgatgatcttgaagtaatggctccagtctctgacctggggtcccttcttctccaagtgctcccggattttgctctccagcctccggttctcggtctccaggctcctcactctgtccaggtggaggaggtgctggcgagtttgaaatttgggagtcttgaccgggcgcagtggctcacgcctgtaatctcagcactttgggaggccgaggcgggtggatcacctgaggtcaggagttcaagaccagcctggccaacatggcaaaaccccatctctactaaaaatacaaaaattagccaggcatggtggtggaccacctgtagtcccagctactcgggagggtgaggctcaagaatcgcttgagcctgggaggtggaggtttgtagtgagctgaaatcgcgtcactgcactccagactggatgagagagtgagattctgcctcaaaaagcaaaaaacaaacaaagctgggcacgggggctcatgcctgtaatcctagcactttgggaggctgaggcgggtggatcacctgaggtccagagttggagaccagcctggccaacatggcgaaaccccgtctctactaaaaatacaaaaattaggtcatcagcaaagcctgagtcctgtcctcttgctctcctccccggacagcatgagccttcaccactcgctccaccttctccactaactacccggtccctgggttctgtccaggcgcccagctatggcgcccggccgcgtcaagcagcgcgaccagcgtcgtatgcaggcgctgggggctctggttcccggatctccgtgtcccgctccaccagcttcaggggcggcactggggtccgggggcctggccaccggcantagcccgggggtcatggcaggaatgggatggcatccagaacgagaaggagaccatgcaaagccctgaacgaccgccttggcctcttaccttggacaagagtgaaggagcctggaagaccggagaacccggaagcttggaagagcaaaattccgggaacactttggaagaaagaagggaccccaggtcaagagactgggagccatttacttcaagatcatccgaggaccttgagggcttcagattctttcgcaaaatacttgttggacaatgccccgcatccgtttctgcaagatttgacaatgccccgtctttgctgcttgattgattttaggagttcaagtattgaggacagagctggcccatgtgcccagtcttgttggagaacgacattccattgggctccgcaaaggtcatttgatgacaccaattatcacaccgacttgcagctgggagacagagattcgaggctcctcaaggagggagctgctctttcaatgaagaaggaaccacgaagaaggaagttaaaggcctacaagcccagattgccagctctgggtttgaccgtggagggtagattgccccaaaatctcaggacctcgcaaaagatcatggcagacatccggggcccaatatgaccgagctggctcggaaagaacccgagaaggaagcttagacaaagtactggtcctcagcagatttgagggagagcaccacagtgggtcacccacacaagtctgcttgaggttggaagcttgctgaagacgacgcttcacagaagctgagacgtaccagtccagtccttggaagatcgaccctggacttccatgagaaaatctgaaaggccagctttggagaacagcccttgaggggaggtggaggcccccctacggcccttacaagattggagccagcttcaaacggggattcctgcttgccacctttggagtcaagagcttggcacaagacaccgcgcacagaggggacagcgcccaggcccccagggagtatgagggcccttgctgaaccatcaagggtcaagcttggaagctgagatctgccaccttacccggccgccttcttggaagattggcgaggactttaatctttggtgattcctttggacgaacgcaactccatgcaaaccatccaaaagaccaccaccccgcccggataagttggattgggcaaagtggtgtcttgagaccaattgacaccaaaagttctgaaggcattaagccagcaagaagcagtggtacccttttggggaagcaggaggccaataaaaagtttcagagttcaaaaaaaaaaaaaagaaaaagaaagttttg

SEQ ID NO: 133315 - DNA, 2110 bp, Homo sapiens
atgacttctcggaaccagctggtgcagaaggtgctgcaggagctgcaggaagcagtggagtgcgaaggcctggagggtctcataggtgcttccttggaggccaagcaggtcctgtcttccttcactctccccacctgccgggagggaggccctggcctccaggtgctggaagtggactcggtggccctgagcctgtatccagaagatgctccacggaacatgctgccgctggtgtgcaagggggagggcagcctgctgttcgaggcggccagcatgctgctgtggggtgacgcacgcctcaaccctgcagctgcgggcccgcaccgtggtagagatgctgctgcacagacactactacctcccgggcatgatcgactccaaagtgatgctgcaggccgtgcgctactccctatgctctgaggagtcccctgagatgaccagcttgccccccgccacgctggaggccatcttcgatgccgacgtcaaggcctcctgtttccccagcagcttctccaacgtgtggcacttgtatgctctcgcctctgtcctccagcggaacatctactccatctaccccatgcgcaacctcaagatccggccctacttcaaccgtgtcatccggccccgccgctgcgaccacgtgccctccacgctgcacatcatgtgggctggccagcccctcaccagccacttcttccgccaccagtactttgcccctgtggtggggctggaagaggtggaggctgaaggtgcccctggcgtggccccagctcttccagccctggccccactctcatcgccggccaagaccctggagctgctcaaccgtgaacctggcctcagctactctcacctctgtgagcgctacagcgtcaccaaaagcaccttctaccgctggcggcggcagtcccaggagcaccggcagaaggttgctgcccgcttctccgccaagcacttcctgcaggacagcttccaccgggggggcgtcgtgccacttcagcagttcctccagcggttcccggagatctcccgctcaacctactatgcctggaagcatgagctgctgggctctggcacctgcccggccttgccccccagggaggtgctgggcatggaggagctagagaagctgccggaggagcaggtggctgaggaggagctggagtgctccgcactggcggtgtcaagccctggaatggtcttaatgcagcgggccaagttgtacctggagcattgcatctccctgaacacactggtaccctatcgctgcttcaaacgcaggttccctggcatctcacggtccacttattataattggcggcgaaaggccctccggaggaaccccagcttcaagccggcaccagccctctctgctgctgggactccccagctagcatctgttggggaaggggctgtaattccttggaagagtgaggcggaagagggggcagggaatgccacaggtgaggaccctcccgcccccggggagctcctgccactaaggatgcccctgtcccgttggcagaggcgtctgcgcagggctgcccgcaggcaggtgctgagtgggcatctccctttctgccgcttccgcctccgctaccccagcctgtcaccttctgccttttgggtctggaagagtcttgctcggggttggcccagaggcctgtccaaacttcaggtgccggtccccaccttgggcaaaggggggcaggaggctgaggagaagcaggagaaggaggctggcagggatgtgacagctgtgatggccccacctgtgggggcttcttcagaagatgtagagggagggccttccagagagggggccctgcaggagggggccacagcccagggccagccccacagtgggcccttgctgagccaacctgtggtggcagcagcgggtggcagggatggccggatgctggtgatggacatgatcgctaccacgaagttcaaggcccaggccaagctgttcttgcagaagcgcttccagtccaagagctttccctcctacaaggagttcagtgccctctttcccctcactgcccgctccacatactacatgtggaagcgagccctctatgacggcctgaccctggtagatggctga

SEQ ID NO: 133316 - DNA, 1464 bp, Homo sapiens
  misc_feature (1)...(1464): n = a,t,c or g
ggagggggaattcccggctgcggtattcgcacgaggacgagttacagctgccgcggctccccgagctgttcggaaactgtagacagttactggaggaagtagaagtggcgacttgaccccgccggtttccgggatagtccaggagaagggtgttcaagggctttggacctccttgaggagggctgccgaaatgttattcccagtccaccttgttcggccgcgaatgtagattttggaaagatttgtcccccacgcacttgattaccttttggggtccaggcttttcaaggagccctcaccatggaaacaagtcaaccccagcaagcgtcttagatcattttgcagcggggctcgagaacactttataaaactacttaacttcagtgccattggttatcatgtggggcagagttttgagcttgcccaaaaccattgaacaactctgctgaaaatcacactgccaattcctccatggcttatcctagtctcgttgctatgggcatctcaaagacaggctaaaatacagagatacaagcagaagaaggagttggagcataggttgtctgcaatgaaatctgctgtggaaagtggtcaagcagatgatgagcgtgttcgtggatattatcttcttcaccttcagaggtggggttgatatcagcttagaagagattgagagcattgaccaggaaataaagatcctgagagaaagagactcttcaagagaggcatcaacttctaactgcatctcgccaggagaggcctccagtgaaaccctttcattctcacttcggaacatggcttcatagccaaagtanctttggagctggttattccaagggctggccaacttatggacggtgagtgagctggtatgaagcaacatcggaaattatggagcacttatccggatcaggggaatatgccaagggcagcaccagagggaatttcagaaaaagcagctcagcaacaggaagatcaagaagaaaaggaggaagaggatgatgaaccaaacaacttccacagagcccgggagtggggatgactggaagtgacacccatccttaggggcctatgggaaccgacagaacatgggctgatcttcccacaacaccacaggactgcaggggtgcaccaacgtcccctgcccaaggaaaaccatgcagtcctcccctccgccggtctcctggcttcagctctgtacaaccgagggcaaagatgctaaatcttgctttgcattcagtaaagtgtcaagtgatttaagtgtgtatttgtacccctagatgatatgaaccagcagtcttgttttggcatcatccctcatcatgttgtattccagcttcttcgagtggaaggaaaagagtgctgagaaatggctctgtataatctatggctatccgaattctctgaaaaaataataaaagtcccctctattatatgagcctgtccagaaaaaaaaaaaaaaaa

SEQ ID NO: 133317 - DNA, 262 bp, Homo sapiens; identical to SEQ ID NO: 112936
  misc_feature (1)...(262): n = a,t,c or g

SEQ ID NO: 133318 - DNA, 1163 bp, Homo sapiens
  misc_feature (1)...(1163): n = a,t,c or g
ctgggcggacagctgaaaatccggcgcgcgcagtctccagccccaatttctacgcgcaccggaagacggaggtcctctttccttgcctaacgcagccattggctcgtggtcccaagaagcatctgaaagcgggtggcagctccaaagcatttggatgctggataaattgacccgtgtgtttgctcctcggtccatccaccgggtccccacaagttgagagtagtgtctctcccgcatcattttccctgaggaacagacttaaggtatgccctggacaggagatgaagtaaagaagattatgcatgcagcgggttcattaaaaatcgatgggcaagggtccgaacttgatataaacctacccctgctgggattcatgggatgtccatcagcatttgacaagaccggggaagagaatttcccgtcttgatctaattgacacccaaggggtccgcttttgctggtacatccgtatttaaccaccctggaggaaggccaagttacaagtttggtgccaaaagtgaggaaagatcctttgtgggccaacaaagagggaatncccctcatctgggttgactcattgatgccccgcaccccatcccgcctaccccccgattccccctcatccaaggtgaaatggataccccattccagattgaatttaagaagacctggccaagattaacctgatttccatccaaagttccgaacactggtaaaccctgtgtatgggtgacctggagggtgcctaaccctagggaagaaattgggtgttgatcaccccaacagagagagggcaccctgggatctttttgaccgttggttcacggtgaaaggatgccaatggccaacaagcttttggccacttcggacttttccaacattttttggttattggcaagggcaacaaaacccatgggatttctctttccccgaggaaagggtatccgccttcaccatttgcttgaagagagagacaaaagactggcgggccaaacagagccagtggggtgaaatggggtccctgggggttgacattgttcagatcttttggtaccgtaattaaaaatattgtaaagtcgagtggcaaagctgttgccattggcatctttcacgtgaaccacgtcaaaagatccagggtgcctctctctgttggtgatcacacc

SEQ ID NO: 133319 - DNA, 298 bp, Homo sapiens
gggtggtggacgccctgccccctcccacagctctggtccccttcaagggtaaagctgctgagatacgtggctgacaggagtattctgtctcctccccactcaggtcaaccagagctggcgcaaagagcgctggtgggaggactgtcgcacctcctacacctgcaaaagcaactggcacaaaggctggaattggacctcagggattaatgagtgtccggccggggccctctgcagcacctttgagtcctacttccccactccagccgccctttgtgaaggcctctggagccactccttc

SEQ ID NO: 133320 - DNA, 558 bp, Homo sapiens
atggcctggcagatgatgcagctgctgcttctggctttggtgactgctgcggggagtgcccagcccaggagtgcgcgggccaggacggacctgctcaatgtctgcatgaacgccaagcaccacaagacacagcccagccccgaggacgagctgtatggccagacccatgatgtgcaaggggtcttgcaggaagaccaagagttggaacatccaaggaaaagcaagtgtgaagtcgggctggcagggaagcatgttctgtgtcagccggcactgggcgtgggccagggtgtgggaggtgggtgggagctcctcaagggccctccccaggaagtgttcctctggatgacctacctggggcagaggagccagaatatggaggagatggctgtggtcaaccagagctggcgcaaagagcgcattctgaacgtgcccctgtgcaaagaggactgtgagcgctggtgggaggactgtcgcacctcctacacctgcaaaagcaactggcacaaaggctggaattggacctcagctccatctgcagtatgcgaccctctcctgtga

SEQ ID NO: 133321 - DNA, 1044 bp, Homo sapiens
aaggaaaagcagcaaaccagatggagaaggaaggccaaaaagataagtagaaagctggaccatgagctccttgagggcagggactgaatggttactatgtccccagggcccagcatgaccttctcctggattcctcatcttccttctgtgacctgtgtctccatcagtttctcctccggcatctttttcttacaggattcttacctcaggaatagatggacatggcctggcagatgatgcagctgctgcttctggctttggtgactgctgcggggagtgcccagcccaggacgtgcgcgggccaaggacggacctgctcaatgtctgcatgaacgccaagcaccacaagacacagcccagccccgaggacgaagctgtatggccagtgcagtccctcggaagaaagaatgcctgctgcacggccagccaccagccaggagctgcacaaggacacctcccgcctgtacaactttaactgggaatcactgtggttaaaaatggaaccccacctgcaaagcgcccactttatccccaggacagctgtctcctatgagtgcctcaccccaaccctggggccctgggatccggcagttcaaccagagctggcgcaaagagcgatttttgaacgttgcccctgtgcaaagaggactgtgagcgctggtgggaggactgtcgcacctcctacacctgcaaaagcaactggcacaaaggctggaattggacctcaaggaataaataagggtcggcccggggccttttgaagcacttttgagtcctacttccccactccagccgccctttgtgaaggcctctggagccactccttcaaggtcagcaactatagtcgagggagcggccgctgcatccagatgtggtttgactcagcccagggcaaccccaatgaggaggtggccaagttctatgctgcggccatgaatgctggggccccgtctcgtgggattattgattcctgatccaagaagggtcctctggggttcttccaacaacctattctaatagacaaatccacatgaaaaaaaaaaa

SEQ ID NO: 133322 - DNA, 2888 bp, Homo sapiens
cccagccagcatgggtcggcgcccagcggcccgcccgagcactccggccgcagaaccagagtgccgccctgaggcctgctgagaacacaacaccctcccgaccgcgccaccgcgaccccctagccgggcgcgtccttgcagggcctgggctgtctccctcccactctcagaaataaggcacacgcctgggcattcgtgggccaacgggccttggctaaaccgtccccacatttgtcagcgccacagcaacatcctcagagtctgagcgaactgcgcccagcgcgggcacggagcctcccaccgccagcaacctgcggccccggagaaggcagcgagcgcagtgacagcgcctcaccgccaccagctcctggaccaccatggccaagaaccgcagggacagaaacagttggggtggattttcggaaaagacatatgaatggagctcagaagaggaggagccagtgaaaaaggcaggaccagtccaagtcctcattgtcaaagatgaccattcctttgagttagatgaaactgcattaaatcggatccttctctcggaggctgtcagagacaaggaggttgttgctgtatctgttgctggagcatttagaaaaggaaaatcattcctgatggacttcatgttgagatacatgtacaaccaggaatcagttgattgggttggagactacaatgaaccattgactggtttttcatggagaggtggatctgaacgagagaccacaggaattcagatatggagtgaaatcttccttatcaataaacctgatggtaaaaaggttgcagtgttattgatggatactcagggaacctttgatagtcagtcaactttgagagattcagccacagtatttgcccttaggcacaatgatccagcttcaatacaggtatataacttatcccaaaatgtccagggaggatgatcttcaggcacctccagcttttcacttgagtatgggcaggactgggcaatgggagggaaacatttcctggaagccattttcaggagtctggattatttctttgttcgagactgggagtttcccatacgaattttcatatggagccgatggtggtgccaaattcttggaaaaacgcctcaaggtctcagggaaccagcatgaagaactacagaacgtcagaaaacacatccattcctgtttcaccaacatttcctgttttctgctacctcatcctgggcttaaaagtagctaccaatccaaactttgatgggaaaattgaaagaaatagatgatgaatttcatcaaaaactttgaaaatacttgattccttgggcttactttaggtcccgaggagcctaggatatttaaaggagatccaatgggggattaaaaattcacctggccggggtctggtggagtacttcaaggcttatataaagatctatcaaggtgaagaattaccacatcccaaatccatgttacaggccacagcagaagctaacaatttagcagccgtggcaactgccaaggacacatacaacaaaaaaatggaagagatttgtggtggtgacaaaccatttctggccccaaatgacttgcagaccaaacacctggcaacttaaggaaggaatctgtggaagctattccgaggggtgaagaaaatgggtggggaagaatttagccggcgttacctgcagcagttggagagtgaaatagatgaactttacatccaatatatcaagccacaatgatagcaaaaaataccttcccatgcagctcgtacccccagcccacactgttttgtagtcatcctttaatcacatatgtgattgctggtgtgactggattcattggtttggacatcatagctagcctatgcaatatgataatgggactgacccttatcaccctgtgcacttgggcatatatccggtactctggagaataccgagagctgggagctgtaataggacccaggtggctgcagctctgtgggaccagggaagtacaaatgaggccttggaacaagctttaccagtgccagcaggcaacccccacagacatcctgtatccatccaagcctttccccctacacccaaaggtcgggaatcttactgaacaaatccagaaaaggaaaaaaatggtaatgccaaaattttaagaaataccaggtgccatgacccaattgtccaattaaatattccagttttatgtcctcccatgcaaacattccaaagtgccttcccatcagaacaggagtaaaatacctaaacaccctctgaagactgcaaactggattagttccttttacttcagtgtttaataagcagatgtatgtatgcatggttatactattttgttaacatgtacaatttcctgatttttcttcaaaaatgctgttataaagtatttgtctatttatgataacagtacacggtgttctgcttgaatttacataaattcatacatactgggttataattaaatcatgtgatattccacgtttggatatgctcatttaatttctacagaaaaaattctaaattatttcacattagcccatttgttaaaacacagccatccataacctcagcaggctggatttaatctgtatcatccctatatatatcacaatccttatttttaagcacattttagagttcccttagttgcctttatgcaaaaaccagatattgcttttacatggtttaatagaatataaacctcttgataaaaaatgcacaaaaaatcactttgtatatgtgagtttcactgcattgtatattttttcatttggtacacaaagaatgtattcttcataggtttattcttttaatatgtgaactattattaaagtttactctggttcctaagattaaaaacaaatgcttactgaatttgaaaaaaaaa

SEQ ID NO: 133323 - DNA, 591 bp, Homo sapiens
ttatttaggaagctgcattaactccttacgtccacttagggaacacacatcaaatgcctctgctacattaagttctccattgtggagtagtagactggtttcatctcggtagtcggggtcagttaccccagcaaacactgtaactcccttcttagcctgttgacttagaggtaggaggagcccagagtggccaggtagcaatcttaacttccagtttaatggaattgttgttgtgtctcgtggtggcagcattcctccctctggaattaagacctctaggccagcagaacgtaatgtcatgggaacaggaagcaaaaattcttctagtaggttactaggggtgatggtgagtggtgccacttccacttccaccacttgattcctggacctgtgaatcctggcttcgatcacacatcctgactggggaatctgaaaatccagatcacaagaggatttaaccttacaccagtgatttgccagagggtcctgggccttgggccacagactgaaggctgcattgtcggcttccctacttttgaggttttggaactcggactggcttccttgctcctcagcttgcagatggcccat

SEQ ID NO: 133324 - DNA, 4325 bp, Homo sapiens
atggctgaaaggggccaacataaagcttgggctgtggcttcagagggtggaagccccaagctttggcagtttccatgtggtgttgagcctgcaggtgcacagaagtctagaattgaggtttgggaacctccttctagatttcagaagatgtacggaaatgcctggatgcccaggaagaagtttgctgcaggggtggtgccctcatggagaacctctgctagggcagtgcagaaggcaaatgtggggttggagccccaacacacagtccctactggggtaccgcctagtggagctgtgagaagaggaccaccgtcctccagaccccagaatggcagatccactgacagcttgcactgtgaacctggaaaagccacagacactcaatgccagcccgtgaaagcagccaggaagaaggctgtaccctgcaaagccacaggggtggagctgcccaaggctttgggaacccacctcttgcatcagcaccttgcacttctccttgctgctgccatgtgaagaaggatgtgtttgcttcctcttctgccatgattgtgcatgtaggctggcaacagatcagtatctccctgggatggagcttccagaggaaggatctggctgttatctttgctgtttcatggccttcactggtgatactttcaggatttttaaacttgacctgctttcatttgaacacctgcaagcatgcgttactaaactatctctataagtatggacgaattttgaatagtcacagtgattataaacaaaagaagaaaacagtgagaatcagtcagagagaaagtgttgtgcgggttaatacaacaaactgtcacaagtgtttgttgtccgggacgtacattttcgcggtcctgctagtatgcgtggtgttccactctggcgcccaggagaaaaactacaccatccgagaagaaattccagaaaacgtcctgataggcaacttgttgaaagaccttaacttgtcgctgattccaaacaagtccttgacaactactatgcagttcaagctagtgtacaagaccggagatgtgccactgattcgaattgaagaggatactggtgagatcttcactaccggcgctcgcattgatcgtgagaaattatgtgctggtatcccaagggatgagcattgcttttatgaagtggaggttgccattttgccggatgaaatatttagactggttaagatacgttttctgatagaagatataaatgataatgcaccattgttcccagcaacagttatcaacatatcaattccagagaactcggctataaactctaaatatactctcccagcggctgttgatcctgacgtaggcataaacggagttcaaaactacgaactaattaagagtcaaaacatttttggcctcgatgtcattgaaacaccaggaggagacaagatgccacaactgattgttcaaaaggagttagatagggaagagaaggatacctacgtgatgaaagtaaaggttgaagatggtggctttcctcaaagatccagtactgctattttgcaagtgagtgttactgatacaaatgacaaccacccagtctttaaggagacagagattgaagtcagtataccagaaaatgctcctgtaggcacttcagtgacacagctccatgccacagatgctgacataggtgaaaatgccaagatccacttctctttcagcaatctagtctccaacattgccaggagattatttcacctcaatgccaccactggacttatcacaatcaaagaaccactggatagggaagaaacaccaaaccacaagttactggttttggcaagtgatggtggattgatgccagcaagagcaatggtgctggtaaatgttacagatgtcaatgataatgtcccatccattgacataagatacatcgtcaatcctgtcaatgacacagttgttctttcagaaaatattccactcaacaccaaaattgctctcataactgtgacggataaggatgcggaccataatggcagggtgacatgcttcacagatcatgaaatccctttcagattaaggccagtattcagtaatcagttcctcctgggggacttgcagcatatcttggacttatggaggtccacaaaaggaatatgccattaaattactgggctggcagatgctggggcaaacctcctttgaatcagtcagcaatgctcttcatcaaagtgaaagatgaaaatgacaatgctccagttttcacccagtctttcgtaactgtttctattcctgagaataactctcctggcatccagttgacgaaagtaagtgcaatggatgcagacagtgggcctaatgctaagatcaattacctgctaggccctgatgctccacctgaattcagcctggattgtcgtacaggcatgctgactgtagtgaagaaactagatagagaaaaagaggataaatatttattcacaattctggcaaaagataacggggtaccacccttaaccagcaatgtcacagtctttgtaagcattattgatcagaatgacaatagcccagttttcactcacaatgaatacaacttctatgtcccagaaaaccttccaaggcatggtacagtaggactaatcactgtaactgatcctgattatggagacaattctgcagttacgctctccattttagatgagaatgatgacttcaccattgattcacaaactggtgtcatccgaccaaatatttcatttgatagagaaaaacaagaatcttacactttctatgtaaaggctgaggatggtggtagagtatcacgttcttcaagtgccaaagtaaccataaatgtggttgatgtcaatgacaacaaaccagttttcattgtccctccttccaactgttcttatgaattggttctaccgtccactaatccaggcacagtggtctttcaggtaattgctgttgacaatgacactggcatgaatgcagaggttcgttacagcattgtaggaggaaacacaagagatctgtttgcaatcgaccaagaaacaggcaacataacattgatggagaaatgtgatgttacagaccttggtttacacagagtgttggtcaaagctaatgacttaggacagcctgattctctcttcagtgttgtaattgtcaatctgttcgtgaatgagtcggtgaccaatgctacacctgattaatgaactggtgccgcaaaagcatttgaagcaccagtgaccccaaatacttgagatagctgatgtatcctcaccaactagtgactatgtcaagatcctggttgcagctgttgctggcaccataactgtcgttgtagttattttcatcactgctgtagtaagatgtcgccaggcaccacaccttaaggctgctcagaaaaacatgcagaattctgaatgggctaccccaaacccagaaaacaggcagatgataatgatgaagaaaaagaaaaagaagaagaagcattcccctaagaacctgctgcttaatgttgtcactattgaagaaactaaggcagatgatgttgacagtgatggaaacagagtcacactagaccttcctattgatctagaagagcaaacaatgggaaagtacaattgggtaactacacctactactttcaagcctgacagccctgatttggcccgacactacaaatctgcctctccacagcctgccttccaaattcagcctgaaactcccctgaatttgaagcaccacatcatccaagaactgcctctcgataacacctttgtggcctgtgactctatctccaattgttcctcaagcagttcagatccctacagcgtttctgactgtggctatccagtgacaaccttcgaggtacctgtgtccgtacacaccagaccgcctgttgacttagaggtaggaggagcccagagtggccaggtagcaatcttaacttccagtttaatggaattgttgttgtgtctcatggtggcagcattcctccctctggagttaagacctctaggccagcagaacgtaatgtcatgggaacaggaagcaaaaattcttctagtaggttactggggtgatggtgagtggtgccacttccacttccaccacttgattcctggacctgtgaatcctggctatgagaggaagcagtaccatatattggacagtgattcagaggatacacagccttctggagaactttgccccatccctgtaaggccattcacaattctatcaatccagctgcttcaggatgatggggaacactgtggaactaaacaaggctttcaacctgctgtacaattaggtttgctccctcataaaacactgaaatga

SEQ ID NO: 133325 - DNA, 723 bp, Homo sapiens
ccttccgctctcttcctcggcgctgcctaccgaggtggcagccatcttcctttctcgggcatcatggcccgcccttcagacccccttgtgaagccccaaagatcgtcaaaaaagagaacccaagaaagttcatccgggcacccagtcagaccggatatgtcaaaattaagcgttaactgggcggaaaaccccagaggccattgacaacaagggttcgttagaagattccaagggccagatcttgatgccccaacattggttatggaagcaacaaaaaaaacaaagcacatgcatgcccagtggcttccggaagttcctggttcaacaacgtcaaggagccggaaattgctgcggatgttgcaacaaatcttactgtgccgagatcgctcacgatgtttcctccaagaaaccgcaaagccattcgtgggaaaggagcttgcccaattgggcccttcaggagttcacccaaccccattgccagggttgcgcagttgaaagaaaattgagtaaggcagctcatgtgcaacaaatcttactgtgccgagatcgctcacaatgtttcctccaagaaccgcaaagccatcgtggaaagagctgcccaactggccatcagagtcaccaaccccaatgccagggcgcagtgaagaaaatgagtaggcagctcatttgcacgttttctgtttaaataaatgtaaaaactgcaaaaaaaaaaaaaaaaaaaaa

SEQ ID NO: 133326 - DNA, 484 bp, Homo sapiens
tttcacactacaatagttaattttatttgttcaagagctcagattgcaagcattaaaccaagcataggctttgattctgtgagcccaaattcacatattgaagaagatcaaagcaaactgtgatccatgtacatggatgaaaactaaaggctcgagttaatcacattgtagtttttaaatttctacagcctatgtcccacagggtatctgcacttttcttgagctgagcaacctcatcatcctttagcttctggttgataacgctggttaatccaatagcccagttggtatatccttttagcttgatgacttcataggcactttcaaccaccatcttatgcacttccttccaattttcactatcattggcagttcccatttctggattcaattcctggagagaaacacctgccacattcacaccactccacacagccacacttgagtcgccatgttcccccaaaatccatccatggcagctgct

SEQ ID NO: 133327 - DNA, 927 bp, Homo sapiens
atgtgcgaactcgatattttacacgactctctttaccaattctgccccgaattacacttaaaacgactcaacagcttaacgttggcttgccacgcattacttgactgtaaaactctcactcttaccgaacttggccgtaacctgccaaccaaagcgagaacaaaacataacatcaaacgaatcgaccgattgttaggtaatcgtcacctccacaaagagcgactcgctgtataccgttggcatgctagctttatctgttcgggcaatacgatgcccattgtacttgttgactggtctgatattcgtgagcaaaaacgacttatggtattgcgagcttcagtcgcactacacggtcgttctgttactctttatgagaaagcgttcccgctttcagagcaatgttcaaagaaagctcatgaccaatttctagccgaccttgcgagcattctaccgagtaacaccacaccgctcattgtcagtgatgctggctttaaagtgccatggtataaatccgttgagaaactgggttggtactggttaattcaagccgaaaaaatcagcgctcgacacggactcattgtcaccacccgtcacctaaaatctactcagcgttcggcaaaggagccatgggttctagcaactaacttacctgttgaaattcgaacacccaaacaacttgttaatatctattcgaagcgaatgcagattgaagaaaccttccgagacttgaaaagtcctgcctacggactaggcctacgccatagccgaacgagcagctcagagcgttttgatatcatgctgctaatcgccctgatgcttcaactaacatgttggcttgcggcgttcatgctcagaaacaaggttgggacaagcacttccaggctaacacagtcagaaatcgaaacgtactctcaacagttcgcttag

SEQ ID NO: 133328 - DNA, 1611 bp, Homo sapiens; identical to SEQ ID NO: 116326

SEQ ID NO: 133329 - DNA, 222 bp, Homo sapiens
cacactacaatagttaattttatttgttcaagagctcagattgcaagcattaaaccaagcataggctttgattctgtgagcccaaattcacatattgaagaagatcaaagcaaactgtgatccatgtacatggatgaaaactacaatgtgattaactcgagcctttagttttcatccatgtacatggatcacagtctgctttgatcttcttcaatatgtgag

SEQ ID NO: 133330 - DNA, 1174 bp, Homo sapiens
atgtgcgaactcgatattttacacgactctctttaccaattctgccccgaattacacttaaaacgactcaacagcttaacgttggcttgccacgcattacttgactgtaaaactctcactcttaccgaacttggccgtaacctgccaaccaaagcgagaacaaaacataacatcaaacgaatcgaccgattgttaggtaatcgtcacctccacaaagagcgactcgctgtataccgttggcatgctagctttatctgttcgggcaatacgatgcccattgtacttgttgactggtctgatattcgtgagcaaaaacggcttatggtattgcgagcttcagtcgcactacacggtcgttctgttactctttatgagaaagcgttcccgctttcagagcaatgttcaaagaaagctcatgaccaatttctagccgaccttgcgagcattctaccgagtaacaccacaccgctcattgtcagtgatgctggctttaaagtgccatggtataaatccgttgagaagctgggttggtactggttaagtcgagtaagaggaaaagtacaatatgcagacctaggagcggaaaactggaaacctatcagcaacttacatgatatgtcatctagtcactcaaagactttaggctataagaggctgactaaaagcaatccaatctcatgccaaattctattgtataaatctcgctctaaaggccgaaaaaatcagcgctcgacacggactcattgtcaccacccgtcacctaaaatctactcagcgtcggcaaaggagccatgggttctagcaactaacttacctgttgaaattcgaacacccaaacaacttgttaatatctattcgaagcgaatgcagattgaagaaaccttccgagacttgaaaagtcctgcctacggactaggcctacgccatagccgaacgagcagctcagagcgttttgatatcatgctgctaatcgccctgatgcttcaactaacatgttggcttgcgggcgttcatgctcagaaacaagcgtttccagattgcgattcatccgctgttcatcgccttcggtattgcaaaggacgagactataaccgcgttcgaagcagctgcgttcaacgccacgcaccagttctgaatagaaagattggtactggcagtgatcaacatgccaatg

SEQ ID NO: 133331 - DNA, 2415 bp, Homo sapiens
tcataatttccccaaagcgtaaccatgtgtgaataaattttgagctagtagggttgcagccacgagtaagtcttcccttgttattgtgtagccagaatgccgcaaaacttccatgcctaagcgaactgttgagagtacgtttcgatttctgactgtgttagcctggaagtgcttgtcccaaccttgtttctgagcatgaacgcccgcaagccaacatgttagttgaagcatcagggcgattagcagcatgatatcaaaacgctctgagctgctcgttcggctatggcgtaggcctagtccgtaggcaggacttttcaagtctcggaaggtttcttcaatctgcattcgcttcgaatagatattaacaagttgtttgggtgttcgaatttcaacaggtaagttagttgctagaatccatggctcctttgccgacgctgagtagattttaggtgacgggtggtgacaatgagtccgtgtcgagcgctgattttttcggcctttagagcgagatttatacaatagaatttggcatgagattggattgcttttagtcagcctcttatagcctaaagtctttgagtgactagatgacatatcatgtaagttgctgataggtttccagttttccgctcctaggtctgcatattgtacttttcctcttactcgacttaaccagtaccaacccagcttctcaacggatttataccatggcactttaaagccagcatcactgacaatgagcggtgtggtgttactcggtagaatgctcgcaaggtcggctagaaattggtcatgagctttctttgaacattgctctgaaagcgggaacgctttctcataaagagtaccagaacgaccgtgtagtgcgactgaagctcgcaataccataagccggttttgctcacggatatcaaaacagtccaccagttccatgggcatcgtattgccccaaccgaataagcacccttccatgtcatctttctgtggttttaaatgacattctctgggtttccagaaagataatttacatttctccagagacacattgagcaccagttttcctgtagaggtgcagatggagctacatttgaattggctggtgaagacggtaggagagaaaagcatggggcacagatggaagcgattggcccgggggattgaaaactccccaaaaactgctcggagaaatttcagagcgtggagcaccgcggctcggaccgtaccgtgaacgcgagccagccgcgagctccctgccccaacatcccacccactcccgtgcctttgctggccctttgtcccaggctctggaaaagtaagttgggccactaaccggctgggcagcatggctttcttccccctaggagctgaccggccgcggactccgagggaggacattggcttttgtttcaaaaccgagcccagctgctgactaagggctgcattagcccagcctcctcctccctgggcggctgcacgtgctggctggctcctccactctgggttaccttcctccgcgacttggcgggaggggtccccccagggggcgtagggacgcaccgcgtggggtcgggtgctttggaacgccaaagtgtatttacgttgtgggccgtcgcgtaacacgaggacaatatgctgccagctggagttgcttgcgctatccgggtcgtgctcgcgtcttccgggtccctgtagctcacactctgtgcttaacgcgtctgtgacattctctctctgctcgtgtgatcctttcgccacaaagcgcatccaatctctgaccactccaattaccataaccaccctctgcttcccatgaacttgcgccaacgcggatccttgaggccccgtggtgaagacaatctgggctggacgtgccacactggggtcttctgaaagtaggcgcagcatctgcagctcctcatgcccggccacgggtccagcggttacggggtcaagggccaaagcggcaaatgctatacgtggcataacggtgtaagcggcaaatgccgccacgaaggcagcaccaaacaccatatagccggtaaaacggcgtagtggtcgatcgcggtagaagcgcaatggggccgtaaggcgagcgaacgggagacggggtggaccgggcgttgcgcacagtacagccgaactaggtgcgatgaaccgcgttacgcgagcgcaggagaggtaaaccgcgcctaaagagagtgaatgaacgcgggacgaactgtccggtctaatagcgctccccacatcctcgcgttctactcggcgcgcgagtggttccgacgttttcatgcccggcatttcactgtctcctagatatacgtcggcgttaagcggcgatcctgtcacggtatccatcttagaagagcttgaagatttggtgagaggcacggaagcttcatgcttctccatccccat

SEQ ID NO: 133332 - DNA, 1295 bp, Homo sapiens
cttttctttttcctccttcgtgcagctgggtcttcatcctcattgtactcccttggcatcctagaagagacgagaaattcactgatagcaaaatattgccacagccccagaaaccccaagaagtctccttgaggatttttagaaagacctagaatactgatcaaagtaacactttcaatcaagcagaaatccacatcaatatttgtaggtgggcagttctcaaagtttcgatttctgactgtgttagcctggaagtgcttgtcccaaccttgtttctgagcatgaacgcccgcaagccaacatgttagttgaagcatcagggcgattagcagcatgatatcaaaacgctctgagctgctcgttcggctatggcgtaggcctagtccgtaggcaggacttttcaagtctcggaaggtttcttcaatctgcattcgcttcgaatagatattaacaagttgtttgggtgttcgaatttcaacaggtaagttagttgctagaacccatggctcctttgccgacgctgagtagattttaggtgacgggtggtgacaatgagtccgtgtcgagcgctgattttttcggcctttagagcgagatttatacaatagaatttggcatgagattggattgcttttagtcagcctcttatagcctaaagtctttgagtgactagatgacatatcatgtaagttgctgataggtttccagttttccgctcctaggtctgcatattgtacttttcctcttactcgacttaaccagtaccaacccagcttctcaacggatttataccatggcactttaaagccagcatcactgacaatgagcggtgtggtgttactcggtagaatgctcgcaaggtcggctagaaattggtcatgagctttctttgaacattgctctgaaagcgggaacgctttctcataaagagtaacagaacgaccgtgtagtgcgactgaagctcgcaataccataagtcgtttttgctcacgaatatcagaccagtcaacaagtacaatgggcatcgtattgcccgaacagataaagctagcatgccaacggtatacagcgagtcgctctttgtggaggtgacgattacctaacaatcggtcgattcgtttgatgttatgttttgttctcgctttggttggcaggttacggccaagttcggtaagagtgagagttttacagtcaagtaatgcgtggcaagccaacgttaagctgttgagtcgttttaagtgtaattcggggcagaattggtaaagagagtcgtgtaaaatatcgagttcgcacat

SEQ ID NO: 133333 - DNA, 1435 bp, Homo sapiens
catgacgtttaaaatagacagtatccaggttggtgcctacggtcatgctggctttcgcgtccggcttccatttatcgtcggacagatagcgcagcacgttctccatgaagttcttcatgtcatccgggtcgctgttgagcgtacactgcccatctttattaacgcccccgttccagctgtaaccgttcgggcaacgcaaaatgctgttgtagtgtgggttaccgataaccatcagtttgccctcaccgacatgtgtgaataaattttgagctagtagggttgcagccacgagtaagtcttcccttgttattgtgtagccagaatgccgcaaaacttccatgcctaagcgaactgttgagagtacgtttcgatttctgactgtgttagcctggaagtgcttgtcccaaccttgtttctgagcatgaacgcccgcaagccaacatgttagttgaagcatcagggcgattagcagcatgatatcaaaacgctctgagctgctcgttcggctatggcgtaggcctagtccgtaggcaggacttttcaagtctcggaaggtttcttcaatctgcattcgcttcgaatagatattaacaagttgtttgggtgttcgaatttcaacaggtaagttagttgctagaacccatggctcctttgccgacgctgagtagattttaggtgacgggtggtgacaatgagtccgtgtcgagcgctgattttttcggcctttagagcgagatttatacaatagaatttggcatgagattggattgcttttagtcagcctcttatagcctaaagtctttgagtgactagatgacatatcatgtaagttgctgataggtttccagttttccgctcctaggtctgcatattgtacttttcctcttactcgacttaaccagtaccaacccagcttctcaacggatttataccatggcactttaaagccagcatcactgacaatgagcggtgtggtgttactcggtagaatgctcgcaaggtcggctagaaattggtcatgagctttctttgaacattgctctgaaagcgggaacgctttctcataaagagtaacagaacgaccgtgtagtgcgactgaagctcgcaataccataagtcgtttttgctcacgaatatcagaccagtcaacaagtacaatgggcatcgtattgcccgaacagataaagctagcatgccaacggtatacagcgagtcgctctttgtggaggtgacgattacctaacaatcggtcgattcgtttgatgttatgttttgttctcgctttggttggcaggttacggccaagttcggtaagagtgagagttttacagtcaagtaatgcgtggcaagccaacgttaagctgttgagtcgttttaagtgtaattcggggcagaattggtaaagagagtcgtgtaaaatatcgagttcgcacat

SEQ ID NO: 133334 - DNA, 1177 bp, Homo sapiens
atgtgcgaactcgatattttacacgactctctttaccaattctgccccgaattacacttaaaacgactcaacagcttaacgttggcttgccacgccttacttgactgtaaaactctcactcttaccgaacttggccgtaacctgccaaccaaagcgagaacaaaacataacatcaaacgaatcgaccgattgttaggtaatcgtcacctccacaaagagcgactcgctgtataccgttggcatgctagctttatctgttcgggcaatacgatgcccattgtacttgttgactggtctgatatccgtgagcaaaaacggcttatggtattgcgagcttcagtcgcactacacggtcgttctgttactctttatgagaaagcgttcccgctttcagagcaatgttcaaagaaagctcatgaccaatttctagccgaccttgcgagcattctaccgagtaacaccacaccgctcattgtcagtgatgctggctttaaagtgccatggtataaatccgttgagaagctgggttggtactggttaagtcgagtaagaggaaaagtacaatatgcagacctaggagcggaaaactggaaacctatcagcaacttacatgatatgtcatctagtcactcaaagactttaggctataagaggctgactaaaagcaatccaatctcatgccaaattctattgtataaatctcgctctaaaggccgaaaaaatcagcgctcgacacggactcattgtcaccacccgtcacctaaaatctactcagcgtcggcaaaggagccatggattctagcaactaacttacctgttgaaattcgaacacccaaacaacttgttaatatctattcgaagcgaatgcagattgaagaaaccttccgagacttgaaaagtcctgcctacggactaggcctacgccatagccgaacgagcagctcagagcgttttgatatcatgctgctaatcgccctgatgcttcaactaacatgttggcttgcgggcgttcatgctcagaaacaagagcgcaccgggccgatcgggcgagtggccatggcgggcgccgagaactggccgggccagcagctggagctggacgaggacgaggcgtcttgttgccgctggggcgcgcagcacgccggggcccgcgagctggctgcgctctactcgccag

SEQ ID NO: 133335 - DNA, 456 bp, Homo sapiens
ggtacgtaacgcgcgtctaggaagaacttcggccggggcaaaacgctggaagctgatactgcgtggatccagcgcggtatgcagagcggtggtgttaatgagaacgcggtggcttccggcaaagcgcgggggcgtcaggaaaagaatcaccgtgcatgcctgccggataacaaaggtccggtttccggtccgaagatcatcgacggtgcagagcttctgatcccgatggctggcctcatcaacaaagaagatgagctggcgcgtctggcgaaagaagtggcgaagattgaaggtgaaatcagccgtatcgagaacaaactggcgaacgaaggctttgtcgcccgcgcaccggaagcggtcatcgcgaaagagcgtgagaagctggaaggcttgtttctgagcatgaacgcccgcaagccaacatgttagttgaagcatcagggcgattagcagcat

SEQ ID NO: 133336 - DNA, 903 bp, Homo sapiens; identical to SEQ ID NO: 131985

SEQ ID NO: 133337 - DNA, 1218 bp, Homo sapiens
attctcatctccaaaatggtgcagggttgccatgaggattgtgttccggaagtccttctttgcttgcttggggtgtggatgtaggaagggtcctactggcatgagtgagtggtccactactgctacccaggccaggcaaggacttccgtttcgatttctgactgtgttagcctggaagtgcttgtcccaaccttgtttctgagcatgaacgcccgcaagccaacatgttagttgaagcatcagggcgattagcagcatgatatcaaaacgctctgagctgctcgttcggctatggcgtaggcctagtccgtaggcaggacttttcaagtctcggaaggtttcttcaatctgcattcgcttcgaatagatattaacaagttgtttgggtgttcgaatttcaacaggtaagttagttgctagaacccatggctcctttgccgacgctgagtagattttaggtgacgggtggtgacaatgagtccgtgtcgagcgctgattttttcggcctttagagcgagatttatacaatagaatttggcatgagattggattgcttttagtcagcctcttatagcctaaagtctttgagtgactagatgacatatcatgtaagttgctgataggtttccagttttccgctcctaggtctgcatattgtacttttcctcttactcgacttaaccagtaccaacccagcttctcaacggatttataccatggcactttaaagccagcatcactgacaatgagcggtgtggtgttactcggtagaatgctcgcaaggtcggctagaaattggtcatgagctttctttgaacattgctctgaaagcgggaacgctttctcataaagagtaacagaacgaccgtgtagtgcgactgaagctcgcaataccataagtcgtttttgctcacgaatatcagaccagtcaacaagtacaatgggcatcgtattgcccgaacagataaagctagcatgccaacggtatacagcgagtcgctctttgtggaggtgacgattacctaacaatcggtcgattcgtttgatgttatgttttgttctcgctttggttggcaggttacggccaagttcggtaagagtgagagttttacagtcaagtaatgcgtggcaagccaacgttaagctgttgagtcgttttaagtgtaattcggggcagaattggtaaagagagtcgtgtaaaatatcgagttcgcacat

SEQ ID NO: 133338 - DNA, 2217 bp, Homo sapiens
atgtggggtattggttcgaggacccccatctataacaaaatccttgtatactcaagtcctgaggtcagctgtgagaaacccaagtatgtgaaaagtcagacctctacacacacaggttttgaatcccacaaacgctatattttttatctgcgtttggttggaaaaaatctgcatgtcagtgccatgggcttggggaagagccaggagagaaggaagaaggctttgaagagccagccccagcagcctgctgacagttttccttctctccccactgtggaaggactgactaccagtggagaggtggcagcaggcttttggctaagtggagaggctctctcttcctgtgtagtttgtggagaggcagcgttgactcaagtctctgcccatagaatggctttcctcaagtcctatgtggcagatgacatcaagggtgaggggaaggagagtctggttgggccctggctgaggagaaaagctcttttttcatttgctgctgagcaccagagccagtccctgattgggggcttgagcttgcttcctgtcatcagttacagaatattagatagtgtgcaactttggggcttggctgtggggaatgccaagaatagttacaagataagcagtggatttaaaaacagagtgtattttgcactgtctgatgagtacattgtgtctccgaagttgagattccacatagtgagccttggaaaacaactgctgctctgcgaccctggcatgtggagagggccaaatgtgaactgtgttgacagcactggctacacacccctgcaccatgctgctttgaatggccataaggatgtggtcgaggttcttctgaggaacgatgcgctgaccaacgtggctgactcaaaaggctgctaccctctgcatttggcagcctggaaaggagatgcccagatagtgcggttgctcatccatcaagggccttcacacaccagagtcaatgaacagaatgctcttgagatcaaagaactcaaaaagtacggcccctttgacccttatatcaatgccaagggtcctcctcatcatgctgactgttgtctgcttcagtccatctgcttttggcttgtctgggaatgggaaaatgcagctgcagtgggttttggctttatttttaaaacccatactaatttgggaaatgcgagaccaaaacataacatcaaacgaatcgaccgattgttaggtaatcgtcacctccacaaagagcgactcgctgtataccgttggcatgctagctttatctgttcgggcaatacgatgcccattgtacttgttgactggtctgatattcgtgagcaaaaacgacttatggtattgcgagcttcagtcgcactacacggtcgttctgttactctttatgagaaagcgttcccgctttcagagcaatgttcaaagaaagctcatgaccaatttctagccgaccttgcgagcattctaccgagtaacaccacaccgctcattgtcagtgatgctggctttaaagtgccatggtataaatccgttgagaagctgggttggtactggttaagtcgagtaagaggaaaagtacaatatgcagacctaggagcggaaaactggaaacctatcagcaacttacatgatatgtcatctagtcactcaaagactttaggctataagaggctgactaaaagcaatccaatctcatgccaaattctattgtataaatctcgctctaaaggccgaaaaaatcagcgctcgacacggactcattgtcaccacccgtcacctaaaatctactcagcgtcggcaaaggagccatgggttctagcaactaacttacctgttgaaattcgaacacccaaacaacttgttaatatctattcgaagcgaatgcagattgaagaaaccttccgagacttgaaaagtcctgcctacggactaggcctacgccatagccgaacgagcagctcagagcgttttgatatcatgctgctaatcgccctgatgcttcaactaacatgttggcttgcgggcgttcatgctcagaaacaaggttgggacaagcacttccaggctaacacagtcagaaatcgaaacgtactctcaacagttcgcttaggcatggaagttttgcggcattctggctacacaataacaagggaagacttactcgtggctgcaaccctactagctcaaaatttattcacacatggttacgctttggggaaattatga

SEQ ID NO: 133339 - DNA, 867 bp, Homo sapiens
atggaggtggatatcagacctcaaagcagttctggaacagatgcaggttcccaccttcccaccccagggcagctgagcagacccagagcctgggtaaacaagaaaggcttatcagtggaaaagaaatttttagaaattcctggaaaagataaagaggatagaatggagttgctgggaaaaccaatcacagctgagacctattacccagattcactcaaaagaagtaatggaagcgataatggaagtttaaaaataacgaagcagaacctggcaagggccgtaccaggtgttgtgcaaacaaaggactatgtgaacatttttaattctctggctgatgaacttgctcttgtggatgttttggaagataagcttaaaggagaaatgatggatctgcagcatgggagcttatttcttcagacacctaaaattgtggcagataaagattattctgtgactgccaattctaagattgtagtggtaactgcaggagtccgtcagcaagaaggggagagtcggctcaatctggtgcagagaaatgttaatgtcttcaaattcattattcctcagatcgtcaatgcctatgaagtcatcaagctaaaaggatataccaactgggctattggattaagtgtggctgatcttattgaatccatgttgaaaaatctatccaggattcatcccgtgtcaacaatggtaaaggggatgtatggcattgagaatgaagtcttcctgagccttccatgtatcctcaatgcccggggattaaccagcgttatcaaccagaagctaaaggatgatgaggttgctcagctcaagaaaagtgcagataccctgtgggacatccagaaggacctaaaagacctgtga

SEQ ID NO: 133340 - DNA, 1210 bp, Homo sapiens
ctggaaacctgaaaccgaaggtcgtatccgaaagcgcaacaacactctgctgcgtgtaccgaagactgtttctctctcgggtatctagcacccgcgcggtaccttccagccccgtggtgaagacctgcagaaagtggctagaggagcccatgagttgacaaggcagcacgattcgcacagtgccttgtttctgagcatgaacgcccgcaagccaacatgttagttgaagcatcagggcgattagcagcatgatatcaaaacgctctgagctgctcgttcggctatggcgtaggcctagtccgtaggcaggacttttcaagtctcggaaggtttcttcaatctgcattcgcttcgaatagatattaacaagttgtttgggtgttcgaatttcaacaggtaagttagttgctagaacccatggctcctttgccgacgctgagtagattttaggtgacgggtggtgacaatgagtccgtgtcgagcgctgattttttcggcctttagagcgagatttatacaatagaatttggcatgagattggattgcttttagtcagcctcttatagcctaaagtctttgagtgactagatgacatatcatgtaagttgctgataggtttccagttttccgctcctaggtctgcatattgtacttttcctcttactcgacttaaccagtaccaacccagcttctcaacggatttataccatggcactttaaagccagcatcactgacaatgagcggtgtggtgttactcggtagaatgctcgcaaggtcggctagaaattggtcatgagctttctttgaacattgctctgaaagcgggaacgctttctcataaagagtaacagaacgaccgtgtagtgcgactgaagctcgcaataccataagtcgtttttgctcacgaatatcagaccagtcaacaagtacaatgggcatcgtattgcccgaacagataaagctagcatgccaacggtatacagcgagtcgctctttgtggaggtgacgattacctaacaatcggtcgattcgtttgatgttatgttttgttctcgctttggttggcaggttacggccaagttcggtaagagtgagagttttacagtcaagtaatgcgtggcaagccaacgttaagctgttgagtcgttttaagtgtaattcggggcagaattggtaaagagagtcgtgtaaaatatcgagttcgcacat

SEQ ID NO: 133341 - DNA, 1089 bp, Homo sapiens
atgcccattgtacttgttgactggtctgatattcgtgagcaaaaacgacttatggtattgcgagcttcagtcgcactacacggtcgttctgttactctttatgagaaagcgttcccgctttcagagcaatgttcaaagaaagctcatgaccaatttctagccgaccttgcgagcattctaccgagtaacaccacaccgctcattgtcagtgatgctggctttaaagtgccatggtataaatccgttgagaagctgggttggtactggttaagtcgagtaagaggaaaagtacaatatgcagacctaggagcggaaaactggaaacctatcagcaacttacatgatatgtcatctagtcactcaaagactttaggctataagaggctgactaaaagcaatccaatctcatgccaaattctattgtataaatctcgctctaaaggccgaaaaaatcagcgctcgacacggactcattgtcaccacccgtcacctaaaatctactcagcgtcggcaaaggagccatgggttctagcaactaacttacctgttgaaattcgaacacccaaacaacttgttaatatctattcgaagcgaatgcagattgaagaaaccttccgagacttgaaaagtcctgcctacggactaggcctacgccatagccgaacgagcagctcagagcgttttgatatcatgctgctaatcgccctgatgcttcaactaacatgttggcttgcgggcgttcatgctcagaaacaaggttgggacaagcacttccaggctaacacagtcagaaatcgaaacggaagtcttctgaccaactggccctccgtccctcctaccataaaggaggaggaaaacagtgaggaggaacttgcagcagccaccacatcgaaggaacaggagcccatcggtacagatctggacgcagtgcgaacaccagagcccttggaggaattcccgaagcgtgaggaccaggaaggctccccaccagaaacgagcctgccttacaagtgggtggtggaggcagctaacctcctcatccctgctgtgggttctagcctctctgaagccctggacttgatcgagtcg

SEQ ID NO: 133342 - DNA, 552 bp, Homo sapiens
atgggagtgaatgacttgtggcaaattttggagcctgttaagcaacacatccccttgcgtaatcttggtgggaaaaccattgcagttgatctgagtctctgggtgtgtgaggcacacccagtcaaaaaaatgatgggcagcgtcatgaagaaacacctcagggattttgccgatttcggaaccaccatcaaacaggattttcgcctgctggggcaaaccagcgtggaccgcttgctgcaactctctcagggccaggcggcctaccccatacccgacgaccaggttcagagcgttttgatatccatgctgctaatcgccctgatgcttcacctaacatgtgggcttgcgggcgttcatgctcagaaacaaggttgggacaagcacttccaggctaacacagtcagaaatcgaaacgtactctcaacagttcgcttaggcatggaagttttgcggcattctggctacacaataacaagggaagactcactcgtggctgcaaccctgcttactcaaaatctattcacacatggttacgttttggggaaattatga

SEQ ID NO: 133343 - DNA, 1200 bp, Homo sapiens
atgtgcgaactcgatattttacacgactctctttaccaattctgccccgaattacacttaaaacgactcaacagcttaacgttggcttgccacgccttacttgactgtaaaactctcactcttaccgaacttggccgtaacctgccaaccaaagcgagaacaaaacataacatcaaacgaatcgaccgattgttaggtaatcgtcacctccacaaagagcgactcgctgtataccgttggcatgctagctttatctgttcgggcaatacgatgcccattgtacttgttgactggtctgatatccgtgagcaaaaacggcttatggtattgcgagcttcagtcgcactacacggtcgttctgttactctttatgagaaagcgttcccgctttcagagcaatgttcaaagaaagctcatgaccaatttctagccgaccttgcgagcattctaccgagtaacaccacaccgctcattgtcagtgatgctggctttaaagtgccatggtataaatccgttgagaagctgggttggtactggttaagtcgagtaagaggaaaagtacaatatgcagacctaggagcggaaaactggaaacctatcagcaacttacatgatatgtcatctagtcactcaaagactttaggctataagaggctgactaaaagcaatccaatctcatgccaaattctattgtataaatctcgctctaaaggccgaaaaaatcagcgctcgacacggactcattgtcaccacccgtcacctaaaatctactcagcgtcggcaaaggagccatggattctagcaactaacttacctgttgaaattcgaacacccaaacaacttgttaatatctattcgaagcgaatgcagattgaagaaaccttccgagacttgaaaagtcctgcctacggactaggcctacgccatagccgaacgagcagctcagagcgttttgatatcatgctgctaatcgccctgatgcttcaactaacatgttggcttgcgggcgttcatgctcagaaacaagtgccgcaagccaaaggcaacaatgtggttatcacaagctacatgacaaacagaggcttcttcgaggataaaaaggcaacatttgcgccaagcttcttaatgaacatcaaaggcaataaaacatccgttgtcaaaaacagcatcctggagcaaggacagctgacagtcaactaa

SEQ ID NO: 133344 - DNA, 888 bp, Homo sapiens
atgtgcgaactcgatattatacacgactctctttaccaattctgccccgaattacacttaaaacgactcaacagcttaacgttggcttgccacgcattacttgactgtaaaactctcactcttaccgaacttggccgtaacctgccaaccaaagcgagaacaaaacataacatcaaacgaatcgaccgattgttaggtaatcgtcacctccacaaagagcgactcgctgtataccgttggcatgctagctttatctgttcgggcaatacgatgcccattgtacttgttgactggtctgatattcgtgagcaaaaacgacttatggtattgcgagcttcagtcgcactacacggtcgttctgttactctttatgagaaagcgttcccgctttcagagcaatgttcaaagaaagctcatgaccaatttctagccgaccttgcgagcattctaccgacgtcggcaaaggagccatgggttctagcaactaacttacctgttgaaattcgaacacccaaacaacttgttaatatctattcgaagcgaatgcagattgaagaaaccttccgagacttgaaaagtcctgcctacggactaggcctacgccatagccgaacgagcagctcagagcgttttgatatcatgctgctaatcgccctgatgcttcaactaacatgttggcttgcgggcgttcatgctcagaaacaaggttgggacaagcacttccaggctaacacagtcagaaatcgaaacgtactctcaacagttcgcttaggcatggaagttttgcggcattctggctacacaataacaagggaagacttactcgtggctgcaaccctactagctcaaaatttattcacacatggttacgctttggggaaattatga

SEQ ID NO: 133345 - DNA, 1527 bp, Homo sapiens
ttaaaggtggtgtttagagtgaatcacgaacagacgaaacatcggtaatacttttgcgagtaaattcacttccgccgatggcacaaagccaatggttaattgtctttcttcctgaacaattttccgcgcccgtaatttggcattttccgcttgttcgaggattgccagcgcgtcctggagaaaacattctcccgccgccgtcaacgcgactttgcgcttatccctcaccagtaacggaacaccgacacagttttcaagatcgcggatctggctgcttaacgaaggctgtgaggtatgcagtttttccgccgcacgggtaaagttcagtgcctgcgccactgcgacgaaatagcgtaaatgccgtagttccatcaccttccccttgttatcgaaaaaacgtctcagctggtagaaattaacttcaacccggtagctaccgtcataaccagtcgtcagtgtgagttgatgatagcgcaggatctcccgtcctgtttcgctgatatcaagactggcaatatcatcatccacaccattaagctcgctgaaggttgccatggtggcggtcaaccccggctgaaagagcgtcagcaagatctggcagcggcggtttcgatttctgactgtgttagcctggaagtgcttgtcccaaccttgtttctgagcatgaacgcccgcaagccaacatgttagttgaagcatcagggcgattagcagcatgatatcaaaacgctctgagctgctcgttcggctatggcgtaggcctagtccgtaggcaggacttttcaagtctcggaaggtttcttcaatctgcattcgcttcgaatagatattaacaagttgtttgggtgttcgaatttcaacaggtaagttagttgctagaacccatggctcctttgccgacgccagcttctcaacggatttataccatggcactttaaagccagcatcactgacaatgagcggtgtggtgttactcggtagaatgctcgcaaggtcggctagaaattggtcatgagctttctttgaacattgctctgaaagcgggaacgctttctcataaagagtaacagaacgaccgtgtagtgcgactgaagctcgcaataccataagccgtttttgctcacggatatcagaccagtcaacaagtacaatgggcatcgtattgcccgaacagataaagctagcatgccaacggtatacagcgagtcgctctttgtggaggtgacgattacctaacaatcggtcgattcgtttgatgttatgttttgttctcgctttggttggcaggttacggccaagttcggtaagagtgagagttttacagtcaagtaaggcgtggcaagccaacgttaagctgtctttagagcacaggagatgaatcgaaaaaggccggcactttcgccaatattcgcatccgtaatgaatggtgcgtggcgcgcggatggtagccaggaagtcgtaccctgccgttgtcgtatcgacaccgcgacggagttgacctactaccagaacgacggcattttgcat

SEQ ID NO: 133346 - DNA, 1488 bp, Homo sapiens; identical to SEQ ID NO: 119264

SEQ ID NO: 133347 - DNA, 735 bp, Homo sapiens
ttacgcacaaactgacgataaccgacgaaatcttatattgaacggtacgccgctacggcgtgtcaaagtcttagtttttgacatagagtacccctgataaaaagtatatgggtataacagcacactggcttgatccctacaacgtggctctaaaagactccggtcctcacttgtggaaagaacgggcttgtccttgtcgtagcggctcttgcagccgtaggcggagcaggactgcaccatccttccggtcctcaggcacttcacttttttcaagtctcggaaggtttcttcaatctgcattcgcttcgaatagatattaacaagttgtttgggtgttcgaatttcaacaggtaagttagttgctagaacccatggctcctttgccgacgaccagactttgtttttcatgaccttggcagtttcaggagaactatggactccttccccttggagacccaacagtatcagaacttcttgagggaccgagtgccgtctataggcagggaaagccccaagggcttctccggggaagcgcagtctgaagaaacggagcccaggcctggtgagagagagaccacccagggcagggggtgaaagtcccgcttcatcttcctcctccttagagcggtgtgctcgggcggcatcacacccagccagcgcgagtgtgaactcaagtgcacgggcagccttgaccgggctggagctgagtgaggggtcaccctgcagtggcttcat

SEQ ID NO: 133348 - DNA, 879 bp, Homo sapiens
atgtgcgaactcgatattttacacgactctctttaccaattctgccccgaattacacttaaaacgactcaacagcttaacgttggcttgccacgcattacttgactgtaaaactctcactcttaccgaacttggccgtaacctgccaaccaaagcgagaacaaaacataacatcaaacgaatcgaccgattgttaggtaatcgtcacctccacaaagagcgactcgctgtataccgttggcatgctagctttatctgttcgggcaatacgatgcccattgtacttgttgactggtctgatattcgtgagcaaaaacgacttatggtattgcgagcttcagtcgcactacacggtcgttctgttactctttatgagaaagcgttcccgctttcagagcaatgttcaaagaaagctcatgaccaatttctagccgaccttgcgagcattctaccgagtaacaccacaccgctcattgtcagtgatgctggctttaaagtgccatggtataaatccgttgagaagctgggttggtactggttaagtcgacgaatgcagattgaagaaaccttccgagacttgaaaagtcctgcctacggactaggcctacgccatagccgaacgagcagctcagagcgttttgatatcatgctgctaatcgccttgatgcttcaactaacatgttggcttgcgggcgttcatgctcagaaacaaggttgggacaagcacttccaggctaacacagtcagaaatcgaaacaacacggccagccgggctgctctgcagacacccatttggacagccgacggctggaggcgtctggcaggaggagcatgtggtccctggcagccactcgccagccccgctgtcgttgacagctga

SEQ ID NO: 133349 - DNA, 1336 bp, Homo sapiens
atgtgcgaactcgatattttacacgactctctttaccaattctgccccgaattacacttaaaacgactcaacagcttaacgttggcttgccacgcattacttgactgtaaaactctcactcttaccgaacttggccgtaacctgccaaccaaagcgagaacaaaacataacatcaaacgaatcgaccgattgttaggtaatcgtcacctccacaaagagcgactcgctgtataccgttggcatgctagctttatctgttcgggcaatacgatgcccattgtacttgttgactggtctgatattcgtgagcaaaaacgacttatggtattgcgagcttcagtcgcactacacggtcgttctgttactctttatgagaaagcgttcccgctttcagagcaatgttcaaagaaagctcatgaccaatttctagccgaccttgcgagcattctaccgagtaacaccacaccgctcattgtcagtgatgctggctttaaagtgccatggtataaatccgttgagaagctgggttggtactggttaagtcgagtaagaggaaaagtacaatatgcagacctaggagcggaaaactggaaacctatcagcaacttacatgatatgtcatctagtcactcaaagactttaggctataagaggctgactaaaagcaatccaatctcatgccaaattctattgtataaatctcgcactaaaggccgaaaaaatcagcgctcgacacggacacattgtcaccacccgtcacctaaaatctactcagcgtcggcaaaggagccatgggttctagcaactaacttacctgttgaaattcgaacacccaaacaacttgttaatatctattcgaagcgaatgcagattgaagaaaccttccgagacttgaaaagtcctgcctacggactaggcctacgccatagccgaacgagcagctcagagcgttttgatatcatgctgctaatcgccctgatgcttcaactaacatgttggcttgcgggcgttcatgctcagaaacaaggacttgatgtgtgggacagctggccgctgcaaaacgctgacggaacagtagctgaatacaacggctatcacgttgtgtttgctcttgcgggaagcccgaaagacgctgatgacacatcaatctacatgttttatcaaaaggtcggcgacaactcaatcgacagctggaaaaacgcgggccgtgtctttaaagacagcgataagttcgacgccaacgatccgatcctgaaagatcagacgcaagaatggtccggttctgcagcctttacatctgacggaaaaatccgtttattctacactgactattccg

SEQ ID NO: 133350 - DNA, 1575 bp, Homo sapiens
atggggagtgtgaccaagtcaaggggacccactgactcatccgctttcttccagataaaccgagactactccttccttgactacatcctgggaggctgccagctcatgttcaccccctgggccaggcttctccagagtacgtgctgcgagcaatgttcaaagaaagctcatgaccaatttctagccgaccttgcgagcattctaccgagtaacaccacaccgctcattgtcagtgatgctggctttaaagtgccatggtataaatccgttgagaagctgggttggtactggttaagtcgagtaagaggaaaagtacaatatgcagacctaggagcggaaaactggaaacctatcagcaacttacatgatatgtcatctagtcactcaaagactttaggctataagagcctgactataagcaacccaatctcaggccaaattctattgtataaatctcgctctaaaggccgaaaaaatcagcgctcgacacggactcattgtcaccacccgtcacctaaaatctactcagcgtcggcaaaggagccatggattctagcaactaacttacctgttgaaattcgaacacccaaacaacttgttaatatctattcgaagcgaatgcagattgaagaaaccttccgagacttgaaaagtcctgcctacggactaggcctacgccatagccgaacgagcagctcagagcgttttgatatcatgctgctaatcgccctgatgcttcaactaacatgttggcttgcgggcgttcatgctcagaaacaagcatttaggtttatgcgtcttgtcgatggaacagcaatcagtgcgcccgggggcggcagcgctgaatggcgactacatatgggatatgatcctcatacctgtcagttcactgattttgagctaaccgacagcagagacgctgaacggctggaccgatttgcgcaaacggcagacgagatacgcattgctgaccggggattcggttcgcgtcccgaatgtatccgctcacttgcttttggagaagctgattatatcgtccgggttcactggcgaggattgcgctggttaactgcagaaggaatgcgctttgacatgatgggttttctgcgcgggctggattgcggtaagaacggtgaaaccactgtaatgataggcaattcaggtaataaaaaagccggagctccctttccggcacgtctcattgccgtatcacttcctcccgaaaaagcattaatcagtaaaacccgactgctcagcgagaatcgtcgaaaaggacgagtagttcaggcggaaacgctggaagcagcgggccatgtgctattgctaacatcattaccggaagatgaatattcagcagagcaagtggctgattgttaccgtctgcgatggcaaattgaactggcttttaagcggctcaaaagtttgctgcacctggatgctttgcgtgcaaaggaacctgaactcgcgaaagcgtggatatttgctaatctactcgccgcatttttaattgacgacataatccagccatcgctggatttcccccccagaagtgccggatccgaaaagaagaactaa

SEQ ID NO: 133351 - DNA, 2187 bp, Homo sapiens
atggcgacaccggacgcggggctccctggggctgagggcgtggagccggcgccctgggcgcagctggaggcccccgcccgcctcctgctgcaggcgctgcaggcggggcctgagggggcgcggcgcggcctgggggtgctccgggcgctgggcagccgcggctgggagcccttcgactggggtcgcttgctcgaggccctgtgccgggaggagccggtcgtgcaggggcctgacggccgtctggagctattctggggtacttgtataactccggatcttcggaggtttacatacagtactcggagtgaggagcaggaccgacggacagagcagacatgcatacagacaaccagaaccacagagggcctcgagcccggagcggtcctccgcacagttgccactcgctacctgcacccgtactcaccgttacccaactccatcactgtccccttctcattaacactttgcctcggtgcgacttccccttctgctgtcctctacccaggtcctgctcaaacagagttactgtgttgccttgtgaagatggagtccctggagccagatgcacaggttctaatgctgggcttaacgttggcttgccacgcattacttgactgtaaaactctcactcttaccgaacttggccgtaacctgccaaccaaagcgagaacaaaacataacatcaaacgaatcgaccgattgttaggtaatcgtcacctccacaaagagcgactcgctgtataccgttggcatgctagctttatctgttcgggcaatacgatgcccattgtacttgttgactggtctgatattcgtgagcaaaaacgacttatggtattgcgagcttcagtcgcactacacggtcgttctgttactctttatgagaaagcgttcccgctttcagagcaatgttcaaagaaagctcatgaccaatttctagccgaccttgcgagcattctaccgagtaacaccacaccgctcattgtcagtgatgctggctttaaagtgccatggtataaatccgttgagaagctgggttggtactggttaagtcgagtaagaggaaaagtacaatatgcagacctaggagcggaaaactggaaacctatcagcaacttacatgatatgtcatctagtcactcaaagactttaggctataagaggctgactaaaagcaatccaatctcatgccaaattctattgtataaatctcgctctaaaggccgaaaaaatcagcgctcgacacggactcattgtcaccacccgtcacctaaaatctactcagcgtcggcaaaggagccatgggttctagcaactaacttacctgttgaaattcgaacaccccaacaacttgttaatatctattcgaagcgaatgcagattgaagaaaccctccgagacttgaaaagtcctgcctacggactaggcttacgccatagccgaacgagcagctcaaagcgttttgatatcatgctgctaatcgccctaatgcttcagactacatgtggggtgcgggcgttcatgctcagaaaaaagatggacttgctgtgtgcccagctgcagctccctcagctctcagacctcggtctcctgcggctctgcacctggctgctggccctttcacctgatctcagcctcagcaatgctactgtgctgaccagaagcctctttcttggacggccaggatctgaacaataccgtcgtgctttcgagcttgccgatcagcttggtttaaaacacccggattgcattgagcatgtatttccgacctatgctgatgagcaatgtactcatgttcttaccgaagaggattttttcagcactgaagaacgagaaggcgttgatcgctgcattggtgtgatttgttcttcgacaatgactactgatgaaggtgccaagaacaatgaagaaagccccacagccactgttgctgagcagggagaggatattacctccaaaaaagacaggggagtattaaagattgtcaaaagagtggggaatggtgaggaaacgccgatgattggagacaaagtttatgtccattacaaaggaaaattgtcaaatggaaagaagtttgattccagtcatgatagaaatgaaccatttgtctttagtcttggcaaagagacttgctctgttattggggctggaatgcaatggcaccatcataactcactacagcattga

SEQ ID NO: 133352 - DNA, 780 bp, Homo sapiens
ctctcctctctgtggatcctgaatacgagtaaatctcaaatctccatgttcccagtgtgcatttacactatagatccgaagctgagaaagttcaaatgatgcattgaaggcttttgctccaattctgatgactatagaatttacagaaacagaaattccctcaactactttttcagcaaagccgtattcacatgtgtgaatagattttgagtaagcagggttgcagccacgagtgagtcttcccttgttattgtgtagccagaatgccgcaaaacttccatgcctaagcgaactgttgagagtactgtttcgatttctgactgtgttagcctggaagtgcttgtcccaaccttgtttctgagcatgaacgcccgcaagccaacatgttagttgaagcatcagggcgattagcagcatgatatcaaaacgctctgagctgctcgttcggctatggcgtaggcctagtccgtaggcaggacttttcaagtctcggaaggtttcttcaatctgcattcgcttcgaatagatattaacaagttgtttgggtgttcgaatttcaacaggtaagttagttgctagaatccatggctcctttgccgacgctgacacataatccagggtcgacctcgggcaccagttctcatggtttgtatttgtgggaaatccagttctagaagaattgtctcctttgtctttccaatgtctctccaccttccggggctcctcttcctcataaagctgcaagctccacgggtcatcagaatcccacccccactccat

SEQ ID NO: 133353 - DNA, 1314 bp, Homo sapiens
ctaggtgttggtgtgggggaatgcaacatcaaacccattgtcatctggagttgtagcaagggtttcctgcctaaataatttctttttaactcctgtatcattataacccttcttcacgtgcttccgcattcccatggtgttgaacttcaagctgtcatggggagtggctgtgttctcctcccattccttggaattccctctttgatggaacgtgttcaccatgtaagcccacacagaattttctagaaagatggtagaatcaagaaggtggtagggggtggcttgctcttgtttctgagcatgaacgcccgcaagccaacatgttagttgaagcatcagggcgattagcagcatgatatcaaaacgctctgagctgctcgttcggctatggcgtaggcctagtccgtaggcaggacttttcaagtctcggaaggtttcttcaatctgcattcgcttcgaatagatattaacaagttgtttgggtgttcgaatttcaacaggtaagttagttgctagaatccatggctcctttgccgacgctgagtagattttaggtgacgggtggtgacaatgagtccgtgtcgagcgctgattttttcggcctttagagcgagatttatacaatagaatttggcatgagattggattgcttttagtcagcctcttatagcctaaagtctttgagtgactagatgacatatcatgtaagttgctgataggtttccagttttccgctcctaggtctgcatattgtacttttcctcttactcgacttaaccagtaccaacccagcttctcaacggatttataccatggcactttaaagccagcatcactgacaatgagcggtgtggtgttactcggtagaatgctcgcaaggtcggctagaaattggtcatgagctttctttgaacattgctctgaaagcgggaacgctttctcataaagagtaacagaacgaccgtgtagtgcgactgaagctcgcaataccataagccgtttttgctcacggatatcagaccagtcaacaagtacaatgggcatcgtattgcccgaacagataaagctagcatgccaacggtatacagcgagtcgctctttgtggaggtgacgattacctaacaatcggtcgattcgtttgatgttatgttttgttctcgctttggttggcaggttacggccaagttcggtaagagtgagagttttacagtcaagtaaggcgtggcaagccaacgttaagctgttgagtcgttttaagtgtaattcggggcagaattggtaaagagagtcgtgtaaaatatcgagttcgcacat

SEQ ID NO: 133354 - DNA, 1357 bp, Homo sapiens
atggaggaaactgcccccctgattcaattatctccacctggccccacccttgacacatggggactgttgcaattcaagcttttgggctcttggacttacaccagtggtttgccagggccccccagccttcgaccacagattgaaggctacactgttggcctccctacttttgaggttttggaacttggactggcttccttgctcctcagtttgcagacagcctattgtggaacttcaccttgtgatcgtaacccgccacctccatttgcacaagcccaagtccagtctagccttccagtggatgagtcatggcacagctatggctatggctctacccaacagtcagctaatcccccgaagcagagccttttcactgaccagcagctgcccacctacacatgggatctggctctgaaggggctacgtgttttgctcgtggaaggtaacgacccccagggaacagcctcaatgtatcacggatgggtaccagatcttcatattcatgcagaagacactctcctgcctttctatcttggggaaaaggacgatgtcacttatgcaataaagcccacttgctggccggggcttgacattattccttcctgtctggctctgcaccgtattgaaactgagttaatgggcaaatttgatgaaggtaaactgcccaccgatccacacctgatgctccgactggccattgaaactgttgctcatgactatgatgtcatagttattgacagcgcgcctaacctggcgtcggcaaaggagccatgggttctagcaactaacttacctgttgaaattcgaactcccagacgaacttgttaatatctattcgaagcgaatgcagattgaagaagccttccgagacttgaaaagtcgtggctacgaggctaggcctactagctccagcttcattcacaaatgattccgctctggggaatctacgagtgcatcgaatcgttttttcttcggcaccttcttcgggaggtgccgtctggtaaacacgatccagtaaagaaagatgcttaaacgttgtctctctccgctcaccctggttaatcaggttgcgcttattgtgttgctttctactgctattggactggcagggatggcggtttctggctggctggtgcaaggcgttccaggcagcgcccatgcgatcaacaaagcgggatcgtgcgcatgcaaagttaccgtctgttggcggcagtgccattaagcgagaaagacaagcctcgagcagcagaacgagacggacaactggcgcaattacagaaccattcggcgcgtaatcactaatcgccgcgctgttcagttttccgttaatcagttgttccagttcggtgtttttcat

SEQ ID NO: 133355 - DNA, 2434 bp, Homo sapiens
gtatcttccaggtggaagctttaggaaccaatatgcaatttgccccaggctttgttctgctttggcaatcatggaagcatagagatggagcctgggtccccccgacttttcccgctgacctgcagggggtatggaacatgagcaagaaaacacattgacgccgtagaaactcattgaggccatttggagctcgtagttcatcacaggatctagtttgaggcataatgagcgacttggagctagcacttcatcaggagagtactgaccctctgcaagaggcttcctatgaacattacccttcgaaaactcacatctccctctctttcctgttgacacatgagcactgaaggaacctcccggaccttcagcattccacttgacaatggcttcattaggaaaagctctatccacagtcacaccaataactagatgtgtaattaacttgctttcccacaccatccccctaaagggtggcagtaaggatggctgagagagagttaccattatttctgttttacagatgagaaaactgaggtatggaaaaaggtgcccatttcccaaggtcatcagggtgctgctcatcagagccacaaacaagatctgtgtgactccagagcctttgttcttcattctgcggaggaggaaactgaggatcagagagaaaatgtgtttgcctgagcctcgatgtccaataagcaaaagagccaggactccctttctaatctttgattcctggtccagctcagtgaccaaaacactgtgtccttttttagagatcattaaagccacggtgtttcgatttctgactgtgttagcctggaagtgcttgtcccaaccttgtttctgagcatgaacgcccgcaagccaacatgttagttgaagcatcagggcgattagcagcatgatatcaaaacgctctgagctgctcgttcggctatggcgtaggcctagtccgtaggcagcgacttttcaagtctcggaaggtttcttcaatctgcattcgcttcgaatagatattaacaagttgtttgggtgttcgaattttcaacaggtaagttagtggctagaacccatggctcctttgccgacgctgagtagattttaggtgacgggtggtgacaatgagtccgtgtcgagcgctgattttttcggcctttagagcgagatttatacaatagaatttggcatgagattggattgcttttagtcagcctcttatagcctaaagtctttgagtgactagatgacatatcatgtaagttgctgataggtttccagttttccgctcctaggtctgcatattgtacttttcctcttactcgacttaaccagtaccaacccagcttctcaacggatttataccatggcactttaaagccagcatcactgacaatgagcggtgtggtgttactcggtagaatgctcgcaaggtcggctagaaattggtcatgagctttctttgaacattgctctgaaagcgggaacgctttctcataaagagtaacagaacgaccgtgtagcgcgactgacgctcgcaataccataagtcgtttttgctcacgaatatcagaccagtgaccgagattcccccagtagcggcgagcgtacggggagcagcccagagcctgaatcagtgtgtgtgttagtggaagcgtctggaaaggcgcgcgatacagggtgacagccccgtacacaaaaatgcacatgctgtgagctcgatgagtagggcgggacacgtggtatcctgtctgaatatggggggaccatcctccaaggctaaatactcctgactgccgcttgacagcttttacaacatctccgttatcccaggcgttaatatttcccgggcgagcaatgtaaggtgtatcggggaattgtgctttcagttctggaactaatgggccgttaggaccggtttcaaaactggtggtaagaatagttggtaagttgaaatacttagccaggtcacccagcgccagcacgttatttctaaacttatcgggttcgatatcccgtacaagggaaagtaaaccagcctggtgatcaacaagcaaaacggcagcatcatttttatcaagacgaacatacggtttggtcatcctcttctcctttcgagagtcagtggtacgtctgaaatcgatcagacgcgatgcattgctccgattccgcttcagctccgctggcaagttggatggctccgggctgccgacgtgcacctcctctagcgccttactccaaggagtaacttgccttaacgacagttccgacacatttgagagaagtaaacgagagctacgtgtatataggaggcatggcacagcgtccagatcagtgaggacaacaactgtctcagtggggtctctatatcctccgtagaacctcgcaacctcataaccaaatgcataataggcatgggctacgataactagtgacc

SEQ ID NO: 133356 - DNA, 1516 bp, Homo sapiens
ctggagtgggccccagagtccagggtatagctgatccctgggaaaaagcaggagccagttctggagccctacagagggtgtggccagaaggccgtggattgggagcaagggctgcgagagctggaattttcagggcttgtttctgagcatgaacgcccgcaagccaacatgttagttgaagcatcagggcgattagcagcatgatatcaaaacgctctgagctgctcgttcggctatggcgtaggcctagtccgtaggcaggacttttcaagtctcggaaggtttcttcaatctgcattcgcttcgaatagatattaacaagttgtttgggtgttcgaatttcaacaggtaagttagttgctagaacccatggctcctttgccgacgctgagtagattttaggtgacgggtggtgacaatgagtccgtgtcgagcgctgattttttcggcctttagagcgagatttatacaatagaatttggcatgagattggattgcttttagtcagcctcttatagcctaaagtctttgagtgactagatgacatatcatgtaagttgctgataggtttccagttttccgctcctaggtctgcatattgtacttttcctcttactcgacttaaccagtaccaacccagcttctcaacggatttataccatggcactttaaagccagcatcactgacaatgagcggtgtggtgttactcggtagaatgctcgcaaggtcggctagaaattggtcatgagctttctttgaacattgctctgaaagcgggaacgctttctcataaagagtaacagaacgaccgtgtagtgcgactgaagctcgcaataccataagtcgtttttgctcacgaatatcagaccagtcaacaagtacaatgggcatcgtattgcccgaacagataaagctagcatgccaacggtatacagcgagtcgctctttgtggaggtgacgattacctgcatagatatcaaagcgatgccctttagtgactaccgcgtttggcgtggcgacattcgccagcggtggcgcgtagtccgggcgctttaccaccacgcgtttggtcgccagcaagcgtgcaggctccagtaatccatcggcatcaagatccggtcccaccagcgactgaaagacacgcatctcttttttcactagcgcgcttttctgcttatgcgggaacatcgggtcgagataaaccacctgcgggcgcggggtaatatcagtcagcgccgtcaggctggaggcgtgaattaactgcaaccgctcctgcaaccagccgccgatttccgcatccgcataaccacgcgccaggccgtcgtcgagtagcgcggcaaccactggattacgctccagcatccgcacgcggcaccgagctgaagccagtacaaaggcatcgcgcccaagtcctgcagtggcatccaccacatccggcaaataatcgcctttaatgcccaccgctttcgccaccgcctcaccgcgaccaccgccgaatttgcgtcggtgcgccat

SEQ ID NO: 133357 - DNA, 1819 bp, Homo sapiens
atggacaggaactaccccagcgccggcttcggggacccgctcggcgccggggcgggatggagttacgagaggtcagcgaaagctaggcagagaatcctagttgatcgcaaggagtggagcgtttgccctcttgagtctggccacggactggtgccgttgcatgggaagagtcggatgtttcccggcttggtttatggcagctccaggacctcgcaccccgagacggacatcttacaccgccaggcctatgcggccccccacccactgcaaagctatgccaccaaccaccacccggcagatccgcagtccttcctggcaaacagggcaggggtagaagaggacccacagtgcctcgccccgttccgcgtggcagtggacaagcaccaggctctgctgaaggcagccatgagcgggcagggagttgaccgccacctgtttgcgctgtacatcgtgtcccgattcctccacctgcagtcgcccttcctgacccaggtccattcggagcagtggcagctgtccaccagccagatccctgttcagcaaatgcatctgtttgacgtccacaattacccggactatgtttcctcaggcggtggattcgggcctgctgatgaccatggttatggtgtttcttatatcttcatgggggatggcatgatcaccttccacatctccagcaaaaaatcaagcacaaaaacgcttagacttgcggagtcgagcgcggagctcttcctccctcagactcaggatctcagggctttggggctcttgtttctagaggtccgggatgtcgatttcccaggtaatcgtcacctccacaaagagcgactcgctgtataccgttggcatgctagctttatctgttcgggcaatacgatgcccattgtacttgttgactggtctgatattcgtgagcaaaaacgacttatggtattgcgagcttcagtcgcactacacggtcgttctgttactctttatgagaaagcgttcccgctttcagagcaatgttcaaagaaagctcatgaccaatttctagccgaccttgcgagcattctaccgagtaacaccacaccgctcattgtcagtgatgctgctttaaagtgccatggccgaaaaaatcagcgctcgacacggactcattgtcaccacccgtcacctaaaatctactcagcgtcggcaaaggagccatgggttctagcaactaacttacctgttgaaattcgaacacccaaacaacttgttaatatctattcgaagcgaatgcagattgaagaaaccttccgagacttgaaaagtcctgcctacggactaggcctacgccatagccgaacgagcagctcagagcgttttgatatcatgctgctaatcgccctgatgcttcaactaacatgttggcttgcgggcgttcatgctcagaaacaaggttgggacaagcacttccaggctaacacagtcagaaatcgaaacgtactctcaacagttcgcttaggcatggaagttttgcggcattctggctacacaataacaagggaagacttactcgtggctgcaaccctactaggctcaaaatttaatcacacatggtctcttcggccccagcgtcgacgcaccgcctccaaaacggggcttcaaacgtcctaaactcccagaacttcgtttacagcgcttcttcggtggggtgatcacccctccgctggaatcctattcgctcccatccgatcctgttcacctcttccccccccgccgaccccctcggcagcttactgcttctccgcttcgcgcccgagctccgtatgaatgttcatcatgcaaagatgct

SEQ ID NO: 133358 - DNA, 2624 bp, Homo sapiens
atgatcaccgtgaaagacttccagaaagcggaacgtaaaccgaacgcctgtaaagacgagcaaggccgtctgcgtgttggtgcagcggttggcgcaggtgcgggtaacgaagagcgtgttgacgcgctggttgccgcaggcgttgacgttctgctgatcgactcctcccacggtcactcagaaggtgtactgcaacgtatccgtgaaacccgtgctaaatatccggatctgcaaattatcggcggcaacgtggcaacagctgcaggtgcacgcgctctggcagaagctggttgcagtgcggttaaagtcggcattggccctggctctatctgtacaactcgtatcgtgactggcgtcggtgttccgcagattaccgctgttgctgacgcagtagaagccctggaaggcaccggtattccggttatcgctgatggcggtattcgcttctccggcgacatcgccaaagctatcgccgctggcgcaagcgcggtgatggtaggttccatgctggcgggtactgaagaatctccgggtggtttccgtctgggcttcttgcattctgggacagccaagtctgtgacttgcacgtactcccctgccctcaacaagatgttttgccaactggccaagacctgccctgtgcagctgtgggttgattccacacccccgcccggcacccgcgtccgcgccatggccatctacaagcagtcacagcacatgacggaggttgtgaggcgctgcccccaccatgagcgctgctcagatagcgatggtctggcccctcctcagcatcttatccgagtggaaggaaatttgcgtgtggagtatttggatgacagaaacacttttcgacatagtgtggtggtgccctatgagccgcctgaggttggctctgactgtaccaccatccactacaactacatgtgtaacagttcctgcatgggcggcatgaaccggaggcccatcctcaccatcatcacactggaagactccagtggtaatctactgggacggaacagctttgaggtgcgtgtttgtgcctgtcctgggagagaccggcgcacagaggaagagaatctccgcaagaaaggggagcctcaccacgagctgcccccagggagcactaagcgagcactgcccaacaacaccagctcctctccccagccaaagaagaaaccactggatggagaatatttcacccttcagatccgtgggcgtgagcgcttcatccccgtaatcgtcacctccacaaagagcgactcggctgtataccggtggcatgctagctttatctgttcgggcaatacgatgcccattgtacttgttgactggtctgatattcgtgagccaaaacgacttatggtattgcgagcttcaggtcgcactacacggtcgttctgttactctttatgagaaagcgttcccgctttcagagcaatgttcaaagaaagctcatgaccaatttctagccgaccttgcgagcattctaccgagtaacaccacaccgctcattgtcagtgatgctggctttaaagtgccatggtataaatccgttgagaagctgggttggtactggttaagtcgagtaagaggaaaagtacaatatgcagacctaggagcggaaaactggaaacctatcagcaacttacatgatatgtcatctagtcactcaaagactttaggctataagaggctgactaaaagcaatccaatctcatgccaaattctattgtataaatctcgctctaaaggccgaaaaaatcagcgctcgacacggactcattgtcaccacccgtcacctaaaatctatctcagcgtcggcaaaggagccatgggttctagcaactaacttacctgttgaaattcgaacacccaaacaacttgttaatatctattcgaagcgaatgcagattgaagaaaccttccgagacttgaaaagtcctgcctacggactaggcctacgccatagccgaacgagcagctcagagcgttttgatatcatgctgctaatcgccctgatgcttcaactaacatgttggcttgcgggcgttcatgctcagaaacaaggttgggacaagcacttccaggctaacacagtcagaaatcgaaacggaagacttactcgtggctgcaaccctactagctcaaaatttattcacacatggttacgctttggggaaattatgaggggatctctcagtaaacagcagcaaaacgaaaaataccaagtgcctcaattcgatcaatcaacgattaaaaatattgagtctgcaaaaggacttgatgtgtgggacagctggccgctgcaaaacgctgacggaacagtagctgaatacaacggctatcacgttgtgtttgctcttgcgggaagcccgaaagacgctgatgacacatcaatctacatgttttatcaaaaggtcggcgacaactcaatcgacagctggaaaaacgcgggccgtgtctttaaagacagcgataagttcgacgccaacgatccgatcctgaaagatcagacgcaagaatggtccggttctgcaacctttacatctgacggaaaaatccgtttattctacactgactattccggtaaacattacggcaaacaaagcctgacaacagcgcag

SEQ ID NO: 133359 - DNA, 1353 bp, Homo sapiens
atgtgcgaactcgatattttacacgactctctttaccaattctgccccgaattacacttaaaacgactcaacagcttaacgttggcttgccacgcattacttgactgtaaaactctcactcttaccgaacttggccgtaacctgccaaccaaagcgagaacaaaacataacatcaaacgaatcgaccgattgttaggtaatcgtcacctccacaaagagcgactcgctgtataccgttggcatgctagctttatctgttcgggcaatacgatgcccattgtacttgttgactggtctgatattcgtgagcaaaaacgacttatggtattgcgagcttcagtcgcactacacggtcgttctgttactctttatgagaaagcgttcccgctttcagagcaatgttcaaagaaagctcatgaccaatttctagccgaccttgcgagcattctaccgagtaacaccacaccgctcattgtcagtgatgctggctttaaagtgccatggtataaatccgttgagaagctgggttggtactggttaagtcgagtaagaggaaaagtacaatatgcagacctaggagcggaaaactggaaacctatcagcaacttacatgatatgtcatctagtcactcaaagactttaggctataagaggctgactaaaagcaatccaatctcatgccaaattctattgtataaatctcgctctaaaggccgaaaaaatcagcgctcgacacggactcattgtcaccacccgtcacctaaaatctactcagcgtcggcaaaggagccatgggttctagcaactaacttacctgttgaaattcgaacacccaaacaacttgttaatatctattcgaagcgaatgcagattgaagaaaccttccgagacttgaaaagtcctgcctacggactaggcctacgccatagccgaacgagcagctcagagcgttttgatatcatgctgctaatcgccctgatgcttcaactaacatgttggcttgcgggcgttcatgctcagaaacaaggttgggacaagcacttccaggctaacacagtcagaaatcgaaacgtactctcaacagttcgcttaggcatggaagttttgcggcattctggctacacaataacaagggaagacttactcgtggctggaaccctactagctcaaaatttattcacacatgaaacatggatgcaactggaggccattatcctaaatgaattaatggggaaacggaaaatcaaataccgcattttctcacgtataagtgagactggcacactgggtactcatgaacatggagatagaaacaatagatactgcggactcctaaaggaggcaggaagggag

SEQ ID NO: 133360 - DNA, 2047 bp, Homo sapiens
atgagccgcctgctctggaggaaggtggccggcgccaccgtcgggccagggccggttccagctccggggcgctgggtctccagctccgtccccgcgtccgaccccagcgacgggcagcggcggcggcagcagcagcagcagcagcagcagcagcagcaacagcagcctcagcagccgcaagtgctatcctcggagggcgggcagctgcggcacaacccattggacatccagatgctctcgagagggctgcacgagcaaatcttcgggcaaggaggggagatgcctggcgaggccgcggtgcgccgcagcgtcgagcacctgcagaagcacgggctctgggggcagccagccgtgcccttgcccgacgtggagctgcgcctgccgcccctctacggggacaacctggaccagcacttccgcctcctggcccagaagcagagcctgccctacctggaggcggccaacttgctgttgcaggcccagctgcccccgaagcccccggcttgggcctgggcggagggctggacccggtacggccccgagggggaggccgtacccgtggccatccccgaggagcgggccctggtgttcgacgtggaggtctgcttggcagagggaacttgccccacattggcggtggccatatccccctcggcctgcttaacgttggcttgccacgcattacttgactgtaaaactctcactcttaccgaacttggccgtaacctgccaaccaaagcgagaacaaaacataacatcaaacgaatcgaccgattgttaggtaatcgtcacctccacaaagagcgactcgctgtataccgttggcatgctagctttatctgttcgggcaatacgatgcccattgtacttgttgactggtctgatatccgtgagcaaaaacggcttatggtattgcgagcttcagtcgcactacacggtcgttctgttactctttatgagaaagcgttcccgctttcagagcaatgttcaaagaaagctcatgaccaatttctagccgaccttgcgagcattctaccgagtaacaccacaccgctcattgtcagtgatgctggctttaaagtgccatggtataaatccgttgagaagctgggttggtactggttaagtcgagtaagaggaaaagtacaatatgcagacctaggagcggaaaactggaaacctatcagcaacttacatgatatgtcatctagtcactcaaagactttaggctataagaggctgactaaaagcaatccaatctcatgccaaattctattgtataaatctcgctctaaaggccgaaaaaatcagcgctcgacacggactcattgtcaccacccgtcacctaaaatctactcagcgtcggcaaaggagccatgggttctagcaactaacttacctgttgaaattcgaacacccaaacaacttgttaatatctattcgaagcgaatgccaaattgaagaaaccttccgagacttgaaaagtcctgcctacggactaggcctacgccatagccgaacgagcagctcagagcgttttgatatcatgctgctaatcgccctgatgcttcaactaacatgttggcttgcgggcgttcatgctcagaaacaagagcaccctttgtggtcgctggcgctggttaggaggagatcccctgcccagagccctcatgtggggacaggatcttccggcagcactgggtgttcaagtcaggcaccgtgtatgaaatctaacaatgcgctcatcgtcatcctcggcaccgtcaccctggatgctgtaggcataggcttggttatgccggtactgccgggcctcttgcgggatatcgtccattccgacagcatcgccagtcactatggcgtgctgctagcgctatatgcgttgatgcaatttctatgcgcacccgttctcggagcactgtccgaccgctttggccgccgcccagtcctgctcgcttcgctacttggagccactatcgactacgcgatcatggcgaccacacccgtcctgtggatctacccactagtcaattcaccatcttgttga

SEQ ID NO: 133361 - DNA, 4247 bp, Homo sapiens
atgtgcgaactcgatattttacacgactctctttaccaattctgccccgaattacacttaaaacgactcaacagcttaacgttggcttgccacgcattacttgactgtaaaactctcactcttaccgaacttggccgtaacctgccaaccaaagcgagaacaaaacataacatcaaacgaatcgaccgattgttaggtaatcgtcacctccacaaagagcgactcgctgtataccgttggcatgctagctttatctgttcgggcaatacgatgcccattgtacttgttgactggtctgatattcgtgagcaaaaacgacttatggtattgcgagcttcagtcgcactacacggtcgttctgttactctttatgagaaagcgttcccgctttcagagcaatgttcaaagaaagctcatgaccaatttctagccgaccttgcgagcattctaccgagtaacaccacaccgctcattgtcagtgatgctggctttaaagtgccatggtataaatccgttgagaagctgggttggtactggttaagtcgagtaagaggaaaagtacaatatgcagacctaggagcggaaaactggaaacctatcagcaacttacatgatatgtcatctagtcactcaaagactttaggctataagaggctgactaaaagcaatccaatctcatgccaaattctattgtataaatctcgctctaaaggccgaaaaaatcagcgctcgacacggactcattgtcaccacccgtcacctaaaatctactcagcgtcggcaaaggagccatgggttctagcaactaacttacctgttgaaattcgaacacccaaacaacttgttaatatctattcgaagcgaatgcagattgaagaaaccttccgagacttgaaaagtcctgcctacggactaggcctacgccatagccgaacgagcagctcagagcgttttgatatcatgctgctaatcgccctgatgcttcaactaacatgttggcttgcgggcgttcatgctcagaaacaaggttgggacaagcacttccaggctaacacagtcagaaatcgaaacctcaaaatttattcacacatggttacgctttggggaaattatgaggggatctctcagtaccaagtgcctcaattcgatcaatcaacgattaaaaatattgagtctgcaaaaggacttgatgtgtgggacagctggccgctgcaaaacgctgacggaacagtagctgaatacaacggctatcacgttgtgtttgctcttgcgggaagcccgaaagacgctgatgacacatcaatctacatgttttatcaaaaggtcggcgacaactcaatcgacagctggaaaaacgcgggccgtgtctttaaagacagcgataagttcgacgccaacgatccgatcctgaaagatcagacgcaagaatggtccggttctgcaacctttacatctgacggaaaaatccgtttattctacactgactattccggtaaacattacggcaaacaaagcctggcagcagcgcaggtaaatgtgtcaaaatctgatgacacactcaaaatcaacggagtggaagatcacaaaacgatttttgacggagacggaaaaacatatcagaacgttcagcagtttatcgatgaaggcaattatacatccggcgacaaccatacgctgagagaccctcactacgttgaagacaaaggccataaataccttgtattcgaagccaacacgggaacagaaaacggataccaaggcgaagaatctttatttaacaaagcgtactacggcggcggcacgaacttcttccgtaaagaaagccagaagcttcagcagagcgctaaaaaacgcgatgctgagttagcgaacggcgccctcggtatcatagagttaaataatgattacacattgaaaaaagtaatgaagccgctgatcacttcaaacacggtaactgatgaaatcgagcgcgcgaatgttttcaaaatgaacggcaaatggtacttgttcactgattcacgcggttcaaaaatgacgatcgatggtattaactcaaacgatatttacatgcttggttatgtatcaaactctttaaccggcccttacaagccgctgaacaaaacagggcttgtgctgcaaatgggtcttgatccaaacgatgtgacattcacttactctcacttcgcagtgccgcaagccaaaggcaacaatgtggttatcacaagctacatgacaaacagaggcttcttcgaggataaaaaggcaacatttgcgccaagctctgatgaatcccctaatgattttggtaatcgtcacctccacaaagagcgactcgctgtataccgttggcatgctagctttatctgttcgggcaatacgatgcccattgtacttgttgactggtctgatattcgtgagcaaaaacgacttatggtattgcgagcttcagtcgcactacacggtcgttctgttactctttatgagaaagcgttcccgctttcagagcaatgttcaaagaaagctcatgaccaatttctagccgaccttgcgagcattctaccgagtaacaccacaccgctcattgtcagtgatgctggctttaaagtgccatggtataaatccgttgagaagctgggttggtactggttaagtcgagtaagaggaaaagtacaatatgcagacctaggagcggaaaactggaaacctatcagcaacttacatgatatgtcatctagtcactcaaagactttaggctataagaggctgactaaaagcaatccaatctcatgccaaattctattgtataaatctcgctctaaaggccgaaaaaatcagcgctcgacacggactcattgtcaccacccgtcacctaaaatctactcagcgtcggcaaaggagccatgggttctagcaactaacttacctgttgaaattcgaacacccaaacaacttgttaatatctattcgaagcgaatgcagattgaagaaaccttccgagacttgaaaagtcctgcctacggactaggcctacgccatagccgaacgagcagctcagagcgttttgatatcatgctgctaatcgccctgatgcttcaactaacatgttggcttgcgggcgttcatgctcagaaacaaggttgggacaagcacttccaggctaacacagtcagaaatcgaaacgtactctcaacagttcgcttaggcatggaagttttgcggcattctggctacacaataacaagggaagacttactcgtggctgcaaccctactagctcaaaatttattcacacatggctatcgccattgcacagtttaatgatgacagcccggaagcgaggaaaataacccggcgctggagaataggtgaagcagcggatttagttggggtttcttctcaggctatcagagatgccgagaaagcagggcgactaccgcacccggatatggaaattcgaggacgggttgagcaacgtgttggttatacaattgaacaaattaatcatatgcgtgatgtgtttggtacgcgattgcgacgtgctgaagacgtatttccaccggtgatcggggttgctgcccataaaggtggcgtttacaaaacctcagtttctgttcatcttgctcaggatctggctctgaaggggctacgtgttttgctcgtggaaggcctgcccgcagcagtgtcccttattcagtgcgtggcctacagagaccaagctctggccagaggagcagggtcagagcagacacaggagaccacagggcccatcctgtcggtgcagaggtggcttcaggtcttggagaatgaggaacgcgtcggcaaaggagccatgggttctagcaactaacttacctgttgaaattcgaacacccaaacaacttgttaatatctattcgaagcgaatgcagattggggagggcttccgagacttgaaaagtcctgcctacggactaggcctacgccatagccgaacgagcagctcagagcgttttgatatcatgctgctaatcgccctgatgcttcaactaacatgttggcttgcgggcgttcatgctcagaaacaaggttgggacaagcacttccaggctaacacagtcagaaatcgaaacgtactctcaacagttcgcttaggcatggaagttttgcggcattctggctacacaataacaagggaagacttactcgtggctgcaaccctactagctcaaaatttattcacacatggttacgctttggggaaattatga

SEQ ID NO: 133362 - DNA, 2599 bp, Homo sapiens
atggcgatgtttatgttgctggcggcggcgctgctttctacctttctgaccaacgatgtcgcgctgtatactgttgttccgctgactatcacgctaaaaagactgtgtgagatcccgtataatcggctgattatttttgagggcgctggcagtcaacgctggttcgctactgacgccaattggcaacccgcaaaatattcttatctggggacgttctggtctttcgtttgccggatttattgcccaaatggcaccgctggctggcgcaatgatgctgacgctcctgctcctgtgctggcgatgcaataccatacgggggtgcaaacaccggagtggaaaccgcggctggtgtggagttgtctggggctgtatatcgtctttctgacggcgctggagttcaaacaagagctgtggggactggtgattgtggcggcaggctttgcgctgctggcacgtcgcgtggtgctcagtgtggactggacgctgctgctggtgtttatggcgatgtttatcgacgtccatttactgacccagcttccagcgttgcaaggcgtgttgggtaacgtgatcagtaacgtgccgagtaccatattgttgctgaactatgtgccgccgtctttattactggtatgggcggtaaacgtaggtggctttgggtttttgacatgcaggcatgctagaatagccgcccccgcggatttaaaagacggtttagccgttcacgagaaaagggaaactcgaagcttaaccgaaaaaaccggtaaaatgctgctgccgaaactgggcgtgggatctcgggaatgtggcggtaacgtaaaagaagtcggtattcgcgccattgaagagtttggtccttacaaaatcaacggcgataaagagattatgcgtcgtatggacgacctgctacagggttttgatgcccagcatcgtatgaagttgccagctcagcctacatcccttgctacgaaatctgcacggcgcgtgcgctatccacttttttgcccgtccatattcaacggcttctttgaggagttcattttccatcgttttcttgccgagcaggcgctggagttctttaatctgcttcatggcggcagcaagttcagaggcaggaacaacctgttctccggcggcgacagcagccgaaaaaatcagcgctcgacacggactcattgtcaccacccgtcacctaaaatctactcagcgtcggcaaaggagccatgggttctagcaactaacttacctgttgaaattcgaacacccaaacaacttgttaatatctattcgaagcgaatgcagattgaagaaaccttccgagacttgaaaagtcctgcctacggactaggcctacgccatagccgaacgagcagctcagagcgttttgatatcatgctgctaatcgccctgatgcttcaactaacatgttggcttgcgggcgttcatgctcagaaacaaggttgggacaagcacttccaggctaacacagtcagaaatcgaaactgcaaaatggcaactcttaaggaaaaactcattgcaccagttgcggaagaagaggcaacagttccaaacaataagatcactgtagtgggtgttggacaagttggtatggcgtgtgctatcagcattctgggaaagagcagagcaatggagcacacaactgcaggggcaccatacacaccaaggcagcagacctgccagtgcaacatgatgtctctggctgatgaacttgctcttgtggatgttttggaagataagcttaaaggagaaatgatggatctgcagcatgggagcttatttcttcagacacctaaaattgtggcagataaagattattctgtgactgccaattctaagattgtagtggtaactgcaggagtccgtcagcaagaaggggagagtcggctcaatctggtgcagagaaatgttaatgtcttcaaattcattattcctcagatcgtcaagtacagtcctgattgcatcataaattgtggtttccaacccaagggacatttttaacgtatggtacctggaaactaagtggattacccaaacaccgcgtgattggaagtggatgtaatctggattctgctagatttcgctaccttatggctgaaaaacttggcattcatcccagcagctgccatggatggattttgggggaacatggcgactcaagtgtggctgtgtggagtggtgtgaatgtggcaggtgtttctctccaggaattgaatccagaaatgggaactgacaatgatagtgaaaattggaaggaagtgcataagatggtggttgaaagtgccctatgaagtccatccaagcctaaaagggatatacccacctgggctattggattaagtgtggctggatcttaaatgaatccatgttgaaaaatctatccagggattcatcccgtgtcaacaatggtaaaggggatgtatggcattgagaatgaagtcttcctgagccttccatgtatcctcaatgcccggggattaaccagcgttatcaaccccagaagtaaaggatgatgaggttgctcagctcaagaaaagtgcagataccctgtgggacatcccagaaggacctaaaagacctgtga

SEQ ID NO: 133363 - DNA, 3646 bp, Homo sapiens
atgagcacatcagcggaagaagacacaaatggctggacgatgagaggacatcgagggagcacgttggtggaaaagcacaacgacagatgctggcatgccagcaggccatcaaccagagggatgaggccaagtttggcctggctggagcagtcagaggagagccggggccgtcgagtgccccaactccaggggaaaactatctctcttttggttcctccatcgcctgagagctacttccactcaataacactttgcactctttctccaagcccacgcgtgatccgattcatccggcatagcaaggcaagagccaaggatacagaaagccctctgtccttgctacaagacaacaagatgtgcgaactcgatatttgtacacgactctctttaccaattctgccccgaagtacacttaaaacgactcaacagcttaacgttggcttgccacgcattacttgactgtaaaactctcactcttaccgaacttggccgtaacctgccaaccaaagcgagaacaaaacataacatcaaacgaatcgaccgattgttaggtaatcgtcacctccacaaagagcgactcgctgtataccgttggcatgctagctttatctgttcgggcaatacgatgcccatgccgacttgttgactgggctgatattcctgagcaaaaacaacttatggtcttgcgagcttcagtcgcactacacggtcgttctgtgactctttatgagaaagcgttccccgctttcagagcaatgttcaaacgaagctcatgaccaatttctagccgaccttggcgagcattctaccgagtaacaccacaccgctcattgtcagtgatgctggctttaaagtgccatggtataaatccgttgagaagctgggttggtactggttaagtcgagtaagaggaaaagtacaatatgcagacctaggagcggaaaactggaaacctatcagcaacttacatgatatgtcatctagtcactcaaagactttaggctataagaggctgactaaaagcaatccaatctcatgccaaattctattgtataaatctcgctctaaaggccgaaaaaatcagcgctcgacacggactcattgtcaccacccgtcacctaaaatctactcagcgtcggcaaaggagccatggattctagcaactaacttacctgttgaaattcgaacacccaaacaacttgttaatatctattcgaagcgaatgcagattgaagaaaccttccgagacttgaaaagtcctgcctacggactagggcttacgccataggcgaacgagcagctcagagcgttttgatatcatgctgctaatcgccctgatgcttcaactaacatgttggcttgcgggcgttcatgctcagaaacaaggttggggacaagcacttccaagcctaacacagtcagaaatcgaaacgtactctcatcagttcgcttaggcatggaagttttgcggcattctggctacacaataacaagggaagacttactcgtggctgcaaccctactagctcaaaatttattcacacatggaggagcgactcaagccttcgcgaaagaaaataaccaaaaagcatacaaagaaacgtacggcgtctctcatattacacgccatgatatgctgcagatccctaaacagcagcaaaacgaaaaataccaagtgcctcaattcgatcaatcaacgattaaaaatattgagtctgcaaaaggacttgatgtgtgggacagctggccgctgcaaaacgctgacggaacagtagctgaatacaacggctatcacgttgtgtttgctcttgcgggaagcccgaaagacgctgatgacacatcaatctacatgttttatcaaaaggtcggcgacaactcaatcgacagctggaaaaacgcgggccgtgtctttaaagacagcgataagttcgacgccaacgatccgatcctgaaagatcagacgcaagaatggtccggttctgcaacctttacatctgacggaaaaatccgtttattctacactgactattccggtaaacattacggcaaacaaagcctgacaacagcgcaggtaaatgtgtcaaaatctgatgacacactcaaaatcaacggagtggaagatcacaaaacgatttttgacggagacggaaaaacatatcagaacgttcagcagtttatcgatgaaggcaattatacatccggcgacaaccatacgctgagagaccctcactacgttgaagacaaaggccataaataccttgtattcgaagccaacacgggaacagaaaacggataccaaggcgaagaatctttatttaacaaagcgtactacggcggcggcacgaacttcttccgtaaagaaagccagaagcttcagcagagcgctaaaaaacgcgatgctgagttagcgaacggcgccctcggtatcatagagttaaataatgattacacattgaaaaaagtaatgaagccgctgatcacttcaaacacggtaactgatgaaatcgagcgcgcgaatgttttcaaaatgaacggcaaatggtacttgttcactgattcacgcggttcaaaaatgacgatcgatggtattaactcaaacgatatttacatgcttggttctgatgaatcccctaatgattttggtaatcgtcacctccacaaagagcgactcgctgtataccgttggcatgctagctttatctgttcgggcaatacgatgcccattgtacttgttgactggtctgatattcgtgagcaaaaacgacttatggtattgcgagcttcagtcgcactacacggtcgttctgttactctttatgagaaagcgttcccgctttcagagcaatgttcaaagaaagctcatgaccaatttctagccgaccttgcgagcattctaccgagtaacaccacaccgctcattgtcagtgatgctggctttaaagtgccatggtataaatccgttgagaagctgggttggtactggttaagtcgagtaagaggaaaagtacaatatgcagacctaggagcggaaaactggaaacctatcagcaacttacatgatatgtcatctagtcactcaaagactttaggctataagaggctgactaaaagcaatccaatctcatgccaaattctattgtataaatctcgctctaaaggccgaaaaaatcagcgctcgacacggactcattgtcaccacccgtcacctaaaatctactcagcgtcggcaaaggagccatgggttctagcaactaacttacctgttgaaattcgaacacccaaacaacttgttaatatctattcgaagcgaatgcagattgaagaaaccttccgagacttgaaaagtcctgcctacggactaggcctacgccatagccgaacgagcagctcagagcgttttgatatcatgctgctaatcgccctgatgcttcaactaacatgttggcttgcgggcgttcatgctcagaaacaagtgccgcaagccaaaggcaacaatgtggttatcacaagctacatgacaaacagaggcttcttcgaggataaaaaggcaacatttgcgccaagcttcttaatgaacatcaaaggcaataaaacatccgttgtcaaaaacagcatcctggagcaaggacagctgacagtcaactaa

SEQ ID NO: 133364 - DNA, 1508 bp, Homo sapiens
  misc_feature (1)...(1508): n = a,t,c or g
cgcgggccggnnngnaattgnaaatcgtacggcgttgaattcggcacgaggagacgcacgcagcctgactttgtcttctccggcacgactgctacagaggtctccagagccttcttctcatcctgtgcaaaatggcaactcttaaggaaaaactcattgcaccagttgcggaagagcgaggcgaacagttccaaacaataagatcacctgtagtgggtgtttggacaagttggtatggcagtgtgctatcagcattcctgggaaagtctcctggcctgatgaactttgctcttgtgggatgtttttgggaggataagcttaaaggagggaatgatggttccttccagcatggggagcttattttctttcagacaccctaaaattgtgggcaggataaaggattattcctgtgacccgccaattcctaaagatttgtaagttggtaactggcagggagtcccgtccagccaagaagggggagaatccggctccaatcctgggtgccagagaaatggttaatggtcttccaaattccattattcctcaagatcgtccaagtacagtccctgatttgcatcataattggtggtttcaacccccagttggacattcttacgtatgttaccctgggaaactaaagtgggattacccaaacaccgcgtgacttggaagtggatgtaatcgtggattcctgctagatttcgctaccttatggctgaaaaaacttggcatttcatcccaagcagctgcccatggatggaattttggggggaacatgggcgactccagtgttggctgtgtggaatggtgttaaatgtggcaggtgtttctcttccaggaattgaaatccagaaaatgggaacctgaccaatgataagttgaaaatttggaaggaaggtgcttagatatggtggttgaaaagtgccctatgaagtcatccaagctaaaaggatatccccaactgggggctatttggatttaagtgctggctgaatcttattggaatcccatgttgaaaaaatcttatcccaggattccatcccggttgtccaaccaatgggtaaaggcaggggatgtatgggcattggagaatggaaagtccttcccttgagccttctctatgtatccctcaatgcccccggggattaaacccagccgttatccaacccagaagcctaaaggatgatgaggttgcctcagcctcaagaaaaagtgccagaatacccctgtgggacaatccagaatggaccctaaaaagacctttgacttagggagcttctgggctgttagaaatttaaaaacttacaatgtgattaactccgagcctttaagttttcaatccatggtacatgggatcacaagtttgcctttgatcttcttcaaatattgtgaatttgggctcacagaattcaaaagcctattgcttgggttttaatggcttgcaaatctgaagctcttgaacaaaataaaattaactattggtagtgtgaaaaaaaaaaaaaaaaaaa

SEQ ID NO: 133365 - DNA, 406 bp, Homo sapiens
  misc_feature (1)...(406): n = a,t,c or g
ggagacagccggagtcgctgggggagctccgcgccgccggacgcccgtnaccatgtggaggctgctggctcgcgctagtgcgccgctcctgcgggtgcccttttnagattcctgggcactccaagttttgaagatgtttccattcctgaaaaacccaagcttagatttattgaaagggcaccacttgtgccaaaagtaagaagagaacctaaaantttaagtgacatacggggaccttccactgaagctacggagtttacagaaggcaattttgcaatcttggcattgggtggtggctacctgcattggggccactttgaaatgatgcgcctgacaatcaaccggtctatgggaccccaagaacatgtttgccatatggcgagtaccagccccttttcaagcccat

SEQ ID NO: 133366 - DNA, 786 bp, Homo sapiens
atgtggaggctgctggctcgcgctagtgcgccgctcctgcgggggttcgtgcaagagggtcacagctgcgtctgggagtcggcgcccagagatcccggctggccttttgcggagcctgagcctttgagtccatttagtggaatccgcatcccacacctcaagactcctccggcggaagaaaatagatcttttgagatgtatagttttactttatcctggttgtctgtgcttcttttagatgtttccattcctgaaaaacccaagcttagatttattgaaagggcaccacttgtgccaaaagcattgggtggtggctacctgcattggggccactttgaaatgatgcgcctgacaatcaaccgctctatggaccccaagaacatgtttgccatatggcgagtaccagcccctttcaagcccatcactcgcaaaagtgttgggcatcgcatggggggaggcaaaggtgctattgaccactacgtgacacctgtgaaggctggccgccttgttgtagagatgggtgggcgttgtgaatttgaagaagtgcaaggtttccttgaccaggttgcccacaagttgcccttcgcagcaaaggctgtgagccgcgggactctagagaagatgcgaaaagatcaagaggaaagagaacgtaacaaccagaacccctggacatttgagcgaatagccactgccaacatgctgggcatacggaaagtactgagcccatatgacttgacccacaaggggaaatactggggcaagttctacatgcccaaacgtgtgtag

SEQ ID NO: 133367 - DNA, 524 bp, Homo sapiens
tttcaggccaatgactactggctgagtggaccatgggacacacaccagtgggaggttttaggggagctatctcattagacgctgctccgtaagagcaaggaactatgttggtttcctggctctgtgatttatttctagtgctcagaatattagttggcaaaactgtaagctctaaaaacatatttattgaaagagtgaacggggatgggaaacacgagaacattcctatgtcatctcccccccgctcctggtttccatcagagaaaagatttacgaacaggagaaagacaagctctcaccttcaaaacttggtactgggagcagtgtctttacgccagcactggcggggaggagtgcccaggaatctgacaagggcacccgcaggagcggcgcactagcgcgagccagcagcctccacatggtcacgggcgtccggcggcgcggagctccctcagcgactccggctgtctcatgcacccaggtaagcagcggcgctccactacctagctgtaatcggcacgaaa

SEQ ID NO: 133368 - DNA, 755 bp, Homo sapiens
  misc_feature (1)...(755): n = a,t,c or g
gcgtgcgcaattccgacgaggtcctgagccgattacagctaggtagtggagcgccgctgcttacctgggtgcaggagacagccggagtcgctgggggagctccgcgccgccggacagcccgtgaccatgtggaggctgctggctcgcgctagtgcgccgctcctgcgggtgcccttgtcaggtcagaagtcccttttggttactaaagactttacccctcttcctcccccaccctccagtgctttttctccctaacccaaaaggcggctctgcatatgcttggtgaagcactggttaggaactacgctatcgcaccgccgacctccaccgtaggggttcgtgcaagagggtcacagctgcgtcctgggagtcggcgcccagagatcccggctggccttttgcggagcctgagcctttgagtccatttagtggaatccgcatcccacacctcaagactcctccggcggaagaaaatagatcttttgagatgtatagttttactttatcctgggttgtctgtgcttcttttagatgtttccattcctgaaaaacccaagcttagatttattgaaagggcaccactttgtgccaaaagtaaggaaggagaacctaaaanttttaagttgacatacgggggaccttccacttgaagctacgggagttttacagaagggcaattttgcaatcttngggatttgggtgggtgggnaacctgcatttgggggccacttttggaaatgatgcggccttgacaa

SEQ ID NO: 133369 - DNA, 1265 bp, Homo sapiens
actcaacctcccccggaactcaacccccgtcgctcgagtttctttcgcttccgtcgggactctgcggagtggacccgagtgaacacaacttccggccccactgagcggtgtcctgagccgattacagctaggtagtggagcgccgctgcttacctgggtgcaggagacagccggagtcgctgggggagctccgcgccagccggacgcccgtgaccatgtggaggctgctggctcgcgctagtgcgccgctccatgcggttgcccttgtcagattcctggggcactcctccccgccagtgctggcgtaaagacactgctcccagtaccaagttttgaagatgtttccattcctgaaaaacccaaagcttaagatttattggaaagggcacccacttgtgcccaaaagtaaagaagagaaccctaaaaatttaaagtgacaatacggggacccttcccactgaaagcctacggagttttacagaaaggcaatttttgcaatcttgggcattggggtggttggctacctgcattgggggccacttttgaaaatgatggcgcctgacaattcaaccggctctatggaccccaagaacatggtttgccatatggcgaagtaccagcccctttcaagcccatcactcgcaaaagtgttggggcatcgcatgggggggaggcaaaaggtgctatttgacactacctgacaccctgtgaaggctggccgccttgtttgtagagatgggtgggcgttgtgaatttgcaagaagtgccaaggtttccttgacccaggttgccctacgaagttgccccttcgccagcaaaaggctgtgagcctgcgggactcctagagaaggatgcgaacaagatcaagaggaaagagaacgtcaacaacccagaaccccttggaccatttgagcggaatagccgactgcccaacatggctgggcatacgggaaagtacctgagccccatatgacgttgaccccacaaggggaaatacttggggcaaggttctacatgcccaaaacgtgtgtagtgagtgtaggagatatactgtatataggctactgaaagaacggattctgccatttctattcccctcgagcctacccgactgaagtctttgggtagctcttaagaccataactaagtgagcagcatttgagtagatttctgaaaaacaatgttatttgttgatttaaaaagaaaactgtatttttattaaataaaatttaaacatcacttcaggaaaaaaaaaaaaaaaaaaa

SEQ ID NO: 133370 - DNA, 541 bp, Homo sapiens
  misc_feature (1)...(541): n = a,t,c or g
ccgcctcgggccgcagagcttgccccctccccacccgcagacatgttcgagtccaagaacggccccgagtatgcttcgtttttccccgtcatgggcgcctcggccgccatggtcttcagcgccctgggccctgcctatggcacaaccaagagcggtaccggcatttcggccatgtctgtcattcggccggagcagatcatgaagtccatcatcccagtggtcatggctggcatcatcgccatttccggcctggtggtggcagtcctcatcgccaactccctagagtgctctgtgtatgcggatgatttagaaatgtcatttctctttcctcggatgtttatttataaagatctggcctgttcctgcgtctccggaacggcccttgtttcccagctatttataaccttagttagagggtccccctgtgggttcctgttgtttagacttcctggatggaaccgccctccccgccgggcccgtggccctgcacggaactgtgtcccccaaagtttttggatgtgnnnnnnnnnnnnnnnnnnnn

SEQ ID NO: 133371 - DNA, 1261 bp, Homo sapiens
  misc_feature (1)...(1261): n = a,t,c or g
acgcgtctcccccacggtgcgaagtgggtacggctcgcaggggcggggccaggtcatgtgacgcggccgcgccgccattttgttctgcggtgctggtatttagagcgcagcggctgacgggccggatcgccttcgccgccgcccgcccgcaaaccttcgtgcccggcccgtcctcgcccccgcctccgccaccgcctcggcccgcagagcttgctcccctccccacccgcagacaatgtccgagtccaaaacgctgccccgagtatgcttcgtttttcgccgtcatgggcgcctcggccgccattggtcttcagcgccctgggcgctgcctatggcacagccaaggagcggtaccggcattgcggccatgtctgtcatgcggccggagcagatcatgaagtccatcatcccagtggtcatgggctggcatcatcgccatgttacggcctgggtgggtggcagtcctcatcgccaactccctgaatgacgacatcagcctttacaaaagcctttctccagctgggcgccggcctgagcgtgggcctgagcggcctggcacagccggcgtttgccaatcggattcgttgggggacgctggcgtgcgggagcaccgccatgcatgccgccgacatattccgtggggcatgattcctgattctcatctttcgccgaggtgcttcgcctttaacggtctcatcgttcgccctcatccttttccacaaagtagaccttttccgagcccaccagcccacagaatatttgtaaaggaccacccctcctcattccagaaggaacagcctgacacatacggcaacggccgcccgccgcccaagtaagttggtcttgtaacatgcgcaagtgtcctagtgcccatcgttctgtttcccccgccttgcccccgccncgccccgtgccgtgggacatctggggcccactcattcgccccttccagggcccccggcggccccacccccttaggagtggttttgtgttatggcgggtggattttaggatttgttcattttttctttaatgggatgttttattttattaaagatctgggcctgttcctgcggtctgcgggagggccccttgttttcccagctatctattaaccttagctagaagtgtcgccttgtggggttcctgttgctgagacttttcctggatggagccagccctgtctatccgcgcccgtggccctgcgcggagctgtgtcccataaaagtttttgggtggtgaaaaaaaaaaagaaaaaaaa

SEQ ID NO: 133372 - DNA, 652 bp, Homo sapiens
gcggccgccgcgtgtactacgatgaaggggtggccagcagcgacgatgactccagcggagacgagtccgacgatgggacctccggatgcctccgctggtttcagcatcggcgaaatcgccgccgccgaaagccccagcgcaacttactccgcaactttctcgtgcaagccttcgggggctgcttcggtcgatctgagagtccccagcccaaagcctcgcgctctctcaaggtcaagaaggtacccctggcggagaagcgcagacagatgcgcaaagaagccctggagaagcgggcccagaagcgcgcagagaagaaacgcagtaagctcatcgacaaacaactccaggacgaaaagatgggctacatgtgtacgcaccgcctgctgcttctaggtgctggagaatctggtaaaagcaccattgtgaagcagatgaggatccctgatgttaatgggtttaatggagagggcggcgaagaggacccgcaagctgcaaggagcaacagcgatggtgagaaggcaacccaagtgaaggacatcaaaacaacctggaagaagccattgaacccatgtggccgcttaaccaaacctgtgccccccgtgagctggccacccccgaaacccattcagagggactacttcctgatggatga

SEQ ID NO: 133373 - DNA, 1753 bp, Homo sapiens
gcagtcgcggcctcgagtgcggtccgcctcactcccgccgcgaacgcgcctcccctctgggtcccaggcgccatcggcagcccatcccaagaggctgtcagacctccttctaacttcacgggcagcagcccctggatggagatctccggacccccgttcgagattggcagcgcccccgctggggtcgacgacactcccgtcaacatggacagccccccaatcgcgcttgacggcccgcccatcaaggtctccggagccccagataagagagagcgagcagagagacccccagttgaggaggaagcagcagagatggaaggagccgctgatgccgcggagggaggaaaagtaccctctccggggtacggatcccctgccgccggggcagcctcagcggataccgctgccagggcagcccctgcagccccagccgatcctgactccggggcaaccccagaagatcccgactccgggacagcaccagccgatcctgactccggggcattcgcagccgatcccgactccggggcagcccctgccgccccagccgatcccgactccggggcggcccctgacgccccagccgatcccgactccggggcggcccctgacgccccagccgatccagatgccggggcggcccctgaggctcccgccgcccctgcggctgctgagacccgggcagcccatgtcgccccagctgcgccagacgcaggggctcccactgccccagccgcttctgccacccgggcagcccaagtccgccgggcggcctctgcagcccctgcctccggggccagacgcaagatccatctcagaccccccagccccgagatccaggctgccgatccgcctactccgcggcctactcgcgcgtctgcctggcggggcaagtccgagagcagccgcggccgccgcgtgtactacgatgaaggggtggccagcagcgacgatgactccagcggagacgagtccgacgatggggacctccggatgcctccgctggtttcagcatcggcgaaatcgcgcgcgccgaaagccccagcgcaacttactccgcaactttctcgtgcaagccttcgggggctgcttcaggtcgatctgagagtccccagcccaaagcctcgcgctctctcaaggtcaagaaggtacccctggcggagaagcgcagacatgatgcgcaaagaagccctggagaagcgggcccagaagcgcgcagagaagaaacgcagtaagctcatcgacaaacaactccaaggacgaaaagatgggctacatgtgtacgcaccgcctgcttgcttctagggagaaaagtggtgccgagcgacactgagggtcgtttccggctggacaggccagcgccagcaaccgtaagctggacaggcaggggcttcagcgtttcctcacttctcattcgttcgccaaaccctcccgcctttacagttgaaaaaccagacacacaggtgctggagaatctggtaaaagcaccattgtgaagcagatgaggatcctgcatgttaatgggtttaatggagagggcggcgaagaggacccgcaggctgcaaggagcaacagcgatggaatataatatccctagatgatggctacagtttctcatcttcccggctatgtcctatcacaatttgcatgctggaattgctcggtcttaggaacttctaataagaatactattctgttatctgaggggggaggggggatggggcccctgctacctgaccttaaacgatgattg

SEQ ID NO: 133374 - DNA, 2883 bp, Homo sapiens
atgctgagcctgcacaagtgtaaggaagcaccaagcacctcctgcaagccgtcctggcatcctcttccccagagggcctttggctccgagccctcgtccgcaatgaccactttcactgccctctaccacagctttggtgcacagaccaacatctctccagagcagagcacgagctcctcctcattcttcttaactgctgtgtcctattcaattgatggctgcaccatcgttgacctacagactttctcttccaacatcatgggccatgaggagcaagaggtggacggagaggtggagatggcacagtctgtcactaaggcccaggtggctggggacatagaatgcacaggaaacacgcggcctggtttggactttttctcctccaggctggcacctgacacctttccgaagccccatgatgacaccaacacccaggcccagagggaccctgggatggtttgtaatacagagaaaggaagtctgcagacagccaactctgctccccaaagtggctctcaggagacacacagcgaggcccaccagcatcttgctctgggctccttcctccaagttctcctggattcacagccacagagccctgctgtggttgacagctccagtagctggtgcctatgggcaaacggctgtggggaagcctcggtgcctgccctgtgcccggtgctgtctccatgggttgggggaggccgtgctgctcctggggctcctgcacgcagtcactcagctaagtatctgaccccagctcaagcaaaagtcacaggacctgcattaggcatggttggccgacatttcctgatggctgcagccacagatgaggagaagtggggggatcagctctgtaaaagggaagagcggctccatcagactctcaccaaagcccatcctcagcttgcacccctcaacttggctgttgagtccaagccaaaagcactagatggtgttctagatggttctctgaaaatgctgcactttctcaggtcacgtgagcttaaaggaccatggtgcctgctggagtcccgagggctttggggatcagtccaggcagcattctgcagtcaggaaaacaacattgaaaaccaaaacccacaattacaaagcatagaagcctggtttacgttcaccgatggcacagttagaacccacggcagcctccagctgaaacgatctgttcccattggctgcataagaaactcagtgatgtcatggacccctttgcctcccttaaatcagtttagcagttaccccaacttcacaaccgtgcagaagccccaggtcgcacaggttgtttgtgaaagggaagggggcatccaaaccccgatggcccagcagattcacgtatgctggctgatgaaggtgctgagagacgaagttgaggagagatggcccctgccctcccagggttcacagtcccgccaggaggacaggtgctcatcacagtattacccaaagaaatacaccacaaactgggatgactgccgtgaagtatgggcagaggaggaggaggaggaggaggaggaggagttggatgatgaggagtgggggaaggaggagagaaggaagaggaagaagaagaagagaaagggcagctggcaccgtctgctcctgctaccaggggtgcgcccgcatggacacaggatgcagggtcagggagcaggggaggaactgagtctcccttgtgcaggcacaaaggcggcctcaggaccagggacccagctgggcaccagctgctggctggcctggcctgcctgccggcgtcggggggcccacggggcctcagcggatacagctgccagggcagcccctgcagcgccagccgatcctgactccggggcaaccccagaagatcccgactccgggacagcaccagccgatcctgactccggggcattcgcagccgatcccgactccggggcagcccctgccgccccagccgataccgactccggggcggccccctgacgccccagccgatccggactccggggcggcccctgacgccccagccgatccagatgccggggcggccccttaggctccccccggcccctgcggctgctgagacccgggcagcccatgtcgccccagctgcgccagacgcaggggctcccactgccccagccgcttctgccacccgggcagcccaagtccgccgggcggcctctgcagcccctgcctccggggccagacgcaagatccatctcagaccccccagccccgagatccaggctgccgatccgcctactccgcggcctactcgcacgtctgcctggcggggcaagtccgagagcagccgcggccgccgcgtgtactacgatgaaggggtggccagcagcgacgatgactccagcggagacgagtccgacgatgggacctccggatgcctccgctggtttcagcatcggcgaaatcgccgccgccgaaagccccagcgcaacttactccgcaactttctcgtgcaagccttcgggggctgcttcggtcgatctgagagtccccagcccaaagcctcgcgctctctcaaggtcaagaaggtacccctggcggagaagcgcagacagatgcgcaaagaagccctggagaagcgggcccagaagcgcgcagagaagaaacgcagtaagctcatccgacaaacaactccaggacgaaaagatgggctacatgtgtacgcaccgcctgctgcttctaggtaatgcggcggactctgcctgcgggcagcagggccgccggggaaccggggagggggtggcagggctgcctggagtaaaaattaactttaagaaaaggaaatttgctggggtcaccttgtaccttgtcctggctttgttctcgggtgctggtagccaaacacctttggatgcagcatag

SEQ ID NO: 133375 - DNA, 297 bp, Homo sapiens
ttttttttcacaagcacgtgcactttattgaatgacactgtagacaggtgtgtgggtataaactgctgtatctaggggcaggaccaatctaccctgtaagaccttctctggtcaaaaaacaaacaggattaattttccctcctctgacttgcaacagtacgtaacggtagtaactcttgaagtgcatcggcccatcatactaaatcaaaatcagactgtctctcctgtgaattcctctagtgcagggggcatgtcttacttgtcttataaataatagtaaaaaaatgataaaggtac

SEQ ID NO: 133376 - DNA, 934 bp, Homo sapiens
ctagtcctgacttgagtttctgatgaggaagcctctctccttagccttcagcctttcctcccaccctgccataaagtaatttgatcctcaagaagttaaaccacacctcattggtccctggctaattcaccaatttacaaacagcaggaaatagaaacttaagagaaatacacacttctgagaaactgaaacgacaggggaaaggagggctcactgagcaccgtcccaagcatccggaacaccgacagcggccacttagctccacgcagaaaaccacaacttctcaaaccttcactcaacacttccttccccaaagcccggaagatccacaagggggaacatgaggtggctagtgctgggggcaaccccccagcacccatccttcccaaggtcccaccgtgattcaacatccacaggcgaggacctccgtggcccgaccatgttcgttttgggtccctgtttcaacaccctcttcttggaactgggtgctgtctgggggtttcattagcattccgcctacttccgtgaaagtctagggacacagggaagatgggtttgggcgacgttgaaccgggggcccaggccttatgcctccccccgcccaagtgcctgaacatcttgggccctgattctggggcatccttcatgaccattggattcatccttgttactggtattcggctctgttgacagtcttaccatattatggttccagataatacagggaaaaacggggggttactagttaggccgcccatagcctgcaacctttgcacctccactgtgcaatgcttggccctgcgacggctggggctgttgcccctgcccccttggtcctgcccctagatacagcagtttatacccacacacctgtctacagtgtcattcaataaagtgcacgtgcttgtgaaaaaaaaaaaaaaaaaaaaaaacc

SEQ ID NO: 133377 - DNA, 325 bp, Homo sapiens
  misc_feature (1)...(325): n = a,t,c or g
cttctccagccaggagctggcaagcctctttgcccctagcatggggctgcccgggggtggctccccgaccaccttcctcttccggaccatgtccgagtcccctcacatgtttgactctccccccagccctcaggattctctctcggaccaggagggctacctgagcagctccagcagcagccacagtggatcagactcccccacctngnacaaatcaagacgcctgcccatcttcagcagactttccatctcagatnactaagncagggtctgcaggaaggaaggctgaaaaagcggacgaagatgttggacttaagtgggactt

SEQ ID NO: 133378 - DNA, 3503 bp, Homo sapiens
  misc_feature (1)...(3503): n = a,t,c or g
atggggagggcccggaagtcgggcctgggacagaggagccggcccaccgcctcccggtcggaagcggcagtgcagcccggagtcagaaaggcgaggggcgccgggaactggcgtgtgggactccagacaggagaggctgcgccttccccgcaccgggaccttcgcgacacaccagatcctcgcccctggctcgcgcgaacgcacaggatgaccaccaccctcgtgtctgccaccatcttcgacttgagcgaagttttatgcaagggtaacaagatgctcaactatagtgctcccagtgcagggggttgcctgctggacagaaaggcagtgggcacccctgctggtgggggcttccctcggaggcactcagtcaccctgcccagctccaagttccaccagaaccagctcctcagcagcctcaagggtgagccagcccccgctctgagctcgcgagacagccgcttccgagaccgctccttctcggaagggggcgagcggctgctgcccacccagaagcagcccgggggcggccaggtcaactccagccgctacaagaccggagctgtgccgcccctttgaggaaaacggtgcctgtaagtacggggacaagtgccagttcgcacacgggattcacgagctctcgcaggctgaccctgcacaccaaggactagacggagctgtgccgcaccttccacaccatcggcttttgcccctacgggccccgctgccacttcatccacaacgctgaagagcgccgtgccctggccggggcccgggacctctccgctgaccgtccccgcctccagcatagctttagctttgctgggtttcccagtgccgctgccaccgccgctgccaccgggctgctggacagccccacgtccatcaccccacccccctattctgagcgccgatgacctcctgggctcacctaccctgcccgatggcaccaataacccttttgccttctccagccaggagctggcaagcctctttgcccctagcatggggctgcccgggggtggctccccgaccaccttcctcttccggcccatgtccgagtcccctcacatgtttgactctccccccagccctcaagattctctctcggaccacagagggctacctgagcagctccagcagcagccacagtggctcagactccccgaccttggacaactcaagacgcctgcccatcttcagcagactttccatctcagatgactaagccagggtagggagggacctcctgcctactccagacccctaccctgcaccccacatccccataccctcttctccctacccatcccattccccacaggccctacattaacaaggttaaggctcaacccctttcccccagcacctcagaatgtgccctccctctccccctcataaccccacctaacataaggacaagtcaatttgtcagtagcttcttctgggcttgaaaccccctccctggattttatagcccagttaccatgcataacagacaagtcccatattttgtcagtagatgcctttttttttccgggcttaaggctttaagtgccaaattcacaagagaaaaagcagtaacagtttacagaagcaacttagtgccttgtaatctaactttgtcactgtgactacattaccttcttcagcgccagaggggaccccgtgggcctccccggagcctctgcccatggcggggtggagacccggaaccagcagccccctccactggcgacacaactgcaccttccctcatttcagtctcccgcacacttattcctcctcccctcttcccggtggcacctctccaccctgtaccagcccccccaccccccccacccctgccccttggaagagttgttgccagacccagggttttgggggaaacctggtcttgacattcaaaacctttttcttcccgatctgacacccctgttgacctaatcttgcctgggtttgtgtaggtctgcaggaaggaaggctgaaaaagcggacgaagattttgacttaagtgggactttgtgatttaattttttcttttttttaagtggggaggaaggggaagctagatggactaggagagacttgattttggtgctaaagttccccagttcatatgtgacatctttttaaaaaaaataacaacaaaaaaaaaaatgagagaaaagctaaaaaaaaaaaaagtaaggggtgagcagttaatggtattcattccacatacaatatctgtgtaaaacgatttcctggagaagtagctttaagtggtttttgctctagaataccgtaggtctatccttagagcactcanccgcccagctttcttccctgggttttaaacttcaatataactttcaggaaattgggagagcaaaaattttgcttgtcactggcacatccaatattaaaaaagcttattttaaccttttcaaaaccgtatttattggcccaaactatgctttttttttgttaattttgttcatatttatccgggatgacaaatccatagaatatattcttttatgttaaattatgatcttcatattaatccttaaaattttgtgacgtgtctttttccttttttttccacagttttaatatattattccttcaacggacattttttgtaactttacacttttttgggttattttatttttaaaaaaatggaaaaattaattttaaaaaaatggcaaaaactgttgggattatttattttaggaaattcccccctttgtgttgggactgcaaattgagtttctttctctttagggcctttcacaactagggactgaggaatgtatgtaaaaaggttctgtggacagtacagaaggaaaacaactttttatgtatagcttctaaaagggggaaaagaaaaaaaaaaaaaaaaaaaaaaagagaaaccctttgacttcccacgtgcccatctcaagacattccactcacagatttgaggttcctggattccaggtctggagttttccaatgttaatgtaaacaggaactgggcacacacacattaagatgaatgtaattattattcctcttggctggtcactaccgtcgctttcatatttctctttcttatgtgtgaaatttatttaaaagcaaaaaaaaacttttgtgtaacgacctatttgcagatttaaaacatcatataaaccccgttttttcaagaaacattgatggtggagctggttttacttggttttggtttgactttgccagtaaggttctccccttgtataccttgcaagtcctggggagggggaggcggagagagagggctgtggctgtgggtggcggcatctctcatccctataagctaagcctatagctcccttccttgatgctggcagtttgctgcacttagaggggacggggtggaggttttctgcaaaggagcctgtacttcctgctgtattacttctgaaaagactgtgcagtgtgttagttgttggctgaatagcagcgggcccagccttgccgacacttgtgtggcc

SEQ ID NO: 133379 - DNA, 456 bp, Homo sapiens
ggaggagtatgctcacgccaagcttggcacgagggcaggtgagcgagctcagggacctctgggttcacgggggcggggtgtctcctactgtgccggcggctgtgggcgaggcagggcgaggcgggcccaacctggggccaacttctcgtgtacctgtcccggttgtgggcccggcacccgtgcccgcttctctggtgccctaggtcaaggcgtccccggcacagtcagctttcctggccctgtccctgcctcgcaagaagcgtgggcccaagcagcggcggccgggtgaagagcggaggcacctctttcttctttttgaggacagcattgcctgctcccgtggggtgtgtttccattcctcaagactgaaccggccgctgacactctcggagaagattgtgtatggacacctggatgaccccgccagccaagaaattgagcgaggcaagtcgtact

SEQ ID NO: 133380 - DNA, 430 bp, Homo sapiens
atcgtggaataccacgggcctggtgtagactccatctcctgcactggcatggcgacaatctgcaacatgggtgcagaaattggggccaccacttccgtgttcccttacaaccacaggatgaagaagtacctgagcaagaccggccgggaagacattgccaatctagctgatgaattcaagggatcacttggtgcctgaccctggctgccattatgaccaactaattgaaattaacctcagtgagatggtgtgaccagacatgcttcctgctccccgcttagcccacggagtgactgtggttgtggtgggggggttcttaaaataactttttagcccccgtcttcctattttgagtttggttcagatcttaagcagctccatgcaactgtatttatttttgatgacaagactcccatctaaagttaaaaaa

SEQ ID NO: 133381 - DNA, 232 bp, Homo sapiens
actggcccatggcctcaagtgcaagtcccagttcaccatcactccaggttccgagcagatccgcgccaccattgagcgggacggctatgtgagtgcccatatccccctgcccatctcccccaccccatgctgagtaatgcctccaggcggcacaagccacaggtaagaggcgtatcttttgacaagacagccccttgtgcacagggtacagagccccagaagttggaggggg

SEQ ID NO: 133382 - DNA, 455 bp, Homo sapiens
aatgcatctggtgtggggcccggagcctgtccctgtctcacccaacttccttccacacacacttgcctctgccaagcaccaatgggtggcttctgtcttctttgccactgcaaacaaccacgtgcctctgtcccctcggggcctcgtttgggtctcattcacgcaggcttcacttgcccttaggcagcaggcgaggaagggcccctccagcccctttaccgggagcctcaggatgcccaggcgccaggtgggtgaggccaggcaggtagggccagacaggtgaggacggtgccctcctctgccttataaccttacccccgcttgcctgacagaaacatggcatcaggtgggtggtgatcggagacgagaactacggcgagggctcgagccgggagcatgcagctctggagcctcgccaccttgggggccgggccatcatcaccaagagctttgcc

SEQ ID NO: 133383 - DNA, 464 bp, Homo sapiens
tttcgtatggcgccctacagcctactggtgactcggttgcaggtgagcgagctcagggacctctgggttcacgggggcggggtgcctcctactgtgccggcggctgtgggcgaggcagggcgaggcgggcccaacctggggccaacttctcgtgtacctgtcccggttgtgggcccggcacccgtgcccgcttctctggtgccctaggtcaaggcgtccccggcacagtcagctttcctggccctgtccctgcctcgcaagaagcgtgggcccaagcagcggcggccgggtgaagagcggaggcacctctttcttctttttgaggacagcattgcctgctcccgtggggtgtggttccattcctcaaggtgaggacaaggtgactagggggcgcggtcgttgttgagtcttctaggcccagttcctgaggcctcacttcccatctcttagcaacagaggcatga

SEQ ID NO: 133384 - DNA, 862 bp, Homo sapiens
gaggcttctaatgggcaagagtccctggagctagagaccttggctggagtctcttctctccaccccaataattccccctccaacttctggggctctgtaccctgtgcacaaggggctgtcttgtcaaaagatacgcctcttacctgtcccactggccaatgcaggggccacaagcattggccaggacaatgccacccagatccctcaagatctgtgcctgccagggagagaggaagacagaatgtcaagggtgggtgagagtctgatgggaaggggtgatgtggtggctgcaggacgaagtgctgtactggaaccccagggcagccactgggacctgccccagccccggcccaacaggcctctgggcttgtgccgcctggaggcattactcagcatggggtgggggagatgggcagggggatatgggcactcacatagccgtcccgctcaatggtggcgcggatctgctcggaacctggagtgatggtgaactgggacttgcacttgaggccatgggccagtgcctgcttggccacagctgctgagcgccccatatcttcatagcttgaattggtgcagctaccaattagacctggtgcattgtgggtggtggggttaagggtcaggaggagacagtgagcagaggtctccacctgacttcaaattatccagacttggccaaaagagttcaccatctgggctgggccagagacttttttaacagagaccagttgcaagcaaccgaaatatccaacaataaaggacaggctaactcatgacgtggcgtcatttgaagaaagatgctgtagccattggccatgatgctgaacacattaggactatgaccccttttacagcaatt

SEQ ID NO: 133385 - DNA, 777 bp, Homo sapiens
ccctgggagtgaagtcccaaagggattggcgtgagctgcgggcctctctccgggtggtcttacccaaagatgtatcctgaaggtgcaaggatcctccggtttaaaggtggcacagtgcaaatcgtggaatccacggggcttggttagactccattctcttgcactggcatgcgacaattctgcaacatgggtgcagaaattggggccaccacttccgttgttcccttacaaccacaggatgaagaagtacctgagcaagaccggccgggaagacattgccaatctagctgatgaattcaaggatcacttggtgcctgaccctggctgccattatgaccaactaattgaaattaacctcagtgagctgaagccacacatcaatgggcccttcacccctgacctggctcaccctgtggcagaagtgggcaaggtggcagagaaggaaggatggcctctggacatccgagtggacgccctggcatgccagtcactggcatttggtgctgcttgggtacagtgtggctgtgaagagcatggagcctggagccagatggcctgggcttgaatcctggctctgccacctaacagccactaacagctgagtgaccctgagcaaactacttcactgtctatgtgtgggttccccatctgtaaaacaggagtcatgatcgtactgacacctttgaaggtggtgttgggcctactgctgctatcaccaatgagaaaaataaataaaaaataaagttgtctggagaagtgccaaaaaaaaaaaaaaaa

SEQ ID NO: 133386 - DNA, 3693 bp, Homo sapiens
  misc_feature (1)...(3693): n = a,t,c or g
tttcgtgcgtccccggcacagacagctttcctgttcctgttcctgcctcgcaagaagcgtgggcccaagcagcggcggccgggtgaagagcggaggcacctctttcttctttttgaggacagcattgcctgctcccgtggggtgtgtttccattcctcaagaaagctctgggtgttgcggcaataacaatgtggcctcagtcctgtgccaacgggcgcggggtggcgatgagccactttgagcccaacgagtacatccattatgacctgctagagaagaacattaacattgttcgcaaacgactgaaccggccgcttgacactctcggaggaagattgtgtatggacacctggatgaccccgccagccaggaaattgagcgaggcaagtcgtacctgcggctgcggccggagccgtgtggccatgcaggatgcgacggcccagattggccatgctccagttcatcagcagcgggctgtccaaggtggctgtgccaatccaccatccactgtgaccatttgaaatgaaccccaggttgggggcgagaaagacctggcgccgggccaaggacatcaaccaggaagtttataatttcctggcaactgcaggtgccaaatatggtgtgggcttctggaagcctggatctggaatcattcaccagattattctggaaaactattgcgtaccctggttgtccttctgattgggccctgacttccacacacccaatggtggcggaccttgggggcattctgcattggaagttgtgggtggccgaatgcttgggaatggaatggcttgggaatcccctgggaggctgaagtgcccccacggtgattggcgtgaagctgacgggctctctctccggttggtcctcacccaaagatgtgatcctgaaggtggcaggcatcctcacggtgaaaggtggcacaggtgcaatcgtggaataccacgggcctggtgtagactccatctcctgcactggcatggcgacaatctgcaacatgggtgcagaaattggggccaccacttccgtgttcccttacaaccacaggatgaagaagtacctgagcaagaccggtcgggaaggacattgccaatctagctgaatgaattcaaggttcacttggtgcctgaaccctggactgccattatgaaccaactgaattgaaaattaacctcagtgagctggaagccacacattcaatggggccctttcacccctgaccggggttcaccctgttggcaggaagtgggcaaggttggcagagaagggaagggttggcctcttggacatccgaggtgggtcttaattggtagcttgcaccaatttcaagctatggaagatatgggggcgctcagcagctagtggccaagcaggcactggcccatggcttcaaagtgcaagtcccagtttcaccatcactccagggtttccgaggcagattccgcgccacctttgaggcgggacggctatgcacagatcttgagggatctgggtgggcattgtcctgggccaatgcttgtggcccctgcattggccagtgggacaaggaaggacattcaagatgggggagaagaacacaattcgtcacctcctacaacaggaacttcacgggccggaaccgacccaaaccccgagacccatgcctttgtcacgtccccagagattgtcacagccctggccattgcgggaaccctcaagtttcaacccagagaccgactagcctgacggggcacggatgggcaagaagtttcaggcttggaggttcccggattgcagattgagttttcccaaagggggagttttgacccaggggcagggacacctaccagcacccacccaagggacagcagcggggcagcatgttgggacttgagccccacgcagccagcgcctgcagctcctggacccttttgacaagtgggatggcaaggacctggaggacctgcagatcctcataaaggtcaaagggaagtgtaccactgaccacatctcagctgctggcccctggctcaaagttccgtgggcacttggataacattcccaacaccacctgctcattggtgccatcaacattgaaaacggcaaggccaactccgtggggcaatgccgtcactcaggagtttggccccgctccctgacaactggcccggttactaccaagaaacattggcatccaggttggggtggtgaatcggaagacgagaaactacgggcgaagggctcgagcaggggagcattgcagctctgggagcctcgccaccttgggggccgggccattcatcaccaagagtctttgccagggatccacgagacgaacctggaaggaaacagggccctgctgccttttggacctttcgctggacccggctgactaccaaccaagattcaccctgtgggacaagctgaccattcaggggcctgaaaggacttcaccccctggcaaagccccctgaaagtgcatccatcaagccaccccaacggtgaccccaggagaaccatccctccctgaaccacacctttcaacgaagacgcaagattgaagtggttccgcagctggcagtgcccttcaacagaaatgaaggaacttgcaacagtgaggcgcagtgcctccccgcgncgccccgctggcgtcaaagttcagctcccacgtgtgcccatcagttggatccgattccttccagccatggcttccctattcccaagatgggtgtgacccagacatgcttccttgctccccgcttagccccacggaattaacctgtggttgtggtggggggggttcttaaaattaacttttttagccccgtcttcctattttgaagtttggttcagattcttaagcagctccatgcaactgtatttatttttggatggacaagactcccatctaaagtttttctcctgcctggatcatttcattgggtgggttgaagggattctagagaaccttttgttcttgcaaggaaaacaagaatccaaaaccagtgactgttctgtgagtgattggtgtctgtgccgtttgttgtcaagtccagggtccagggaagggtcttttcagtcaagggtcagtgggaggcccaacagccacagccacagatgggatccatcactgcagtgaagggagggagcagggcctagatgggtgggagggagcgggggcaagctgggtggggcacttcctggggcctttggccttcacttnttccagcttcgaggacactattcttccttaggcattcgggccttcagcttgctgtttgttctttcacagccgggccattaccacctttcccgcaggctggttagggtccactgtccagccccagggctagttgctggtccaccaggagatgagagcccaggcctggctcactgatggatcccacaagcgtgtacggagccctcttctttgcagctctcactgaagtggtggcatctgctgagctgggccctgtgggggacgtgtcaacaaagctctcgtccaccaacccngaagcggatctccttcgcggtgtccatgtagaggcgtgtgctccttcctccgctcgtacttccacacccacacctgctcccgttcgtctaactttgtttgctggctcagtgactctggggggatgagatgtcatcgaagagccctagaagagtgcactccttctggcctgaccttgtgcggattttggcctcaag

SEQ ID NO: 133387 - DNA, 1311 bp, Homo sapiens
atgcccatggccaccgtcctgcttttggcaccagttctcttccagtgccctgggagctgtcattgccctcctgctctggggacagcttttgcagtggactcaggcaatgatgtcacggatatcgcagatgacggctgcccgaagccccccgaattgcacatggctatgtggagcactcggttcgctaccagtgtaagaactctacaaactgcgcacagaaggagatggagtatacaccttaatgataagaagcagtggataaataaggctgttggagataaacttcctgatgtgaagcagagacggctgcccgaagccccccgagattgcacatggctatgtggagcactggttcgctaccagtgtaagaactactacaaactgcgcacagaaggagattcctcacagtatccctctgaacagatttattgttttcactttgctgataaggaaactgaggcacagacaggagtgtacaccttaaacaatgagaagcagtggataaataagctgttggagataaacttcctgaatgtgaagcagggtgtaaaacgcactgatgtcactctctctcaccaaggtctggccatctctgtgaagctccctcacaggcaccctgcagattcatcaataaacttcaacaggggaggaagaagcatgatccgtagggctgctatggcaatttgggaacatgaacacctcctggtcaaaacgttcctactgtggaccaaacatttgctgcccaagcagactcctgggagaaaacttggtgtccttggagccttaatgggatgcagtgagcttaagtccttccaagagcttcccatcagtctgcccttagtcatcctcgagcggatgtatggtgtgacctggggctgtcatttccctcctgctctggggacgacagctttttgcactgtactaggcaatgatgtcacggatatttcagatgaccgcttcccgaagcccctgagattgcaaatggctatgtggagcacttgtttcgctaccagtgaagaactactacagactgcgcacagaaggagatggagtatcaccttaaatgataagaagcagtggataaataaggctgttggagataaattcctgaatgtgaagcagaaaatgcaacaggaaagacattgcccctactttaacactctatgtggggaaaaagcagctttagagattgagaaggtggttctacaccctaactaccaccagggtctggccatctctgtgaagctctcctcacaggcacctgcagattcatcaataaacttcaacaggttagcgctagtaggccaatag

SEQ ID NO: 133388 - DNA, 1595 bp, Homo sapiens
  misc_feature (1)...(1595): n = a,t,c or g
cccacgcgtccgcccacgcgtccgggcaagaccaaccaagatgagtgccctggggagcttgtcattgccctccgtgctctggggacagcttttttgcagtggactcaggcaatgatgtcacggatatcgcagatgactggctgcccgaagccccccgagattgcacatggctatgtgggagcactcggttcgctaccagtgtaagaactactacaaactgcgcacagaaggagatggagtgtacaccttaaaacaattgagaagcagtggattaaattaaggctgtttggagattaaacttccttgaattgttgaagcagatgacggctgcccgaagccccccgagattgcacatggctatgtggagcactcggttcgctaccagtgtaagaactactacaaactgcgcacagaaggagatggagtgtacaccttaaacaatgagaagcagtggataaataaggctgttggagataaacttcctgaatgtgaagcagtatgtggggaagcccaagaatcctggcaaacccagttgcagcgggatcctggggtgggacacctgggattgccaaaggagctttttcccctgggccaggcttaaggatggttttccccaccattaatcttnaacccaccaggggccacgctggatccaattgaaccaatggcttgcttgaccacggcttaaaaatcttctttccttgaaccatttcagaaaattgccaacagcgaaaagacatttgcccctacttttaacattttatgtgggggaaaaagcagcttgtaggagattgaggaaggttgttcttacaaccttaacttactcccagggtagatattgggctcattcaaacttcaaacagaagggtgttcttgttaattgaggagagtgatgcccatctgcctaccttccaaaggattatggcagaagtaggggcgtgtggggttatgtttcctggctggggggcgaaatgcccaattttaaaatttactgacccatctgaaagtatgtccatgctgccctgtggcctgacccaagacccaatgccataaggcaatttatgaaaggccaagcaacaagtccccccgaaaaagaaagaacacccgaaagaagcccctgtaaggggtgcaagcccccatactgaaatgaaacacacccttcctgtgcctggccatgtcctaaaggtaccccaaagaaagacaccctgcctatgggcgaatgccggggcaagtgccctttgcccgttccaccgacccctggaggaggacacccctggtatgccgactgggatccttaagctttgataagagcttgtgctgtggcttgagtatggtgtgtatgttgaaggtgacttccatccagggactgggttcagaagaccatagcttgaggaactaattgcaaggcttggccggaaagccctttgccttgaaaagcaagattttcagcctgggaagagggcaaattggacggggatttggaccaggattggatgcgataatgattgtggtttgaaagctgaatgggtgccagcccctgcattgctgagtcaatcaataaagagctttcttttgacccaaaaaaaaaaaaaaaa

SEQ ID NO: 133389 - DNA, 1197 bp, Homo sapiens
gcacgagcgcaaatagggtcactgggccgcttggcggtgtcgttgcggtaccaggtccgcgtgaggggttcgggggttctgggcaggcacaatggcgtctcgagcaggcccgcgagcggccggcaccgacggcagcgactttcagcaccgggagcgcgtcgccatgcactaccagatgagtgtgaccctcaagtatgaaatcaagaagctgatctacgtacatctggtcatatgggctgctgcatggttgctaagatgagccgtgggacaccctgaggctcttgtcacatgatcaggtggccatgccctattcagtgggaatacccgtattttgctgagcatttttgccctctctcttggggccttcttttccttttccccgcaacaacattaggcttacctgggtgctctccatgaatcaagcatggggatttttttttccatcggttccattcattttattgggcagcatggagatgtgccctggctgcacagcagcttctaccgccatggcaaggcctaccgtttcctctttggtttttctgccgtttccatcatgtacctggtgttggtgttggcagtgcaagtgcatgcctggcagtttgtactacagcaagaagctcctagactcttgggttcaccagcacacaggagaagaagcataaatgaagcctctttggggtgaagcctggacatccccatcggaatgaaaggacactagtacagcggttcccaaaatccccttcctggtgatttttagccagctgtgatgttggtaacctggtgcagacccaggcccaaagttcctggaaagcctcccttttgcccatctgcctgaggtggcaaaactataatttatttcctggttggctagaactgggtgacccgacagcctatgaaacaaattttcagctgtttgaaagttgaactttgaggtttttcttttaaggattgagcttcgtccttgcctctactcggtcattctccccatttccatccattaccccttagccattgagactaaaggaaatagggaataaatcaaattacttcatctttaggtcccgggtcaggaaacatttgggcagctgctcccttggcaggctgtggtttcctttgcaaagcattttaattaaaaacctcaataaagatggccctgcccacactgtgccttgtgtttggggctttatagagaaa

SEQ ID NO: 133390 - DNA, 1197 bp, Homo sapiens; identical to SEQ ID NO: 133389

SEQ ID NO: 133391 - DNA, 1364 bp, Homo sapiens
ggcacgagcagaactcaggctgcctccagccagcctttgcccgctagactgactggccctgatcacttgaaggtgcagcaagtcactgagaatgagcactttcttctcggacacagcatggatctgcctggctgtccccacagtactatgtcggacagtattttgcacatacaagaagagctcagggcagctgtggagctggatggtctgcctggcaggcctctgtgcagtctgcctgctcatcctgtcccctttttggggcttgatcctcttctcggagtcatgcttcctcatgcatacttacttatctggccaagaattgctacctgtggatcagaaggcagtcctgccgacaggtggtgattgcgggctcgaccatgctttgagcaagtatctggatgagctgggcttcacggtatttgccggagttttgaatgaaaatggcccaggagctgaggaattgcgaagaacctgctctccgcgcctctcggtgctccaaatggacatcacgaagccagtgcagataaaagatagcttacagcaaggttgcagcaatgctgcacgacagaggactgtgggctgcgatcaacaatgctggggtgcttggctttcccaactgatggggagcttcttcttatgactgactaccaacgatgcatggtcgtgaacttctttggaactgtggaggtcacaaagacctttttgcctcttcttagataatccaaaggtaggctggtgaatgtcaccagcatgggaggaggggccccaatggaaaggctggcatcttatggctcatcaaaggcggctgtgaccatgttctcatcagttatgagactggagctttccaagtggggaattaaagttgcttccatccaacctgggagggcttcctaacaaatatcgcaggcaccagtgacaagtggggaaaagctgggagaaggacattctgggaccacctcccccgctgagggtacaggaagactacggccaggactacatcttagcacagcggaatttcctcctattgatcaactcgttagccagcaaggacttctctccggtgctgcgggcacatcccagcaggctatcttggcgaagagcccttttgcctattacacgccagggaaaggcgcttacttgtggatctgccttgctcactatttgcctattggcatatatgattactttgctaaaagacattttggccaagacaagcccatgcccagagctctaagaatgcctaactacaagaaaaaggccacctaggcaatggaagccctcaaagaagtcggaatgtcatagtcttgaaatgaaagggaaactgggaaactgggtttctcattaaagttgtttccaactctgta

SEQ ID NO: 133392 - DNA, 864 bp, Homo sapiens
atgggattaatatcagattacccagaaaatgaatatagagggagaagagaagatggcctacaactatattcagtgagcaagagaaagaagaacctcaaagatatcagagaagaattgactggagaaacagaagaaaatgtaggtttgtgtggtatcagaccaagaaaagagtttcaagaaaaaggaattaggacaatctctgagtcagcagagccttcttcctgcagggagaagtttattatttcaggatccttgtcaattgcagcaggaattagaactacaaaaggcctggttgtgcagattctgactgccctgatgagccttagcatgggaataacaatgatgtgtatggcatctaatacttatggaagtaaccctatttccgtgtatatcgggtacacaatttgggggtcagtaatgtgccctgagaacagccaccaccaatacagcagagcacatgcacaggcaaggccacctaagctcccaggtatctgccatggagtgatgggccatgagttacacacagtctcactcctggagaaagctctgcccttctgctatattgattgtctcttcctggtgggctcagatgaagggactgcccaacaaggactagacaccctgttgatccacatgcagcaacccagctgggccattaacacagacaagataaaaagacctaataatatccaaatgaaactaataaaactcctgggcataattcagaaagcagaaaagcctctcattgcaaagatgattgtcaagattttgaacttctctgtccctccccaccaaaaaccacaaaaaaaaccccagcaattggtagacctatttggctactggtatcactcctacaatacctga

SEQ ID NO: 133393 - DNA, 1710 bp, Homo sapiens
ggcacgagagcagacattgcaggcctgaagaaaggtggtcacaagaggggtggaacattcctgcaaatggtttcaatatatgcacgatgtctcgatataggaaagaaattacgtctttggaacaacggatataactcaaatatacttggagctttaaaaattaaaaggagagagattcgagcaccttttctgctgccatgacaaccatgcaaggaatggaacaggccatgccaggggctggcactgagatgtgcaccagctgggaaacatggctgtcatacattcacatctgtgggaaggattgcaagagaagttcttgaagggagaacccaaagtccttggggttgtgcagattctgactgccctgatgagccttagcatgggaataacaatgatgtgtatggcatctaatacttatgggaagtaacccctatttccgtgtatatcggggtacacaatttgggggtcagtaatgtttattatttcaggatccttgtcaattgcagcagggatttagaactacaaaaggcctggtccgaggtagtctaggaatgaatatcaccagctctgtactggctgcatcagggatcttaatcaacacatttagcttggcgttttattcattccatcaccccttactgtaactactatgggcaacctccaaattaattgtccatggggactatgtcccatcttaaaggggtctggatgggcatggtgctcctcttaagtgtgctggaattctgcattgctgtgtccctctctgcctttgggatgtaaagtgctctgttggtaccccctggtgggggttgtgttaattctgccatcacattcttcacatgggcagaaacagcatcttccacaacacttaatgagggtttgaggggcacccaaagattcaacaggcaaatgcttcccgaaatctatgcctgactgtgacccaagagcctcacatgagaaattaccaagtatccaacttcgatactgatagacttgttgatattattattatatgtaatccaattatgaactgtgtgtgtatagagagataataaattcaaaattatgttctcatttttttccctggaactcaataactcatttcactcggctctttatcgagagtactagaagttacattaataaataaagcaaattaatgaggcaacagcacttgaaagtttttcattcatcataagaactttatataaaggcattacattggcaaataaaggtttggaagcagaagagcaaaaaaaagatattgttaaaatgaggcctccatgcaaaacacatacttccctcccatttatttaactttttttttctcctacctatggggggaccaaagtgctttttccttcagggaagtgggaggatggcatgggccattcttccccccttccctttttccttcttcctggcttttctttccccatgggaaagtaccttggaggtaggcacagtccgtccttggcatgtggcacggagctattcatttggaggttaaaagtatacatggggagttaaaaatcatatttaaggcttcaggtttcaacttatattttctatttcatcttcttcatttcccttctcccaccttctactgggcataattatatcttaatcatatatggaaatgtgcaacatatggtatttgttaaatacgtttgtttttattgcagagcaaaaataaatcaaattagaagc

SEQ ID NO: 133394 - DNA, 1167 bp, Homo sapiens
atgaaacgagcacaagaaaacgtggaacagacccagcacatattaggcagtatgtattataactcttcccacgaaagtccagtggaaaagggcctagcacagattatgtctgaaagacaaaattctcattccaccctaatccatgagcctctgggaggcagactgaaggaatttacgcctgccctcttccgcgcttgccggggtcgcgcccagtcacagggaaccgcgtgtgaggaccatcagtcagacagacagacgcaaagacgcacagacccggcgaggagggacagagtggagctggcgccggcctacacgtcaccgccccgctgcagcgccaacgtcggcacgtcgactcgtcgactccgggccctctgccccgcccgcgtgcgcgcgccgctccgcctcccgcctccagcctctagtccgctgggttcggaggagcagaggcggaaggtcccggcggcggcgaggatgcgccccagggcgggagcgggacgctccactttaccctggctgcccgcaacgggccaggcctgccgtctctacctctctacctgtaaatatgtggaggaaataattcctattaaaggtaaaggaaaggagagcaatttgaatgaagaaacagtagctaggactacaggtacctgccatcaagcccagcttccccaaatgttagtggaaagacaacctaatgaaaatggccctgatgacaaagagaaagaccgtccagaaaggcccagtcccttggacacatcgccgcttctagaccctcctgcagtctcggatattgctgggaaaatgtctgatgaattttcgttggcagatgcactacctgaacactcccctgccaaaacctctgctagctacccagaccatatggtgctacccacagatccagctgcagctggtcctttaggtccatggggatccatgtcttctggaccttgggtgccaggaatgggagggcagtatcctacccctaatatgccctatccatctccagggccatatcctgttcctcctcctccccaagcctctggggcagcaccacctgttccatggggcaccgttccactaggagcctggggaccaccagcaccatatcctgcccctacaggatcgtatcccacaccaggactctatcctactcctagtaatcctttctaa

SEQ ID NO: 133395 - DNA, 1067 bp, Homo sapiens
  misc_feature (1)...(1067): n = a,t,c or g
ctcggacccatcgccgcttctagaccctactgcggtctcggatattgccgggaaaatgtctgatgaattttcgttggcagatgcactacctgaacactcccctgccaaaacctctgctgtgagcaatacaaaacctggccaacctcctcaaggctggccaggctccaacccttggaataatccgagtgctccatcttcagtgccatctggactcccaccaagtgcaacaccctccactgtgccttttggaccagcaccaacaggaatgtatccctccgtgcctcccaccggaccacctccaggacccccagcaccctttcctccttccggaccatcatgtcccccacctggtggtccttatccagccccaactgtgccgggccctggccccacagggccatatcctacaccaaatatgccctttccagagctacccagaccatatggtgcacccacagatccagctgcagctggtcctttaggtccatggggatccatgtcttctggaccttgggcgccaggaatgggagggcagtatcctacccctaatatgccatatccatctccaggcccatatcccgctcctcctcctccccaagcccctggggcaagcaccacctgttccatggggcaccgtttccaccaggagcctggggaccaccagcaccatatcctgcccctacaggatcgtatcccacaccagggactctatcctaattcccagtaatccttttccaagttgcctttaaggaccttctgggtggttccaccaatgcctggtggcccccattcttaccattaagttaacaatggacgaagagatgcagctttgctttttgaagtacatgtatatgcacatgaatgcatatataaaatttgcttggtttcacttattagagggcatttcatgaaagaacaactcttgcacctcttcagagaagataactgcctctggtactttggatgcgtggtacatcatatgtttacaatcaggtaaaagcatagaagtaaatcattcggatgtgattttttttaaattttgggtttttttccaatngggggaaaaa

SEQ ID NO: 133396 - DNA, 295 bp, Homo sapiens; identical to SEQ ID NO: 116833

SEQ ID NO: 133397 - DNA, 249 bp, Homo sapiens
ctagacataaaggttctccaagtccccaccagactcaggagcccagctggcttcacccagtggatcctgcactggggcctcaggtggagctgcctgccagtctcgtactgtgtgcccgcactcctcagcccttgggtggtcgataggattgggtgctggaactcccgctggcccgcaagaatcgcgcgcagccccggttcccgctagcgcccctccctccacacctcgaggccgaggtgggcggatcat

SEQ ID NO: 133398 - DNA, 504 bp, Homo sapiens; identical to SEQ ID NO: 128144

SEQ ID NO: 133399 - DNA, 335 bp, Homo sapiens
gagtgaagctgcagaccttcctggtgaatgttacagctcttaaggtggcgcatctggagttgttcattcctcccggtgggttcgtggtcttgctggcttcaggagtgaagctgcagaccttcgtggtgagtgttacagctcataaaggcagtgtggagccaaagagtgaacagcagcaagatttattgcaaagagccaaagaacaaaactcccacagtgtggaaggggaccccaacaggttgccagtgctggctagacataaagattctccaagtccccaccagactcaggagcccagctggcttcacccagtggatcccgcacaggggccgcag

SEQ ID NO: 133400 - DNA, 447 bp, Homo sapiens; identical to SEQ ID NO: 114113

SEQ ID NO: 133401 - DNA, 729 bp, Homo sapiens
tcaaccattgtggaagtcagtgtggcgattcctcagggatctagaactagaaataccatttgacccagccatcccattactgggtatatacccaaagtgagaggtgacagcatgctggcagtcctcagagccctcgcttgctctcggcacctcccctgcctgggctcccactttggtggcatttgaggagcccttcagcccccccgctgcactgtgggagcccctttctgggctggccaaggctggagcccactccctcagcttgcagggaggtgtggagggagaggcacaagtgggaaccggggctgcatgcggtgcttgcgggccagctggagttccgggtgggcgtgggcttggtgggccccgcactcggagcacccagccagccctgctggccccgggcaatggggaacttagcacctgggccagtggctgcggagggtgtactgagtcccccagcagtgccggcccaccggcgctgtgctcgatttctcgccgggccttagctgccttcccacggggcagggcttgggacctgcagcccgccatgcctgagcctcccacccactccatgggctcctgtgcggccgagcctccctgacgagcaccaccccctgctccacagcgcccagtcccatcgaccacccaagggcgcacaggactggcaggcagctccacctgcagccccggtgcgggatccactaggtgaagccagctgggctcctgagt

SEQ ID NO: 133402 - DNA, 819 bp, Homo sapiens; identical to SEQ ID NO: 116837

SEQ ID NO: 133403 - DNA, 669 bp, Homo sapiens; identical to SEQ ID NO: 128246

SEQ ID NO: 133404 - DNA, 930 bp, Homo sapiens; identical to SEQ ID NO: 116844

SEQ ID NO: 133405 - DNA, 444 bp, Homo sapiens; identical to SEQ ID NO: 116839

SEQ ID NO: 133406 - DNA, 1122 bp, Homo sapiens
  misc_feature (1)...(1122): n = a,t,c or g
atgctggcagtcctcagagccctcgcttgctctcggcacctcacctgcctgggctcccactttggtggcattgaggagcccttcagcccccccactgcactgtgggagccccttgctgggctggccaaggctggagcccactccctcagcttgcagggaggtgtggagggagaggcacgagcgggaaccggggctgcgtgccacgcttgcaggccagctggagttccgggtgggcgtgggcttggtaggccccgcacttggagcagccagccagccctgctggccccgggcaatgggggacttagcagccaggccagtggctgcggagggtgtactgagtcccccagcagtgccagcccaccggcgctgttctcgatttttcgccaggccttagctgccttcccgcggggcagggctcaggacctgcagcccgccatgtctgagcctcccacccactccatggactcccgtgcggcccgagcctccccaacgagcaccaccccctactccacggcgcccagtcccatcgaccacccaagggctgaggaatgcaagcgcacgacgcgggactggcaggcagctccacctgcagccctggtgcgggatccactagangccccaaagattggttgtgagccaggaagtagtagcctcatcatctccggccaccaaggcgcgaggcaaaagagagcatcagtaggaccagacagcaagaagccagccagccattcaaaccatatttcaaaaatccaggtgaacttatttaccacccctctaccgaaacactcctgcttcctcaactgcccccgcactcctttcctctcctcgcaccggcaaacattcgccagcgcaacacccttaccctgtccccacaagccctctcggccacacatccatcgccgcgctctcgccctgcaacggcccctctccatgtctggcaggccggcgaagttggagtgtattcgcaaagccgccctcctttcgggtgcatcagtccacgctcagggggttttctggtacatggcggactataccgagtggcggtataaacagaccgcagccgactcctgtggcagaggccaaatctcggctgactccgaatgtagccacccgttcaaataa

SEQ ID NO: 133407 - DNA, 3594 bp, Homo sapiens; identical to SEQ ID NO: 116845

SEQ ID NO: 133408 - DNA, 516 bp, Homo sapiens
atgtgcatagaaaaatccaaaggattctacaaaaaagctactagaaccactgacttcatcgagatgcagtcttgtgtccggaattggtgggttcttggtctcactgacttcaagaatgaagcggtggaccctcgcgactcaggagcccagctggcttcacctagtggatcctgcactggggctgcaggtggagctgcctgccagtcctgtgccgggcgctcgcattcctcagcccttgcgtggtcgatgggactgggcgccgtggagcagggggtggtgctcgtcggggaggctcaggccgcacaggagcccatggattgggtaggaggctcaggcatggcgggctgcaggtcccgagccctgccccgtgggaaggcagccaaggcccagcgagaaatcgagcgcagcgccggtgggccagcactgctgggggactcagtacaccctccgcagccactggcccaggtgctaagtcccccattgcccggggccagcagggctggctggctgctctga

SEQ ID NO: 133409 - DNA, 1560 bp, Homo sapiens
ttaaggattcaggacaggagagtttgtcagaggcttggactgcttctgtgtctctttgttgtgcttatctacaactgagtttttgcctacacattctttaatttcttttaattcctgtttcagggggtagggttgtgtgtctgtttccagatatattcctgaagctgcagacataccccccgcgactgcttttagcttccctatgttagtgcatctgagagtgttttctggccgagttagttcaagagacagtctcttacacactaagagtttctcaggattcagggtggaagagtataccagagacttggactgtttctgtgtctctttgttgtgcttatttctgcattttgtgtctgctccttcttgtgactttaaacagtaagtcctcagcaacagcgtcttctcatccctgccaccaacaggccccagtatgtaatgttcccctccctgtatccgtatgttctcattgttcaactcccacttatgagtgagaacatgtggtgtttggttttctgttcttgtgttattttgctgagaatgttggtttccagcttcatccatgtcctgtaggagaagttcatcacatatatttttggccagattatctacaaaagcagttgtttgtactgattcagtaatagatacaacagcaatgctaacagttgccataatgtctatggctgagcctgtaaagaccataagtgtaaatgtgaatcttttgtgtctgacctgggacagggcactttctaaggtggcaagggcagaagaatcttgccaattgcatgtcaaattggctggtagaagtgcctcagattgtctccttaataccacgacactggaagtttttaaactagacatatcatgaccagtgatacatgaggcaaaccaagcctgtccctgcacccgggtcacaaatgtggcatttccaggtgtaatggaaatgttagttccagactcaggagcccagctggcttcacctagtggatcccacaccggggctgcaggtggagctgcctgccagtcctgtgccgtgcgctcacattcctcagcccttgggtggtcgatgggactgggtgccgtggagcagggggtggtgctcatcggggaggctcgggccgcacaggagcccatggagtgggtgggaggctcaggcatggcaggctgcaggtcccgagccctgccccatgggaaggcaggtaaggcccggcgagaaatcaagcgcagtgccggtgggccagcccggctggggcactcagtacaccctccgcagccactggctcgggtgctaagtcccccattgcctggggccagcagggctggccggctgctccgagtgtggggcccaccaagcccacgcccacccggaaccccagctggcccgcaagcacggcacacagccccggttcccgctcgtgcgtctccctccacacctccctgcaagctgaggtagtgggctccggccttggccagcctgaatgagtgtttagaatcatcaacgtctttaaagtggttagcatatccagaacaaacagtagtgtccaggtaagaaaggcctac

SEQ ID NO: 133410 - DNA, 901 bp, Homo sapiens; identical to SEQ ID NO: 125576

SEQ ID NO: 133411 - DNA, 552 bp, Homo sapiens
atgcgcccgcactcctcagcccttgggtggtcgatgggactgggcgccgtggagcagggggcggcgctcatcggggaggctcgggacgcccaggagcccatggagggggtgggaggctcaggcatggcgggctgcaggtcccgagccctgccccgcgggaaggcagctaaggcccggcgagaaatggagcgcagcgccagtgggccggcactgctgggggacccagtacaccctccgcagccactggcccggtgcagcggtgggctgaagggctcctcaagtgtcaccaaagtgggagcccaggcagaggaggtgcccagagcgagcgagggctgtgaggactgccagcacgctgtcacctctcctaaccacctggactcagtgatatggtttggctgtgtccccaccgaaatctcatcttcagttgtagctcccataatccccacatgtcatggaaaggaactggtgggagtaggaggtgctgctcaggcaatgcatgctcaggcacacaggactgctcaggcaatgcgtgctgagcaaatgaatacatga

SEQ ID NO: 133412 - DNA, 2019 bp, Homo sapiens
tcactcagaataaaggcagaggacgtcccaggccaacagccggcagccttccagacatggcaggaggaccccaggagggatcacgcaacggcaggaggagaaccgactacctgaaggggccatccttgtgggcatatgcacgacatgcaaccccctcaactcttcaggcaggtactcctgatccacaggctcgctgtacatggggttgtacttgtagcctttgccatagcccaaatccttcatcagcctagtgggcgcgttcctcaggtgcaggggcacggggggcagtggcccctggtggttcctcaggcaggctttgacgttgttgtaggcgctgtacacctcaatggactttggggctctggcaaagtagaccacacactgggccagaagcacctcacattcaggcatgcctataaaatgacagccttggtaggcagcaaccgcttgtgttaacgcagatgggtctgccagacctatgtcctcgctggcaaacctgacaagcctccgtgccacgtagagtgggtcctctcctccctcgagcatgcgagccagccagtagagggaggcgttctggtctgagccccgcatggacttgtgcagggcggagatgcagttgtaatgctcctcacctgcccggtcatataaaatgtgggatcgctgtaggccctccttcacgtcattctctgtgatcagaactctactgggagaataggattgcccactcttcttacagaacatcttcctagagcttaacctagccagcaccgccagctgcagtccgttcaacccagctcgggcgtcaccgtcactgaggtaagccagggtgtctactgctttatcctctatgaacatggcgggctctgagctgctgttgctgctgtggctcagagggtcagtgggacggctagagtctaggacgtggattcccagggagttgatcgctcgcattaaaatagtcaccattgcctctactggaagcttctcaagaacaatcactcgacagcggctcagaagagcagcgttgacctgctgagatttattgaaccgatgaatctcatcaataaaaaggatggttttccttttgaaaaagctcttttcattttgagcttgttttatgacatctcgcacatcatttgtcttggcatttgttgcagataatgtcacaaaccttatgctatgtttcttgctgttgctggctatgatgtgagccagagtggtttgaatcgaggagacttccacatctttgctatccattgcgcctggctttgtccactcgctgacttcttcatatataagctcattttccacgagcgggaaccggggctgcgtgcagcgcttgctggccagctggagttccgggtggacgtgggcttggcgggccgcgcactcggagcagccggccctgctggccccgggcaaagggggacttagcacccgggccagcggctgcggagggtgtactgggtcccgcagcagtgccagcccaccggcgctgcgctcgatttctcgccgggccttagctgccttaccacggggcagggctcgggacctgcagcccgccatgcctgagcctcccacccactccatgggctcctgtgcgcccgagcctccccgacgagcaccaccccctgctccacggcacccagtcccatcaaccacccaagggcctccttgggagacttgtcttctctcgatatatggcaatgcgatgaatgatgaaagggcttggagcttggaaggcttctgggttttaaaaccatctgacagctggatgacctcactatctgaaaggacaattagcttcttctgatttggtttactactcgaagattccaaattcccagagttctttttttcatgttcttcctccctgatgacatcatcaagatcttgggcataataaattcggctatagagttgaaattccacctcactatcaacactcagttcactagataactcgtccctataaagatcatcttcatatgcttctatagtctcatagccaccaaacat

SEQ ID NO: 133413 - DNA, 1121 bp, Homo sapiens
ctatccattgatgccatcctccattgtatgagagttgccccaggggagccacattgagcgatgagcagctccacgatgtagagaaagcccatcagatatgaggcacagtgcttgtccaggccgaaggtgatagagtgggttgagtgatttaaagtcatcatcagatggcttttctttctgagcctggattactcccaaagcagggtctaatgcaaaggtttgcttgcacttgttcacacaggaatgtggtcccagggagaagtacatgaaaccttgagctaaacacagggtgctgattggtgtatttacaatccctgagctagatataaagactctccacgtccccaccagactcaggagcccagctggcttcacctagtggatcccgcactggggctgcaggtggagctgcctgccagtcctgcgccgtgcgctcgcattcctcagcccttgggtggtcgatgggactgggcgccgtggagtagggagtggtgctggtcggggaggttcgggccgcacaggagcccatggagtgggtgggaggctcaggcatggcgggctgcaggtcccaagccctgccccacgggaaggcagctaaggcccggcgagaaatcgggcacagcgccggtgggccggcactgctgggggactcagtacaccctccacagccactggcccaggtgctaagtcccccattgcccggggccagcagggctggctggctgctccgagtgcaggggcccaccaagcccacgcccacccggaactccagctggcccgcaagcgccgcacgcagccccggttcccgctcgtgcctctccctccacacctcccttggtccacttgacaaacgatgttctaagagtgaaggtcaagtgggcctttttctttacactccacaagtagctcaaaacattccacactgcagtctttgtcagatttggtccgtggcttcctgatacaggattttgctcttctttgagtttccagttttcttttttaatttccctggatactcttccatatagaaagggagtcatctgtttattggaggcattggatgatctgctgtttttcttggttgagacttggtaccaccaagaagcagtcagtgccctcat

SEQ ID NO: 133414 - DNA, 4284 bp, Homo sapiens
atggggcttgcagaacgatgtcctctaaaccacctgaccctgacggtcagcagtgttaagtgttccttcctgttggcgcacatcttgtctgttgctggtgcctgctacggagtcctccgaggggcaccccacactttccctgggatcacgtgtccaggctgctcccaggaaaacaacccaattaaaaagtgggcagaagatctaaacagacacctcattcaagaagatacacagatggcaaataagcacctgaaagatgctccacataggtatatcattagggagctgcaagttaaaccaaccatgagatactgccacgcacctactggagtggctcatatccaaagcactaacacaccaaatgctggcgaggatgtggagcaccaggaactcacattcattgctgatggcagcccggtgaccaccaggggccatatggacctggtacagacgtctctgagtcgcacactgggcgtcagaagcacagggtcatggagtgcatgtgctgaattctcacatgggtactgccttgcaaagaggctgctccagctgctgaagcacggcaacggtaacagcaacagtggtggcaatgctgaatgcatcactaggcactgccaaaagcccttgacaggcatcctatcattcatccttgcactgaacaaggtaaagaatacaagaccatttgacagatgccacagtgaaggctctgagaaggagccttccttctgtgtgacctgccccagaaggccagaggtcaaccagccttcgccctatatgccgcagccagggaagagcagcactcacctctccgtggtgcagctgcgggctctggaggtcggcgaacctcaggcttttccacctgtggagcagaggggcctgctggcctcaggcatccactgtggctctgagtctaagggcagggttcgggacctgcagcccgccatgcctgagcctcccacccactccatgggctcctgtgtggcccgagcctccccgacgagcaccaccccctgctccacagcgcccagtcccatcgaccacccaagggctgaggaatgcgagcgcacggcgcaggactggcaggcagctccacctgcagccccagtgcgggatccactaggtgaagccagctgggctcctgagtctggaactaacatttccattacacctggaaatgccacatttgtgacccgggtgcagggacaggcttggtttgcctcatgtatcactggtcatgatatgtctagtttaaaaacttccagtgtcgtggtattaaggagacaatctgaggcacttctaccagccaatttgacatgcaattggcaagattcttctgcccttgccaccttagaaagtgccctgtcccaggtcagacacaaaagattcacatttacacttatggtctttacaggctcagccatagtcattatggcaactgttagcattgctgttgtatctattactgaatcagtacaaacaactgcttttgtagataatctggccaaaaatatatgtgatgaacttctcctacaggacatggatgaagctggaaaccaacattctcagcaaaataacacaagaacagaaaaccaaacaccacatgttctcactcataagtgggagttgaacaatgagaacatacggatacagggaggggaacattacatactggggcctgttggtggcaggttgccaacatccaaactcgctgttgattgccagctcctgctccttgcagcagcccagcatgctctctgctggtgccaaaatacccttccaccaaaccccgctaacttctggaactgtcctagagggtttcctaccctagcaagtgagcttgcctatgtcagccctaaccttgctcttgtcattcagctgagccagaggaaaaaatttgagctattctggggtggtctacagagaaccatcttctttcccttcagtgttctcagaatattgactgttgatgaacaagccaatgatgtgagtgtggctgcagcaaggacccttcaaattttcagagatgacatgattgtatatctagaaaaccccattgtctcagcccaaaatctccttaagctgataagcaacttcagcaaaatctcaggatacaaaatcaatgtacaaaaatcacaagcattcttatacaccaacaacagacaaacagagagccaaatcatgagtgaactcccattcacaactgcttcaaagagaataaaatacctaggaatccaacttacaagggatgtgaaggacctcttcaaggagaactacaaatcactgctcaaggaaataaaagaggatacaaacaaatggaagaacattccatgctcatgggtaggaaaaatcaatatcgtgaaaatggccatactgcccaaggtaatttacagattcagtgccatccccatcaagctaccaatgactttcttcacagaattggaaaaaactactttaaagttcatatggaaccaaaaaagagcccacactgccaagtcaatcctaagtcaaaagaacaaagctggaggcatcacactacctgacttcaaactatactacaaggctacagtaaccaaaacagcatggtactggtaccaaaacagagatatagatcaatggaacagaacagagccctcagaaataacgctgcttatctacaactatctgatctttgacaaacctgagaaaaacaagcaatggggaaaggattccctatttaataaatggtgctgggaaaactggctagccatatgtaggaagctgaaactggatcccttccttataccttatacaaaaatcaattcaagatggattaaagacttaaatgttagacctaaaaccataaaaaccctagaagaaaacctaggcattaccattcaggacataggcatgggcaaggacttcttgtctaaaacaccaaaagcaatggcaacaaaagacaaaattgacaaatgggatctgattaaactaaagagcttctgcacagccaaagaaactaccatcagagtgaacaggcaacctacaaaatgggaaaaaattttcgcaacctactcatgtgaaaaagggctaatatccagaatctacaaagaacttaaacaaatttacgagaaaaaaatcaaacaaccccatcaaaaggttgatgaaaggcgtctgctaaacttgacaacagacagattaacaggagaaaaggcatacagatttattaaggtgcaagtgctgagagtcacacaaggtatgaaaattcaaagaagggccagaagcaaagaactccaaggtgatggtgatgaaattcaaagatggaagcgcctccactccccacccaggctgcttggagaagagcctcacaggattattttcaaactagactctgctaatgacatgcacaagagtgccccattttcctcactccaatccccactctggcatcagccggttatgcaggaggttgagaggcagtacaaagaaaagaaagaccttgtgagagagggagggaaatgcaggtgtcagggtagacctggcaaggtggtattaactgagctcagtcttgaagctagaggtgggtggatggaagacattcccagcagaaggactagcaaatgcggaccatgggagctggtgtcccattgtgtccagaattggtgggttcttggtctcactgacttcaagaatgaagcctcggaccctcgcggagtgaagctgcagaccttcacggtgagtgttacagctcttaaggcggcgcgtctggagttgttggttcttccgggtgggctcgtggtctcgctggcttcaggtgtgaagctgcagactttcgcggtgagtgttacagctcataaacgcagtgtggacccaaagactgagggagccggctctggccttggccagcccagaaaggggctctcacagtgcagcagcgggccgaagggctcctcaagtgccgccaaagtgggaacccaggcagaggaggcgccgagagcaagcgagggctctgaggactgccagcacgctgtcacctctcaccatgaaagggtatggagccatgccaagaaggcaagtgggccaggtttgctggaggggcaagtttgggctggggctggattttgggcttctctcagggttttgcctctgactgcagtggatggtcacaccagtaactgcaggctccactccatacagctcaaggcctgtctgcttctgttgctgaaactgaaaaagctgatcaacagggcctcagctccttacagtggggtgatggcccttcccacatctccaggagggtctgtctgctga

SEQ ID NO: 133415 - DNA, 1872 bp, Homo sapiens
atggataggcctgaaacctgggtacacaagggcagacctgacgcctatgtctgcaaatatttgcctacatctgtagaggctggccttatccttgggtccacagggggctacttggctctgggattggctttgagtctgagtctgcaggaaatagtcagttactgggatggatctgatgtccaggattataggggacagcccagtgctggagaagttccagaggctgggctgctaaggggtcctggacaaggtcgcttggatagcggcctaaccacagcattatacatgctcaggaagaggcaaagccggaaatttaccacttggcaaagcgtctttacaaaaccagagtttggctttgtggtagcttccttagaacttatctacaaggaagtaatgaattcagaagaaaagactaaaaatggtgtagtaaaaggacagccttctccttcagcttgcagggaggtgtggagggagaggcacgagcgggaacccgggctgcgtgcggcgcttgcgggccagctggagttgcaggtaggcgtgggcttggcgggcccccgcactcgggacagccagccagccctgctggccccgggcagtgagggacttagcacccgggccagtggctgcggaaggtgtactgggtcccccagcagtgccggcccaccggcgctgtgctcgatttctcgccgggctgtagctgccttcctgcggggcaaggctcaggacctgcagcccgccatgcctgagcctcccaccccctccgtgggctcctgtgcggcccaagcctccccgatgagcaacgccccctgctccacggcgcccagtaccatcaaccacccaagggctgaggagtgcgggcgcacggcgcgggactggcaggcagctccacctgcagcccctgtgcgggatccactgggtgaagccagctgggctcctgagtctggtggggacgtggagaacctttatgtccagctcagggattgtaaatacaccaatcagcaccctgtgtctagctcagggtttgtgaatgcaccaatcagcactctgtatctagttaatctggtggggacttggagaatctttatgtctagctaagggattgtgaatgcaccaatcggcactctgtatctagctcaaggtttgtaaatggaccaatcagcactctatgtctagctcagtgtttgtaaatacaccaatcgacactctatctagctaatctagtggggacgtggagaacttttgtgtctaactcagggattgtaaatgcaccaatcagaaccctgtaaaaatggaccaatagctctctgtaaaacagactgactttctgtaaaatggaccaatcagcaggatgtgggtggggccagataagagaagaaaagcaggctgcctgagccagcagtggcaacccgcttgggtccccttccacactgtggaagctttgttcttttgttctttgcaataaatcttgctattgctcactctttgggtccacactgcttttatgagctgtcacactcacagggaaggtctgcagcttcactcctgaagccagcgagaccacgagcccaccaggaggaacgaacaactccagacgcgccgccttaagagctgtaacactcaccgtgaaggtctgcagcttcactcctgagccagcgagaccaccaaacccaccagaaggaagaaactcaggaaaacagccgaacatcagaaggggcaaactccggacacgccgcctttaagaactgtaacactcactgcgagggtccgcggcttctacgcttgaagtcagtgagaccaagaacccaccaattttggacacaattgcactctagcctgggcaacaagagtgaaactccatctcgaaaaaaaaaa

SEQ ID NO: 133416 - DNA, 1596 bp, Homo sapiens
ttacatcaagcatattacatgagctgctggtaaacagtacagacaatcatggcctacagctgagcagatgctgatgctgatgctgatgctgatgctgatgctggattcttggttcaaggagcagagaaaaggaaaactaaaagctccccgcacactagcactgttgtcaaggaacgtgatcactactgtctttgctccatggagctgaacgcctgaggtatggcctgctgacattccagtggcaaatcctgcccctcgtcctgttgccttttcctgctggctcagcagtatgccatctccacctggatacctgatggcctcgtactgctctacacccaaaatgttcaaagtaggatcaccattcaaaacagatcttccctcaacacccccacttctatcgtgaatgccacaattcttctcccctgcctgggctcccactttggtggcatttgaggagcccttcagcctcccccctgcactgtgggagcccctttctgggctggccagggctggagcccactctctcagctcgcagggaggtgtggagggagaggcacgagcgggaaccggggctgcgtgcggcgcttgccggccagctggagttccgggtgggcgtgggcttggcgggccccgcactcggagcagccagccagccctgctggccccgggcaatggaggacttagcacctgggccagtggctgtggagggtgtactgattcccccagcagtggctggcccaccggcgctgtgctcgatttctcgccgggccttagctgccttcccgcggggcagggctccgggacctgcagcccaccatgcctgagcctcccacccactccatgggctcctgtgcggcccgagcctccccgacgagcaccaccccctgctccacggcgcccagtcccatcgaccacccaagggctgaggaatgcgagcgcacggcgcaggactggcaagcagctccacctgcagccctggtgcgggatccactaggagtgaagctgcagaccttcatggtgagtgttacagctcttaaggcagcacgtctggagttgtttgttcctcccggtgggctcgtggtcttgctggcttcaggagtgaagctgcagaccttcgaggtgagtgttacagctcataaaagcagtgtggacccaaagaacataaaggttctccacgtccccaccagactcaggagtccagctggcttcacccagtggatcctgcactggggactgcaggtggagctgcctgccagtcctggtgccgtgcgcctgcactcctcagcccttgggtggtcgatgggactgggtgctgtggagcagggggcggtgctcatcggggaggctcgggccgcacaggagcccacggagtgggtgggaggctcaggcatggcgggctgcaggtcccgagccctgccccgcgggaaggcagctaaggcccggcgagaaatcgagcacagcgccgcattcaatccttataaacagttgcgaaaatcctatgtatacaaacagctaccagtgccaatacctctgctaagggccacacccttactgcgccatcacagaccctatggaaacactgaggtcctctgctaa

SEQ ID NO: 133417 - DNA, 1429 bp, Homo sapiens
ccatatcagccagggacaaagcaacctccttgttcatcccagcttggcttttgatccgtgcccatgcctggttcatgccttggacacataggtttcctttaaagaggtggtattgtagccagcttatatttgcatctatagccatgtttctagtccagcttggtgtgcaatactagatgagttaataactggtccttgtttctgatctggttcccattgtgtaactgtgttgattgggaaggtagtttgtgagccatgaaatgcttggttcattggttgcttattgacctcattaacctaggacttgaatatcccaaagggtatgctctttaccacattcaactcctaatttatttgtttaggttatgatgtgattgctcaagcccaatctgggactgggaaaacggccacatttgccatatcgattctgcagcagattgaattagatctaaaagccacccaggccttggtcctagcacccactcgagaattggctcagcaggtaagagtggcttctattccctccttcagggctgatttagggatgatgagtataatccaaggaccagagaagtcttctctgatcaccaccttgggaggaagacatgggtgccctaacactctcgagacctgctgggttaattaaaagctatttcttacccaaacgtaaccattgcttcctccacccatttcctgagtcaaatgggaaagctgttgggtgaagcctggctggctgggcaagtttgactgtgttctgaataagcaccttcactatgggctaagagatcccttggtgtgggggtgatcttacagtagtcagagcagatggacagtccttttcacccttgcttaatagccagagctgtttcatgcctggggcacacacaattctaatgctggactttttcctgggtcatgctgcaacactgatgtcagagcatgtttttaaatgttctgtggcaggggcagtgattattctgggtgtggataatgtaagaagttacagcagagctccattctaaggcacttggctctcagttttctcagagtgaacatgcctcgtagcttgggtcctatggcaggagtgcaataggacatggatatgcatcacctgttctataaaactggttgctggctgggcgcggtggctcaactcgtataatcccaacactttgggaggccaaggcaggcagatctcttgagatcaggagttggagaccagcctggccaacatagtgaaaccccgcttctactaaaaatacaaaaattagccaggcatggtggcgtgtgccttttatcccagctactcgggaagctcaggcaggagaatttaacccaggaggtggaggttgcagtgagctgagattgtgccattgcactccagcctgggcaacgagcaaagctctgtctcaaaaaaaaaaaaaaaaaa

SEQ ID NO: 133418 - DNA, 1921 bp, Homo sapiens
  misc_feature (1)...(1921): n = a,t,c or g
agtggcgggncccncaaactgaagccttganatgctaggacgcacgaccggnccggaantcccgggtcgagccacgcgttcggtctgcgagccaggattcccgatccagagacaatggccccgatgggattggagcccgaaggcgtcatcgagagtaactggaatgagattgctgacagcgtttgatgacatgaacctctcggagtccctttctccgtggcatctacgcctatggttttgagaagccctctgccatccagcagcgagccattctaccttgtatcaagggttatgatgtgattgcctcaaccccaatctgggacctgggaaaacggccacatttgccatatcgattctgcaagcagattgaattagatctaaaaagccacccaaggccttgggtcctaagcacccactccgagaatttggctcagcagatacaagaaggtggtcatggcactaggaagactacatggggcgcctcctggtcacgcctgtatccggggggcaccaacgtgcgttgctgaggtgcagaaacttgcagatggaagctccccacatcatcgtggggtaccccctgggccgtgtgttttgatatgctttaccggaagatacctgttcccccaaatacatcaagatgtttgtactggatgaagctgaacgaaatgtttaagccgtggattcaaaggacagatctatggacatatccaaaaggctcaagcagcaccaccaagggtagttttgctgtcagccacaatgccctttgattgtgcttgaggtgaccaagaagttcatgaggggcccccattccggattcttgtcaggaaggaagagttgacccttggagggtatccgccaggttctacatccaacgtggaacgagaggagtgggaggctggacacactatgtgacttgtatgaaacccctgacccatcaccccaggccagtcatcttccatcaaccacccggagggaaggtggactggcctcacccgagaagaatgcatgctctgagatttccctgggaatccgcccagcatgaagatatggcccaaaaggaacgtagaacgtgattatgaaggagtttcgtttggcttctagcagagtttttgattaccactggacctgcttgcccagaggcattgatgtgccagcaggtttctttaagtcatcaanttaattacctttccccacaaccagggaaaactataatccacagaaatcggtcgaggtggacggtttggcccgtaaaggtgtgcctattaacatgttgacagaaagaaaacaaagaggaatctcgaggacattgagaccttttaacaacacctccatttgaggaaatgcccctcaatgttgcttgacctcatctgagggggctgtcctgccacccagccccagccagggtctcaatctctgggggctgaggagcagcagggaggggggagggaagggagcccaagggatggacatcttgtcatttttttttctttgaataaactgtcactttttgaggcaaaagaaggaaccgtgaacattttagacacccttttctttggggtaggctccttgccccaggcgccggctcttttcccaaaaaaaaaaaaaaaaaaacactaatccatttccctaacctagtaacctccagatcccagaggctctcctcacctcagctgagctcctttgaaagtgattcaagggactatgtcactcagcctcatttgctggaccaaatctggagggagaacccctaaaacccctaagtgaggttgcccagggggttgctcccaggtggggggaagcaggggagagaaaatggtagccatttttacatggttttgtatagtatttattgattcaggaaacaaacacaaaattctgaagtaaaatgacttggaaactgccaaaaaaaaaaaaaaaaaac

SEQ ID NO: 133419 - DNA, 1278 bp, Homo sapiens
taaatttctaatatggcggacccagaatgtcttgatctatttctaggccatctattctattccggtggtctatttgcttacttctaaacaaatgccatacaatgtggtggctttatagtataaaagcgtttaacaacaggtttatgtatttaaattcaacagagatcatctaatgcaataacttgtgctaacgggttaactccgtcgtacagaactcagactaaaactcgtctttccaactctgcgtatgtatttgaactttctacaaccattaataacagaaataattgaatgctagactaatactgtgtaaaggagcaatggtcaatcttaatctgattacaaaagtttgaaaaaagaagcctcactcttctgattgccattataataagtgatggctatactattgaatttgtaaagttatcctaatcaaatactacttttctaatttatatatatttttatatacatgactccaaataagactggtttataaaatgggttccatccagtccaagtttttaaactattgttgtaacacataaattttgtgctgcctccaacagcaatgattcaactgttagtctggattacatcattcacattatcaccaagtatatcctctaaagtgtctaattatcacttttataaagcacattcacaaagttttgcattcatcaccactacccagttcctgtttgtctgatttttaggtgttatattaaatggaaaaaccaaaagtgcaatttttcattcaataaatgttccatccttatttagttttgttgccgaaattgaaagtcccatgacttttagaatgatagcaattttatcaaccaaagaatcccgtctttcacaccgtttcaataactgcagcaaatttccttgaacttgtctgtggaaattctgaaactgtggaatcgtcatttcaaagcacttggtctttacgttggcctgaatgatgtgccactttttagcatcactgcaacgtaaagggatacttaagagatctgcaagtgtctgagctcacagccataccccagtttccacatgaaaatctacaacgctggttggtggacatcggacttagcatccagcgggcggcttcgctggaccgcctccatggggcagcgtctggggacttgcggcccggactcgagagaacgcccccagaccagcgcttccgcttccacgtcctgcccctagcggcctggcgcatggggcggacggtgacagcaatactgaaaaaatccaatccagagataacaggaagggcag

SEQ ID NO: 133420 - DNA, 2152 bp, Homo sapiens
gaggcgtgcgaactggtggcagtgagagacttcggcggacatggctcccagcgtgccagcggcagaagcccgagtatcctaaaggcatccgggccgtgctgctggggcctcccggggccggtaaagggacccaggcacccagattggctgaaaacttctgtgtctgccatttagctactggggacatgctgagggccatggtggcttctggctcagagctaggaaaaaagctgaaggcaactatggatgctgggaaactggtgagtgatgaaatggtagtggagctcattgagaagaatttggagacccccttgtgcaaaaatggttttcttctggatggcttccctcggactgtgaggcacgcagaaatgctcgatgacctcatgggagaagaggaaagagaagctttgattctgttgatttgaatttcagcatcccagactctctgctgatccgaagaatcacaggaaggctgattcaccccaagagtggccgttcctaccacgaggagttcaaccctccaaaagagcccatgaaagatgacatcaccggggaacccttgatccgtcgatcagatgataatgaaaaggccttgaaaatccgcctgcaagcctaccacactcaaaccaccccactcatagagtactacaggaaacgggggatccactccgccatcgatgcatcccagacccccgatgtcgtgttcgcaagcatcctagcagccttctccaaagccacatcctagtatcagaaggccaggcgagactgcaacactgctcatcaccccgcggcgtgatccctgctcttaggtgctgggcagaggggaagggtggtcagggtgaggatggtgagggagggctggtgaggggctcagaggaatacttggaacaacagcagtgatattggacaggggcagctctctttcatacataagtgagaggttctaaagtgtgagggaaaaactcattttttaaaaaacaccatgcttggagggtgggggtagaaatagacacaatattatttgtaaggaatcgggctttcatttactctggactggtgaaaatattttttaaagccagtgctctaagacctcagcttttatctcagaaccccatgggttcccagaccaagaagtacaggaaatccaattgttgtcctggcctgtctattgcctggaacagggagctttgattactgactccggttccacacactgtaagatcaaaaaaccatctccacatttgaaagagatgtaaggtgtattcatagggatggtggctcaacaaatcaagcaaactggaatcaaggggagggggaagggaatgaaatggaaagggaggctgattcccttcccctgacttaccactaatttactaggctacctactttcatgagtaacctctcacagctacccagcacatgccacaatcctatcgtcttgccttcttttatctgcactgtgtgaagggactcttttaaataaatgagcaagtgtcctaagctatgtcatccaaagattgtcctttccattctcaaatcctgtgactgggatcactcaacagcactgtgatgtattattttcaatgaggtgcctttcttaactgaccaaatgctgccttgtttggcccctaaatcaataaaatatgttaaaatttgtatcccctgttgtggcattttttttagataatctaagctagaaaaatgacattgaattctggacctggctggaaggaaaagaagccctttcttgtcgctggcagctgtgtggtaggaggtccaagtatgtgcatatgagataagcctgcaacctcttgaccttcagctcctatgcaggcttctcttgagcccagagacaaggcagcttggtctagtggagatagcactgtgcttggagttcaggggacctaggacaaatcccagccagttagttattcactgtgctcctgtttcctcagctgaaaaaggaagttggttatgccaccttcttggccttaatggcattaaatgaaatttataggaagaaggtttttgctcagtacctggcatgcaacagacattggataaatgttagttggatccagatatacacagaaagatatctgcttcctgccaggctggataactgttgaatgacacttgtccatagtctaga

SEQ ID NO: 133421 - DNA, 1227 bp, Homo sapiens
  misc_feature (1)...(1227): n = a,t,c or g
agctgcgcttaactaagtcgtcgccaganactgacgntcgtagcaagcggcaccaggacggaattgcaagatcgacgatttcgtgatacttcgggggacatgtttcccagcgtgccaccttgagaacccgagtatactaaaggcatccggaccgtgctgctgtggcctcccggggccggtaaagggacccaattggagaaactgaagtttgaatggcttgttctctaggctacatagcaagtaatttacagagcttgcatctgaatgactccaaagctcctgctctttctgctgctatctactgccccaggcacccaaattgggctgaaaacttctgtgtctgccatttagctactggggacatgtggaggggccatggtggcttctgggcttcagagctaggaaaaaagctggaaggcaacttatgggatggctggggaaactgggtggagtgatggaaatgggtaagttggagctcctttggagaaggaattttggagaaccccttggtggccaaaaatggttttcttctgggatggcttcccctcgggacctgtgaaggcaaggcagaaatgctccgatggacctcatgggagaaggagggaaagagaagcttgatttctgttgatttgaattcagcatcccaagactctctgctggatccgaaggaatcacaaggaagggctgattccaccccccaagaagtgggccggttcctacccacggagggagtttcaacccctcccaaaagagcccccatgaaagatgaacatcaccggggggaaccccttgatccgtcgatcaagatgataaatgaaaaggcccttgaaaatccgccctgcaagccctacccacactcaaacccaccccactcatagaagtactacaggaaacgggggatccactccaccatccgatgcatcccagacccccgatgtcgtgttcgcaagcatcctagcagccttctccaaagccacatgtaaagacttggttatgtttatctaatgttgggtccaagaaggaatttctttccatccctgtgaggcaatgggtgggaatgataggacaggcaaagagaagcttccttcaggctagcaaaaatatcatttgatgtatatggattaaaaaagcacttgtcttgatgtatctttggcgtgtgtgctactctcatctgtgtgtatgtgtgttgtgtgtgtgtgtgtgtgcatcgcaatatcgtgttccact

SEQ ID NO: 133422 - DNA, 1170 bp, Homo sapiens
gccttcctttctgtccagtcctgctcagctgttaagatccatcatggccattatccttgtcccggactgccccaaagttcccagctggctttggggaacactgtagctcttgggtgtctcttgtctctggcatggttttagcgtcactgcgaacactcctttgcaaacatcaaacatctcaaagacggaaaaggatagatggcttcctccagcctacacgccccgtccacagtggcatcaccctcttatcccaaaagaatatgccagttcccatccagcaccgaagaaaatcagctcctggggctggtggttggaggtgggtctgtccactgtgggggccaaagtgttcccctgctggagacagtttgcaagtaagaacctaaggatggggacagcatcctgtgcttgggcattgaccagccaaagctcacatttagaaatccctcagtgcttctgtggtttcacctgggcatcgacgacattagggaagcctttgtgaccacaagggcagggcttgtgccctgagtggcgaggtggtgacctgaggccagtgtgatggtgggtggatctcagcgtggtactkaagtgccagtcgtggccggcacactcgaacgctaagagaatggtccaatttgatgatcttatttctatttcgatcaggttttcgactttttgtagatgaaaactaccagggaaaaggggaagcaggtacccaataaagtttagaaagatccagtctgtgaaacccttagagatgggctgaaagttaagtccaccaacccttgggcttaatcaggacggaagaggagggggtgtggggggcagagcgtaaaacaagccccagccctaactcccggccccccagccccagtcttcccaatcccagaggccccggcggcctgtgctcctcaccaccctggtcaggggaatagaaggaaatgcaattttccgcctgtctgcccgacttccaaaaactgcctcctcctgcccaggcctctcccaccaccaccttccctccaaagataaccgtgtccatgccatccgtggcatcatctcgagttttcatttttggatgaagtgacatttagctttaacaagacatttccaaagcgcctagtctcctccaaaatgctacctttaaaagttgggcattagtaggcgaaaaatccc

SEQ ID NO: 133423 - DNA, 876 bp, Homo sapiens
atgaaggagaacatatcttctaaaggagatgaaggtgaaaagaagtctacctttatggatctagcaaaagaagatattaaagataatgatagaacattacaacagcagccagaaatgaagaaggactgcagtcttcctcttactgtccttacctgtgctaaagcatgtccacacatggctacttgtggaaatgttctgtttgagggaagaacagttcagctagggaagctttgctgcactggagttgaaactgaagatgatgaagatactgagtcaaattcatcggtagaacaagcatcggttgaagtacctgatggaccaacactccatgacccagacctctatattgagattgtgaaaaatacgaagtctgtcccagaatattcagaggtggcttatcccgattattttggtcacattccgcctccattcaaagagcctattttagaaaggccttatggtgtacaaaggtcatataatggcttgaacccgggacgcagaggttgtgcattttgcatgagcagctgtagcttcgtagtggaaaaatctaaagaatccacagcacgtgttgtagtttggagggaaataggagtacaaagaagttataccatggagagtactttatgtggctgtgatcagggaaaatacaaggaatgtctggcagtcaggactctggatcctcttgtcaatacaacaagtaggaaaaggagaaagcgttgcccaaaaaatagacggccaatcccaacaagtaaaaagacgaacaagagacagaggacacggatgaatgtaaaggaacagggggctaagacctacagcagacagcaaaaaaataggatcacagagtcacggaagcgtcacgcagacacagagaaatag

SEQ ID NO: 133424 - DNA, 5410 bp, Homo sapiens
attcatcggtagaacaagcatcggttgaagtacctgatggaccaacactccatgacccagacctctatattgagattgtgaaaaatacgaagtctgtcccagaatattcagaggtggcttatcccgattattttggtcacattccgcctccattcaaagagcctattttagaaaggccttatggtgtacaaaggacaaaaattgctcaagatattgaaaggctaatacatcagagcgatatcatagatcgtgtggtatatgacttggataacccaaattacaccattccagaagagggagatattttgaaatttaactccaaattcgagtctgggaatctgcgcagagtaattcagattagaaaaaatgaatatgatcttattctgaactcagacataaacagcaatcattatcatcagtggttttactttggaagtcagtggaatgcgaccaggtgttgcttacaggtttaacatcattaactagcgaacagttgcaacaggctgtttaattatggtatgcaaccactcatgtattcggttcaggaagcattaaatgccagaccatggtggattcgtatggggactgacattcgttactatataaatcatttctcaagaagttcagttgctgcaggtggggcaaaaggggaaaatcctactatacaattacatttactgttcaattttccacataaaggatggatgtttgctactttgctttattcactatccatatacgtatttcaactttacagatgcatcttcaaaaattggaatcagcacacaatcctcagcaaatctattttcggaaagatgtgttatgtgaaaccctgtctggaaacagctgccccttggtgactataacagcaatgccagagtctaattattatgaacatatctgccatttcagaaatcgcccttacgttttaatgtatgctcgggtacatcctgggggaaacttaatgcaagttggggttatgaaagggaacgttgggaatatctccatgaggcaattaaccccactggcttcaggagcttacggaggaatctttattattttttaaaattgtccctatgttaaatccagatggtgtcatcaatggaaatcatcgctgttctttaagtggagaggatttgaataggcagtggcaaagtccaagtccggatttacatcctacaatttaccatgctaaggggctgttgcaatacttggctgcagtgaagcgtttacccttggtttattgtgattatcatggccattcccgaaagaagaatgtatttatgtatggttgcagcatcaaagagacagtgtggcataccaatgataatgcaacttcatgtgatgttgtggaggatacgggatacaggacattgcctaagatactgagccatatcgccccagcattttgcatgagcagctgtagcttcgtagtggaaaaatctaaagaatccacagcacgtgttgtagtttgcacgggaaataggagtacaaagaagttataccatggagagtactttatgtggctgtgatcagggaaaatacaagggtttacagattggtacccgagaactggaagagatgggagcaaaattttgtgttggtcttttacagtttgaaaagactgacctctccattggagtataaatcctgccctccccagccctgccttgacctttgaaaatgatttaaattgaatccaagcctgcaaagtaactagcccctacccacttatgtccttggatgaagatgaaccctcgattcccttgaagaagttgattacagtgcagaaagtaatgatgagttagatattgagttggctgaaaatgtaggagattatgaaccttctgctcaagaagaagtactttctgactctgaattatcaagaacatacctaccttgagcccgctcgccatctctttgttaactgcaaagaataaatgaaatatcttggtgttttattctcccaggaagcttgagagaaatgagtttatacagagctgactcaaaaagacaaaaagtaacttgggccagtttggtttcaagataataaatgtgttattaattaatgattaaaattggcgcctggttttattttcggatattccaatgcactttatggtagccatggaatggatcaaaatattgggatttaccctttaaaaaaaaaaaccctgagtatcattggcatgaaattttatcctcccctatggttatatccctgacatcaagtggataattttgaagtgtgttccagaatataaaattgaaattttagagttgttgaaaatccctgacttgttgaaaactaatatatatgtacatggatttctatagatgtgtttgtttagaagtgggtagatattgcagataagactgttcttcagaatcatgttaactattgggttgtgactgaagtagtcccagggtttgccttgaaacccattacattctacatttaccaaattaaacaaataaaaactgtattaaatgttgcattcattttgtcatcttctttaaccagctcagattatttgatgtatagaactttgtgagaatgtgataaaaacccagaattggacacagtgataaaaagttgtttttaagaaagtgctgggattacaggcgtgcgccaccgtgcctggctaaatcctttcttgtaatgaaacctacctgggttttagccctcttgctgcaagaatgactttatttttaaataaaataaagcaaatccattgactttggataagtgttttaagaactaagtttctgatataataaaacaacctccaaaagatacctcattgcagattttcgccaggattcaggtgcttaggttttggcacatatcttcctcactttttcctatagtgtttttaacctgttataattggaatgatagagatgtatttcagaattttgcatggtccaaatcaatgatttttctttttaatatgtaaagtatttcattaacagtgtagattctttctgatgtttggggagccatgtttaaaaatgtagtatggagcaattgaaaaaggggtctttttccctagcctaattcttactaatctcagaaaacaaagatcaaatagactgtgaagttgaactagtcctcttagtgtagtaaccaaatttaggaaagatcaggataatttaggaaggaaagtaatcatttatttaattatttataattataaacaattattttatgttttgtatattttatgtataaaacaattacatgttttattatagttatacttcttcagagagtagattatggagccaccatgtccatacagttagttgttccttggtattcttggattgattccaggaccccccacagttacccaaatccacagatgctgaagtctctgatataaaatggagtagtatttgcatttaacctatggacatcctcctgtatgctttaaatcatctctagattacttataatacctaatacaatataaatataaatgctctgtaaatagttttattgtatagtgtgtgtgtgtgtgttttaagagacgaggactcacaatgggacactttgaccaggctggtctcgaactcctgggcctacacaatcctcccacctcggcgtcgcaagtagctgggactacaggtactcaccactatgcctggcagttttttaaatttgcgtttttaaaaattgtttattatttattgaatattttctacctgagattgacttaatctgtggatatggaacctatagatatggagggctggctgtatatgaatttgtttttggcttttacaaaattagaaattaaaagtaactacagttactataatgtgcagaatgactcaaatatttccatttattatgttagtgtaaaaactcctaactacgtattataatattttatattaatgaagtactttagcatacattatgagcctgaataaagctttttattaaatattcacaagattgaaggagaaattctttatagttaggaaatgattttttcataaacaataaatagctttgaaaatataaaaaaaaatttagggctgggtgcagaggctcatgcctgtagtcccagcactctgagaggccgaggcgggtggatcacttgaggtgaggagttcaagatcagcatggccaacatggtgaaactccacctccacgaaaaatacaaaaattagccaggcatggtggcatgcgcctgtaatcctagctacttgggtggctgaggcatgagactcacttgaacctgggaggcagaggttgcagcagtgagccgagatcaagccgctgcactccagctggggcgacaaagcaagactgtctcaaaaaataaaaacaaaaaaattaaaataaaatcctaactttcctagttagaaatataattaacttttattggctattagtagctaaaattgcccttatttttgcttctgtggcctcattttttttctcggttattcagtatttaaattatggcttagatgtcttcaatgctatagtcctgaaaattaatgatctacgttgtgcagcagtgatgggatctgataaactgagtctgatgatggagtttagatttatttcctttaccttgcatttggaactttgaatctcttaaatgtggttttggtctagtccactggttctcacgttgtaatgtgcatcagaatcttctgaagacacagattgctgattatgtagacctggggtggaggtccaagaatgtgcattccttgcaaattcccaggtggtgatgctgcagagccacactttgagaatcactagtataatccagtatgctcttccagcatcacaccttccttcctgagaatcacaggagttgtgaactgcagattagcattggggagaatttagatcaaactaatttgtagaatcaaggaggtcaagtaaggtcacaggggcacttgggttgagccagggttttagcccaggtcttctgacaactgcctcatgtccttaccacaaaggagctgctatcctttgcctttccccaaagagtgaagactgcttaaagctcaaggatctttcttgaatttgtgaaatttgttcaggcaaggtgaaaagcaaaaacctatggttcacattgactttttgtattgatcattgtcttttgaagacaggaagtatgatcagtctctgccacttgtgctagtttttgtgtggtgtttagaaacatgggcatttgtctggatcctaattacaaataagtaacctagaattctcttcgagatagtggactaaccaccgatgaatctattctaaaatttcaaatatccaaattaaaatggactgtattaggcattaaggtactggaaatgggataatacattaaatgtattaatggaattgtttttgtgcatgatacagaaataaatgatagtaacg

SEQ ID NO: 133425 - DNA, 553 bp, Homo sapiens
atggagaaggatgaccccccacagttggtgactcccacatcagtgaaagccatcatcctgaggattgaggctgcccagctaactcgggctcaagaggatatttctacccagctctcagacattttggacaatgtcaattgtgtcatcaaccgcttccaggaagaattaggatatgatttaaaagaaaatgccaaatctcagcagagagatccaaagggcaagaagagattcatcttgctggaaaaaattgcctccttctccaaagatgctatgatgaaggagaagcacctgtatgacattctccgctggctgggtgactggggtgagtttgcaggctgggcaccgtgcctcctctgggaggggagtgtgggtggcgagcacagggacagcacaggacacatccccttctccagtgaagcattccaccactcgtgtcacagcacatcacctccatgctcctagggggttgatatctcagagggtttcaatctgtgcatgagaatcttcctttgcagctcgtgccgaattcctgcagcgcgggtcaatttcaatg

SEQ ID NO: 133426 - DNA, 2268 bp, Homo sapiens
gatatttctacccagctctcagacattttggacaatgtcaattgtgtcatcaaccgcttccaggaagaattaggatatgatttaaaagaaaatgccaaatctcagcagagagatccaaagggcaagaagagattcatcttgctggaaaaaattgcctccttctccaaagatgctatgatgaaggagaagcacctgtatgacattctccgctggctgggtgactggggtgacactctgacctatgagattggccacaggaagagtgaagaggaagcagcagctctggacgaatggattgaagtgacggagaaagtgttaccgctgtccctcattgccaccaaaagaggcatcgagtcactcactgccctttgctccactctcattgaaggacaaaagaaaaggtcacaagtgtccaaacgcaccttctggcagggctggcagggaagaagcccacagacatctccatcccatcctcagccactaagcccagaacagatgctccaggaccagcataccatgaacacgaaggcctcggaggtgacgtccatgctgcaggagctcctggactctaccatgttcagcaagggggaggtcagggccatcaggtacatggccactgtggtggagaacctcaacaaggccttgatcctccaacacaaggagaacaggagcctggagaccaaatacaggcacctgcaaatgcaggcgaccaaagagctcagcagccagaggctgcacttccagcagttcatggaggtccttgagagcaggagggatgctctgctgaagcaggtagagatcttagggggaaggtaccatgaccttctcctgatgaagcaggccttggagttccagctgaagaaggctcagaatgctacaggtcaggcagaagacctggctgaggtttctgttgactccccaggtccctctgagagagagaccctcccaaggaaagaaacagtcatggaggaaagccaacaggaaccgatgaaggaggagcagttgttctcgccacttcccccaagtcccatggccatgatacgggacagtggtgctatagctgcagggcaccagccactttccaccatgactgtgcgctcgagggtcgcagatgtgttcggcagcaaggacactgagagccttgagcctgtgcttttacccttagtagatcgcaggtttcctaagaaatgggaaagaccggtggcagaaagcttaggccacaaagacaaagaccaggaggactacttccagaagggaggactccaaattaagttccactgtagcaagcagctgtctctagagagctccaggcaggtgacctctgagagccaagaggagccctgggaggaggaattcggccgggagatgcggaggcagctgtggctggaggaggaggagatgtggcagcagcggcagaagaagtgggccctgctggagcaggagcatcaggagaagctgcggcagtggaatctggaagacctggccagggagcaacagcggagatgggtccagctagaaaaggagcaggagagcccacggagagagccagagcagctaggggaggatgtggagaggaggatcttcacacccaccagtcgatggagggacttggagaaggcagagctatcattagtgcctgccccaagccggacccaatctgctcaccaaagcaggaggccacacttgcccatgtctcctagtacccagcagcctgccctgggaaagcagagacctatgagttcagtggagtttacctacagaccacggacccgccgagttcccacaaagcccaagaaatctgcctcctttcctgtcactgggacatccatccgaaggctgacctggccctctttgcagatatcccctgcaaatattaagaagaaggtgtaccacatggacatggaggcccagaggaagaacctgcagctcctgagtgaggagtctgagttgaggctgccccactacctgcgcagcaaagcactggagctcaccaccaccaccatggagctgggcgcgctcaggctgcagtacctgtgccataagtacatcttctatagacgcctccagagcctccggcaagaagcgatcaaccatgtacaaatcatgaaagaaacggaggcttcctacaaggcccagaacctctacatcttcctggaaaacattgaccgcctgcagagtctcaggctgcaggcctggacggacaagcagaaggggctggaggagaagcaccgagagtgcctgagcagcatggtgaccatgttccccaag

SEQ ID NO: 133427 - DNA, 393 bp, Homo sapiens
gtggcacagtagactgtagtgtgaggctcgcgggggcagtggccatggaggccgtgctgaacgagctggtgtctgtggaggacctgctgagctgctgcccaaagggagcaaggaggaacagcgggattacgtcttctacctggccgtggggaactaccggctcaaggaatacgagaaggccttaaagtacgtccgcgggttgctgcagacagagccccagaacaaccaggccaaggaactggagcggctcattgacaaggccatgaagaaagatggactcgtgggcatggcatcgtgggaggcatggcctgggtgtggcgggactggccggactcatcggacttgctgtgtccaagtccaaatcctgaaggagacgcgggacccacggagaac

SEQ ID NO: 133428 - DNA, 520 bp, Homo sapiens
caggctcggtgtccaagagcacgcagtttgagtacgcctggtgcctggtgcggagcaagtacaatgatgacatccgtaaaggcatcgtgctgctcgaggagctgctgcccaaagggagcaaggaggaacagcgggattacgtcttctacctggccgtggggaactaccggctcaaggaatacgagaaggccttaaagtacgtccgcgggttgctgcagacagagccccagaacaaccagtccaaggaactggagcggctcattgacaaggccataagaaaagatggactcgtgggcatggccatcgtgggaggcatggccctgggtgtggcgggactggccggactcatcggacttgctgtgtccaagtccaaatcctcgctgtcctttccctgttctccccctgccccccgtctctatcctctgtggccttcagctaatttctgctcccctgagattcgtccttcagccccatcatgtgctttgggatgagtgtaaataaaacggggctgtggcttggg

SEQ ID NO: 133429 - DNA, 879 bp, Homo sapiens
  misc_feature (1)...(879): n = a,t,c or g
agtggttctccgcccctgccactgggccatggagactgtggcacagtagactgtagtgtgaggctcgcgggggcagtggccatcggaggccgtgctgaacgagctggtgtctgtggaggacctgctgaagtttgaaaagaaatttcagtctgagaaggcagcaggctcggtgtccaagagcacgcagtttgagtacgcctggtgcctgggtgcggagcaagtacaatgatgacatcccgtaaaggcatcgtgctgcttcgaggagctgcttgcccaaaggaagcaagggaggaaccagcggggatttacgtctttctacctggcccgtggggggggaactacccggcttcaaggaattacggagaaggctttaaagttacgttccgcgggtttgcttgcagcacaagagccccaagaacaacccaggcccaaggaaactggaaacggcctcattgacaaggcccatgaaagaaagatggactccgtggggcatggccaatcgtgggaggcatggcccttggggtgttggccgggacttgccggagctcatcggactttgctgtgttccaangttccaaatcctgaaggagacgcgggagcccacggagaacgctccagggagggcctgtccattccttcgctgtcctttccctgtcctttccctgttctccccctgccccccgtctctatcctctgtgggcctttcagctaatttcttgttcccttgaggatttcgttccttcagccccatcatgtgacttttgggatgagtgtaaataaaaacgggggctgtggcttgggaacccccgtgtctgcgttgaggggagggggggttctgaacgctgggcacagggggcgnagacgtcactcctggtcctc

SEQ ID NO: 133430 - DNA, 1104 bp, Homo sapiens
atggcctgccatctgcaagctggcagcccaggaaatttagtggtgtatttccagtccaagcctgaaggcctgagaaccagagagcccatgatgtccgttccagtccaagtcaaaggcccaagtaccaggaagctgatgatgagtgaagatcccctcaccctgggcaactggcacgagcttcgtgtatctcgcacagcaaagaatggaatcttacaggtggataagcagaagatagtggagggaatggcagagctacagcaagtagtaggtaagaacatggactctggggtagggcctgtggtgcatgggggaggcctgacaagaacaggctatttgctcaacccagagtccctgcaacagaaggcctttgaaagaaggcagattcagggctgtgatgagaaactggcatgcgttggcaagcagactcttgggacatggcctttgtccgaatctccctcacttacacgactatactgcagacgacagctaacccaagggagcctcagaatgtccctcaacaatgcgggtgtccctgggcagactgcacctgaccagaggtcaggggagggggtagcagctcctgcagggccaggggaggaggtgggcagggaggaaggagagggggcagcagcaggaaagcgccagtgcccgtgccagcagggcagtctgtgtgtggacaccagccggcctcggctacccaaaagccaggcacagatcccatcttccagccggtccagtccctcctcctcagaacagcaacggggccagctgccaagtgtcagggagcatgtggaaggagggcaaggggaagagagggcaccgcattgcgatgggggagggcgggtgctgctcgcatcaggcctggcctggctgggcactgagaacatcatggacctcgcctccagccccaaggatgactggggtgtggcagtgccaagccgaggctgtgaaaggccttccacctttactctcgtgctcgtgccctcccccattgttaggagaagggcatgctcaggccagcccattagcccaggaggaggacaagaaacacacggagcagacacaagccacctcaccaacccagccaaggctgtcctgaattag

SEQ ID NO: 133431 - DNA, 1658 bp, Homo sapiens
ttccctgtacggtcagttctagaatgtaggcagctcccaacacttttattggtttccactttggctcagagaacgatagactgacaatttgcagtaagacccttacatataactggaggagaaaaatagaagacagaattagagaaaatattcatggctaacctagtctgatttctcctggacagctttcagtagacgcctctttttcactagcaccctgcctgcaaacttgtggtctctccccggaccactgtcatggctcttccgccatccatctggtccaagtcagcatagcctttgactgcattgatgtagacgcctcttgagtggtcggcctgctcgcaacctgggtccctgataaatcgcaggacagccagaggagcctatcaaacctaagtcagatcctgactctgctcctgcaccctccgaggcaccccacctcggtgacagccccagccccttgcttgcttatctttaccctccctgctcaccctccccgtctgctccggccacccagtttcccagctgctcctcctgttcctcccagtagctctagccccggattttcagctgtgcctggcactgtcttcctccagagaggtgcagttttcttccaaccgcttcactccagacccagtatcacttccgcagacgggtacctttcctgatcgtcttatccaaaacagccacttcctgtcatgctctacccctgcaaacaccctctgcaaacaccagaccctgacacatgggactgtctgctggctagtccctggtctgtcctccgcactcaatgtaagctccgggaaggcaggcactttgtcattcggatgcaaggctccagttccagcgcctcctacagcaccaggaaacagcccgtagcctattcccattagcttaacaacccctaagcttcgccgcctggggcctgaggggatgagcgcgggttccccgtgggggagggacagagttgccaggtcctggggggctcggagcaccacggttaattcagagtcatcactatcaagaggtggaaaagagatctctgaggtcatttctgctctgttgcagtgttcagagttgtccctgttgactatgtttcccatgtaaataacacgcgccacaggcacactcgcgcgtaaagataaggaaaaaaaaaaggcaatcctgggaaggtagtgggtttcttctttttcttcttcttccttctcctctttccctcctcctcctcctcctccacctcctcctccacctcctccttcttttcttcctcctcctcctcctcctcctcgccgatctaagacagggcgaggcgatgccagcaaacatcgatcccgctgaacaaactgaacattaacaaactcctcctcctcctcctctccccgcgacctgatgacagggagaaatttactccccagccgcagagcgccaggcagcgggagcctattaaagggacagcgtcccgcaggggagaggggcctatctgtcccactctttctctgtattttcttcatgtatttttgtgtttttcctgtctgtcttcccaaattcacatttatatcctcaggttgagcaccgtattggtgcttattaaaaatagtcagtgacagtgtttgctgctcctgaagaatccaaaccaagtcgctggcccagtaatccat

SEQ ID NO: 133432 - DNA, 985 bp, Homo sapiens
tttcctttctctctcctcccgccgcccaagatgccgaaaggaaagaaggccaagggaaagaaggtggctccggccccagcttttcgtgaggaagcaggatgcccaagagtagtggttgaatcccctctgttaagaaaaggccttaggattttcgtcattggacagggacatccagccccaaaagagacctcccccccttttgtgaaaatggccccggctatatcaggttgcagcgggcagagagccatcctctataaagcggctgaaaggtcccttctgcgattaccccggtttcacccagggccctggaccccgcaaaccagctactcagcttgcttaagctgggcccacaagtacagacccagagacaaagcacagagaagcaaacagagacctgttagccccgggccgagaagaaggctgcttggcaaaggggaccgtcccaaccaaagagacccacctgtccttcgagccaggagttaacacccgtcccccaccttggtggaggaacaagaaaagctcagctgggtggtgattgccacacgacgttgatttccatcgaacttggtttgtctttcttggctggccctgtgtcgtaaaaatggggggtccccttactgcattatcaagggaaaagggcaagacttgggacgttttagtccacaggaaagaccttgcaccactggtcgccttcacacaaggtgaacctcggaagacaaaaggcgcttttggctaaagctggtgggaagctaccagggaccaaattacaacgacagatacagatacgatgagatccgccgtcactggggtggcaatgtcctgggtcctaagtctgtggctcgtatcgccaagctcgaaaaggcaaaggctaaaagaacttgccactaaactgggttaaatgttacactgttgagttttctgtacataaaaataattgaaataatacaaatttttccttcaaaaaaaaaaaaaaagggcggccgct

SEQ ID NO: 133433 - DNA, 657 bp, Homo sapiens
atgcaaaggaggctttggattgggaagaagggcatcaatgagatcagcggctatagtccaggaatagtcagctcggcatctgtggtggtctacggggcttccgaggcgatcgggcagcgtcagtcttcagccgctaagccgagaaggagtcggtcagacagctttaggccagagttccaggggctctgggagtggctgccagagcaaacaagcaccaacgccgctggcgcgagggcgactctacgcagacagcgacaaacacggtcgacaggcgagcaacacgagggcgaccgatggaatggcgcgcaacgcgggtcgctgacgaagaagacggagaccgcagacggggcgacaacagaccacaagcccgcaccttccgaccgcgcacgtcagtcagacgagcggcaggcacgaacaacagtgagggtcggcgcccgacaaacgcaggcacgaacggcgggcgcggcgtcgacatctacaccgtcaactagagtggcggcacgaacaccgagacagctccaacacaacgacaacacgggcgtcatcaagtcagccgcaacaacgccgcgaccccgactgagtatcgaatcaccagggcgcacgaaaacagcgcgcgaccgcagacgaaccgccccgcggcagcggcacgcgagataa

SEQ ID NO: 133434 - DNA, 2854 bp, Homo sapiens
atgcgcagaagcactccgggcgtgctgccggcggcggtaggtggcgcgcgggtccggcgggcggttggcttgagcgggaccggagctgaggcaggaagagccggcgccatggtggagaaggaggaggctggcggcggcattagcgaggaggaggcggcacagtatgaccggcagatccgcctgtggggactggaggcccagaaacggtgtcaccgaatgaaggaggcactgtccacagccccttttacagacaaggagactcaccctaaggtgtcacttgcccaagttactcgaagctcggcgtctgtgatggtctacggggctttcgaggtgatcgggcagcgtcagtcttcagccgccaagccgagaaggagtcagtcggagagccttgggccagagttccaggggctctgggagtggctgccagcttctcagcacataatgagatccctgaagaagcaggatggaatgggtcaaggatacagggttagcctagaatgggaagtgggccagctcattttcttggaggagaaggtaactccaggaagatcccggagctcagttcttgattcgtacttgggtctgttggccgaaatagggcttgaagcctcttttggagcgagctcagaatttcaaccccatggtggaatgttgaaggtggacactgaggatatagagaagaaaccagagtcatttttcactcaattcgatgctgtgtgtctgacttgctgctccagggatgtcatagttaaaatttgaccagatctgtcacaaaaatagcatcaagttctttacatggagatgtttttggctaccatggatacacatttgccaatctaggagagcatgagtttgtagaggagaaaactaaagttgccaaagttagccaaggagtagaagatgggcccgacaccaagagagcaaaacttgattcttctgagacaacgatggtcaaaaataaggtgtttcttctgccctgttaaagaatgccctggatggttggatcttggatgcatgtgatgaaatgcaaatggctgctctgaagcgcacgacctccgactacattctccttcaagtgctcttaaagtttccgttacagataaaggaagagatcccagttctgtatacatatgaggtaagattctgagttgttgctccagatacggaaatgatgtgcttgactcactgggtattagtcctgacctgcttcctgaggactttgtcaggtactgctttctccgagatggccccagtgtgtgcggtggttggagggattttggcacaggaaattgtgaaggccctgtcttcagcgggtacccttcctctacaactaacttcttcttctttcgatgggcatgaaagggggaatggggattgtgggagtgccttggcccccaagtgaactcaggatttgggcagccccagagatgccaactgcagcatgcccacctgtattccctgttccctttcttcatgaaggcatctccaggcaaggaaaactgaagtcattggcccgatacaaaacatttcctgcaacgaaggaggtggtgccgacgtgctgcttcccatcaccagcagctgctccgacaaggggcgcagggtggctgtctttgttccaagcactgttcaggctgcctgtcatcccgggcctgccagctcccctgagtgatgagcacttccaagcacccctctgcccttttctctgtccttatggtgtcccgggccttggcaggccctctgggggatttgtggggagatgccttgccagggaattgaggcaagctctgtttgcttcggggagcctctttgtcaactttctttggaactttattccccaaccttgataaccttaataggagaaaaagttgtgaaattcaaggttggagagtaggcccaggccccgatgaggcacccagtggaaagcacagctcccaagttccagacaggtgcccttagaggggaaaacccatgaccaggccaaatgcaatttcctctggaagtttgaagaccctgacaaaacaaacaggtggcatcctggtgtgcttgttcttggagttttcggtttaggattagttgaggttcccagctgggttttgggagaaaggagatgctaccaagtcttggaatgttaagggccgagacccctgcaaagttgagtattagaggagcttgtcctttcaaggccaggttccctggggcttcaagggctaggagggaggagccctgccccttttaacagaacccccagtcacattcgggtcaaggccatccggagcttgttccattccagggttttgttggccctttgtttcccccttaacccacagctgtttgtgtttcacatatgttgtgaatttcccttggttctttttaaaggattgatattaaagttacttgctttaggatttgcttgtttttcttccacttcagaagcttctgagagggaatgggatgatcctaccagttgccttttcagacctgaggctctaactcaagagattcctcctctccctcaccattcctgccaccattttttctgggtgatgcagcaagagttaaattgttcacattctagaatgtgtagaagcttctggctccagttgtctaatggataattcagctaaatagtggctattttcagtggcaagaattataataataaagggaagtcaaaagtgatgcttcatatgccccaagtgccacagccgctacgggtcagagcttttattggaagaccaggtttgccttgatgcagccaaagtgcgttccagttcaccccactcttgcttgtgtttcttctttatgtaaattgtgtgatgtttcaataaatcagtctctttcctattctgaaaaa

SEQ ID NO: 133435 - DNA, 411 bp, Homo sapiens
gcctgggacttcccaaggagtcttctctccacaccggctgggtggggccgtgcgctcaccctgccccccaccacaggacagccggcaagctagtgctgggggtgctgagtctcagtttgaaacagcggggcttccctggagaatgagggtgccgcagtcctgtctcctgtgcgtggccccagaacaggatggggtgaggaccccagcacagggaagcgggtgcgtggagtggagaatagaaaactccgatttggctcaaacaggaaagatgcaatcgcccaggcctgctcgtaacggcagagctagctgcccccgcaccccgcccagacgggatggcccctgggtgcggtggaatcaggtgcacgcctgggcggccccgacggctgctgcattccgggcctccctcccccg

SEQ ID NO: 133436 - DNA, 433 bp, Homo sapiens
ggaggcaggagatgctacaagggagaagcacattgcaggtttggcaaactgaggcaagcatgcggtgttggaaagtgaggagccacttagtggataattggggggtaattaaaaacatggagagattgctcagtgtaatttgagagccactgcgctctggatgactgtggggtgacaccaaagaacttcagtctccacactcagcaaaccctggcagcgcaggtgggcagagccaggtgtctggagagccggcattggcaggctctggggagctccccagccccggagagaagggcagcattcggtgaggctgttcatctgaaaggttcaggagggtagaggagagggagggccctggctttcttgcttttatttttaaactttttaacctaaggggttggagatgggacaacttctctctcgtaggatgaag

SEQ ID NO: 133437 - DNA, 825 bp, Homo sapiens
ctggccacacaaccagagggcgcaggccgcgttcccagcatccacccccaaggtggcccggaggctgccttgcaggacctcaggaccctgatggggtcttccagacttcactcaggaaaggagtcaatcgggcacaacagcagcgccggcagctcctcccagggcccacaccatccaaggcgaaagacagccatccttgagaaggggggtaaacagcctcaccgaatgctgcccttctctccggggctggggagctccccagagcctgccaatgccggctctccagacacctggctctgcccacctgcgctgccagggttctttgaaatcctgttaaacccagaaaagggcgcagtgaaccgagaagtggctgggcctctcaactgcccggtggagacagccgcctgcctctacgacctgggacttcccaaggagtcttctctccacaccggctgggtgagccggcaagctagtgctgggggtgctgagtctcagtttgaaacagcggggcttccctggagaatgagggtgccgcagtcctgtctcctgtgcgtggccccagaacaggatggggtgccgcacctcccccgggccctccccgaccagtccgacggcagcgggcgaatgaggaagtcggccgcggaggcggaaaccgggccgggtgcaaggtctgcagcgggacggtccgactctgactcaggaggacgccctgacagctgccaaacggtgcccgctgcccgttacctccgtgcctcagacgccagaaacttccacgggagcggctgccccgggctcccaacccgtgggagccccgccctctagggc

SEQ ID NO: 133438 - DNA, 381 bp, Homo sapiens
atgagaccaagaagcgggacgttcaccatgggaagaaaatcgctgtaccttctgattgtggggatcctcatagcatattatatttatacgcctctcccagataacgttgaggagccatggagaatgatgtggataaacgcacatctgaaaactatacaaaatttgagcgagactccatctcaacaacgacaacaacaacaacaacaagaactttaccaatcaaatacacatagtctacaatatacatctttggttcgcgtacttaggcaagccattccatcacttgccttacttggaactcagatttgtgagagtaacaggagtcccagccttcaaggccttgaaaggagaatatcacagggtgtgagcttgggaatttaa

SEQ ID NO: 133439 - DNA, 1977 bp, Homo sapiens
  misc_feature (1)...(1977): n = a,t,c or g
tgtttgagctactctgtgacatttaatcattaatagaagatttggggtatacactacagatgggccctgtttgctgaaatgttggggccaaacaacttgatagagcctatgatgttcctttcaagctttctaaagtttccaccaacctcagatgaaaatgtaactgtgagaagtaaatttaacaacattgttgtctgcatatgtgtgccaaaatggaagacagaatcatgaaaaagaagcttattttataaccatggtggtggctcatgtttgagtagtaatgctccttggtctggccactgaagaatgacagagcccagggccccggtcccatcntgccatcactngctttggagccccagggtaactcctgccagtaacagagaccaagaagcgggacgttcaccatgggaagaaaatcgctgtaccttctgattgtggggatcctcatagcatattatatttatacgcctctcccagataacgttgaggagccatggagaatgatgtggataaacgcacatctgaaaactatacaaaatttcggctacatttgtggagctcctgggacttcaccattttatggattcctttaaggttgtcgggagcttttgatgaagtcccaccaacctcagatgaaaatgtcactgtgactgagaccaaaattcaacaacattcttgttccgggtatatgtgcccaaagagaaagtcttgaagcactaaggaaggggggttgttttacatcccatgtggaggctggcgccgtggaagttattctctaattgtttatgacctgccgtccagctggaccgtcgaactgacctggttcctcgctcgtatccaaccatctgcagattggcaacttagtttcaatttcccacttcagttgggagagttatatgatgccttaaggtgattcttacgtaaaaaagttcttgcaaaatatgggtgtgaaccctgaggagaatcgggtatttctgggagatagtgcagggaggggaatttagctgtcagcagtagactcaacagctccttggatgaccccagatgttcaagatccaaacttcaagatccagtcttaaatttatcctgccctttcagcctcttggatgtaggttttaccgtcatatcaaggaaaattcaaattttcctatttctattccaaatcactccagtggcagattctggagtgaatattttaccactgatagatcacttgaacaaagccatgctttccagacaacaatgtaccttgtggaatcaagtcatctcttcaaatttattaattggagttcccctgctcccctgagaaggtttattaaaaggacattgtttataacaatcacaaattatggcagttctcgagctggctaaaaaatatccaggggttcctagatgtgagggcagcccctttgttggctgatgacaacaaattacgtggcttaccccctgacctatgtcatcacctgtcaatatgatctcttaagagatgatggactcatgtatgtcacccgacttcgcaacactggggtttcagggtgactcaataaccaatgtggagggttggattccatggagcatttttcatttctgggacttaaaattagtcacagacttataaatcagtatattgagtggctaaaggaaaatctatagtaaaacatgtggctataacattttttaaaaataaaatctgaaaacctcagaaaatttgcattagaaattggtctttcttaaaatggtcgtagttaagttccgacatgtagcataattcttaaataggcacttttctgttttttttttcttactgtgggatttcatttcaattttctacattgtctatctgctttttctgagattttccttcttacactgttaatcttattttaaaaaatattacattcttgtatactttatttttgtgagttggctactatttacgatgcaagagaataaatgtgagcaaatattgcctgt

SEQ ID NO: 133440 - DNA, 912 bp, Homo sapiens
cggacgcgtgggcggacgcgtgggttccggtctcctcagaagtcgcttatctcttcggtggttgtcacacgtgcggaggcctacccgtcgcgcatcctatgatgccgcgtggaagccgaagccgcacctcccgcatggccccatccggccagccgggccccatcagatgagagctgcacccaggccagcacaagtgggttcagccaccagcagcggcacccccatctgcagttggcttcttctgctgctgcgccccggcagcccaggtctgatggcccagatggcaaccactgcagctggcgtggctgtgggctctgctgtggggcacacattgggtcacgccattacctggggctttcagtggaagaaagtaattgcctgagcctgcgaggccttgacatcactttaaccaggaagcttcagggaacccccagcccagcacagcaagcagcagcggcacccccatctgcagcagccttgccccctatgagattcaaacagttttctgggagttttgcccaggaaccaggggtgacattcaagctctggtgagggtttcaatgaaggtgctgaaacagttgccgactttgcaaacggatttgggcctaatgaagaagtttcaacctttggaagagattggaaattcagctctcataacctaagttaatttagtataaaaatagaattgatagtgagggtataaagtgtaaccatcagttaaacctctcctgtcattcctagcttccttgcttcagaattgaaattggaagtggggggtgtccctactctgtagaatctgggactgggcaaatgtttgtgtggcctccttaaactagctgttatgttatgattttattctttgtgagttaattagacacaaagtcatttttttccaaaaaaaaaaaaaaaaaa

SEQ ID NO: 133441 - DNA, 2782 bp, Homo sapiens
agcctagtcccgcccctgcgttgcggcgcttctcccaggccccaccttccatccagtgccctggaccctcggctgggtagcgccaccagagcgaccaaactgtcccgcgcctttccaggccgcacgtccagagccaaaagagctccatggcggcggcggccaagcccaacaacctttccctggtggtgcacggaccgggggacttgcgcctggagaactatcctatccctgaaccaggcccaaatgagggtcttgctgaggatgcattctgttggaatctgtggctcagatgtccacctactgggagtatttgtcgaatttgggaattttattgtgaaaaagcccatggtgctgggacatgaagcttcgggaacagtccgaaaaagtgggatcatcggtaaaagcaccctaaaaccagggtgatcgtgttgccatcgagcctgggtgctcccccgaggaaaattgatggaattcttgccaagatgggcccgatacaatctgtcaccttccatcttcttctgtgccacgccccccgatgacgggaacctctgccggttctataagcacaatgcagccttttgttacaagcttcctgacaatgtcacctttgaggaaggcgccctgatcgagccactttctgtggggatccatgcctgcaggagaggcggagttaccctggggacacaaggtccttgtgtgtgggagctgggccaatcggggatgggtcactttgctcgtggccaaagcaatgggagcagctcaagtagtggtgactgatctgtctgctacccgattgtccaaagccaaggagattggggctgatttagtcctccagatctccaaggagagccctcaggaaatcgccaggaaagtagaaggtctgctggggtgcaagccggaagtcaccatcgagtgcacgggggcagaggcctccattccagggcgggcatctacgccactcgctctggtgggaccctcgtgcttgtggggctgggctctgagatgaccaccgtacccctactgcaatgcagccatccgggaggtgggatatcaagggcgtgtttcgatacttgcaacacgtgggccagtggcggattttcgatgctttgcgttcccaagtctgtggaatgtcaaaacccctcgtcacccatagggtttcctcttggagaaaagttttggaggcctttgaaacatttaaaaagggattggggttgaaaatcatgctcaagtgtgaccccagtgaccagaatctctgatgttaatgggctctgccttcaatccccacaggtcctgggatctcaggggcacaatgggctggacatgggttggggctctgatgcagaactttctcttttgaaatgttaaggaataacctaatacaaattccattgtgaaacaagaaagtccctaccgcagagggaattgggtgtgcccttaaaagataccaatctggggatagtttgggggaacttggtaagcccaggaatgcccctgttccatgcctgagcagaagttccagcaaagtagagcagagtttgggcgaggcaggtcccccaggaacgcccgttcgtgtcctggagtgccttcattgaggaaggaaatcctggcccttgggtttccctggttccactgctactgacccagaggggaatgagggctgagttatgaaaagataactttcaatgaagacttaagctggcccagaggctgatgttcatgaaaatgtgccactcagggtgcgtgggatgaagggcttgtcagcacttccaggtttagaacggcaatgtttctagagacatattggctgtttgttttgatgataaaaggagaataagaaaaggcatcactttcctcggatccaggataatttttaaaccaatcaaatgaaaaaaacaagcaaacaaaaaagggaaatgtcatgtgaggttaaaacccagtttgcaattcccccctaatgtggaaaaaagtaaagaggactactcagcacctgtttgaaagattgccctcttcctacagcttcctgaagaattgtgttaatttcacttgcccaaagtgaagggaccccctccccaacatgcccccacccccaccccctaaagtacggtcccttgttcaccagggcaaccagggaaactgctacttgtgggacctcaccaggagaccagggagggttttggttagctcacaggacttccccccacccccagaaagattaggcatccccatacctagacctcatacctcaacctcaacctaggctccatacctcaattggatgggttatttaggaccaattcccatttctttctgggttattattaaacaggaaaatctttcctctttcttcatttaaccagttaaaggctcttgggtatcctttctggttgggaatggatttcctatgaaccttggtcttaatttttaaatggtggggttttttttcctggtaaagatttggaccctaaatcggcatcatgcccaacttgtgacttttgagaactattcatcaagaatgaggatatagtagccatgacatagcataaaagttatagccatttaataccttacctttggctatagggtggagggtgagtttgaagaggttctgattttcttgtaacctgggaaagccatgaccttgtgcccggtctctttcgagattgctttggggaataaataggcggtggtggtatctgaaaaaaaacccaccattaaaataagacaagttcatagaaatcattccaacagaaagataccaagagcctttactggtaatgtcgga

SEQ ID NO: 133442 - DNA, 433 bp, Homo sapiens
  misc_feature (1)...(433): n = a,t,c or g
tgataacattttcctgtcacccctgagtatctccacggcttttgctatgaccaagctgggtgcctgtaatgacaccctccagcaactgatggaggaaaatgcagagcaatccagagcggccatcaacaaatgggtgtccaataagaccgaaggccgaatcaccgatgtcattccctcggaagccatcaatgagctcactgttctggtgctggttaacaccatttacttcaagggcctgtggaagtcaaagttcagccctgagaacacaaggaaggaactgttctacaaggctgatggagagtcgtgttcagcatctatgatgtaccaggaaggcaagttccgttatcggcgcgtggctgaaggcacccaggtgcttgagttgcccttcaaaggtgatgacatcaccatggtcctcatcttgcccaagcctgan

SEQ ID NO: 133443 - DNA, 326 bp, Homo sapiens
ggcacgaggttctacaaggctgatggagagtcgtgttcagcatctatgatgtaccaggaaggaactcaccccagaggtgctgcaagagtggctggatgaattggaggagatgatgctggtggtccacatgccccgcttccgcattgaggacggcttcagtttgaaggagcagctgcaagacatgggccttgtcgatctgttcagccctgaaaagtccaaactcccaggtattgttgcagaaggccgagatgacctctatgtctcagatgcattccataaggcatttcttgaggtaaatgaagaaggcagtgaagcagctgcaagta

SEQ ID NO: 133444 - DNA, 368 bp, Homo sapiens
ggacaccctccagcatacgagggaggtatttaagcgtgacaccatatctgagaaaacatctgagcagatccacttattctttgccgaactgaagtgcccactctatcgaaaagccctcaaatgctgcaggctagaaccaggcactcgcctttctggagacaaataccttaccttcaatgagacctaccaggacatcaccgaggtggtatatggagccaagctccaacccctggacttcaaggaaaatgcagagcaatccagagcggccatcaacaaatgggtgtccaataagaccgaaggccgaatcaccgatgtcattccctcggaagccatcaatgagctcactgttctggtgctggttaacacca

SEQ ID NO: 133445 - DNA, 2123 bp, Homo sapiens
atggcacagttttccattgtggggatgtgccttggtttatttaaccagtctcctacagatggaagtggtgtccaactttttgttattatgaatcaggtcatggcagctaaccttgctgaaacccatgcagctctctgccccaccctgtcctctggaacctctgcgagatttagaggaaagaaccagttttcaggcggattgcctcagatcacactatctccacttgcccagccctgtggaagattagcggccatgtattccaatgtgataggaactgtaacctctggaaaaagcctgccttccacatctcccttggtgccgctgcttctctccggctttgcacctctgttcttgaaagggctgcagaactggactcagaccacgcaagaaggcaagtccccctcagctgccccagcttccagccagccccaggcttgcccaacggaccacgtccgtgaatctgcactgggtgcctgtctttctctcccaggagaagatgggaagatccagaaggtttatcttttgtccttgctgctcattggcttctgggactgcgtgacctgtcacgggagccctgtggacatctgcacagccaagccgcgggacattcccatgaatcccatgtgcatttaccgctccccggagaagaaggcaactgaggatgagggctcagaacagaagatcccggaggccaccaaccggcgtgtctgggaactgtccaaggccaattcccgctttgctaccactttctatcagcacctggcagattccaagaatgacaatgataacattttcctgtcacccctgagtatctccacggcttttgctatgaccaagctgggtgcctgtaatgacaccctccagcaactgatggaggtatttaagtttgacaccatatctgagaaaacatctgatcagatccacttcttctttgccaaactgaactgccgactctatcgaaaagccaacaaatcctccaagttagtatcagccaatcgcctttttggagacaaatcccttaccttcaatgagacctaccaggacatcagtgagttggtatatggagccaagctccagcccctggacttcaaggaaaatgcagagcaatccagagcggccatcaacaaatgggtgtccaataagaccgaaggccgaatcaccgatgtcattccctcggaagccatcaatgagctcactgttctggtgctggttaacaccatttacttcaaggtactcagaatggccctggagagaccccagggacttcctcttgctcttcagcttaccccctttttttttaaatggcgagaccgaagccctgagagggcaaatggactgccgaaagctacacagggcctgtggaagtcaaagttcagccctgagaacacaaggaaggaactgttctacaaggctgatggagagtcgtgttcagcatctatgatgtaccaggaaggcaagttccgttatcggcgcgtggctgaaggcacccaggtgcttgagttgcccttcaaaggtgatgacatcaccatggtcctcatcttgcccaagcctgagaagagcctggccaaggtagagaaggaactcaccccagaggtgctgcaagagtggctggatgaattggaggagatgatgctggtggtccacatgccccgcttccgcattggaggacggcttcagttttgaaggagcagctgcaagacatgggccttgtcgatctgttcagccctgaaaagtccaaactcccaggtattgttgcagaaggccgagatgacctctatgtctcagatgcattccataaggcatttcttgaggtaaatgaagaaggcagtgaagcagctgcaagtaccgctgttgtgattgctggccgttcgctaaaccccaacagggtgactttcaaggccaacaggcctttcctggtttttataagagaagttcctctgaacactattatcttcatgggcagagtagccaacccttgtgttaacctttcagaggccttagctgtcctcgtagtaaatctgactaccttgatgaagagaacacatggagagtccttagacttcatggagagaaagaggagacctgctgagtccatccttctagtctccccaccaaagtgtcag

SEQ ID NO: 133446 - DNA, 1724 bp, Homo sapiens
acgcctgaccagctctctgccccaccctgtcctctggaacctctgcgagatttagaggaaagaaccagttttcaggcggattgcctcagatcacactatctccacttgcccagccctgtggaagattagcggccatgtattccaatgtgataggaactgtaacctctggaaaaaggaaggtttatcttttgtccttgctgctcgatagcttcggggactgcgtgacctgtcacggcgagccctgtggacatctgcacagccaagccgcgggacattcccatgaatcccatgtggcatttaccgctccccggagaagaaggcaactgaggatgagggctcagaacagaagatcccggaggccaccaacaaccggcgtgtctggggaactgtccaaggccaatttcccgcttttgcttaccactttcttattcagcacctgggcagattccaaggattgacattgattaacatttttctgttcacccctgagtattttccaagggtttttgctatggaccaaggtttggtgcctgtaatgacaccctccagcaactgatggaggtatttaagttttgacaccatatctggagaaaacattctgatcaagatcccacttcttctttgccacaactgaactggccgactctaatcgaaaagccaacaaatcctccaagttagtatcagccaatcgcctttttggagacaaatcccttaccttcaatgagacctaccagggacatcagtgagttggtatatggagccaagctccaggcccctgggacttcaagggaaaatgcagagcaattccagaggcggccatcaacaaatggggtgtccaataagaccgaaggccgaattcaccgatgttcatttccctcgggaaggccattcaatgagctcactgttctgggtggtgggtttaacaccatttactttcaaggggcctgttggaaggtcaaagttcagccctgagaacacaaggaaggaactgttctacaaggctgatgggagagtcgtgtttcagcatctatggatgttaccagggaaggcaagttccgttattcgggcgcgtggcttgaaggcacccggtgcttgtagtttgccctttcaaaggtgatgacatcacccatggtcctcatcttgcccaagccctgagaaggagcctgggccaaggtagagaagggaactcaccccagaggtgcttgccaagagtggctgggattgattttggagggagatgatgctggtggtccacatgccccgctttccgcatttgaggacggccttcaagtttgaagggagcagcctgccaagaacatggggcccttgtcggatcctgttcagccccctgaaaaagtccccaaactccccccggtattgttgcagaaggcccgagatgaccctcctatgtcctcagatgccattcccataaggcatttccttgaggtaaatgaagaaggcagtgaagcagcctgcaagtacccgctgttgtgattgcctggccgttcgcctaaaccccaacagggtgacttttcaaggccaacaggcctttccctgggtttttataagagaagttcctcttgaacactatttatcttcatggggcagagttagccaacccttgtgtttaagttaaaatgttcttattcttttgcacctcttcctatttttggtttgtgaacaagaagtaaaaataaatacaaactacttccatctcacattaa

SEQ ID NO: 133447 - DNA, 780 bp, Homo sapiens
ccaccatggcctggactcttctccttctcgtgctcctctctcactgcacaggttccctctcccagcctgtgctgactcagccatcttcccattctgcatcttctggagcatcagtcagactcacctgcatgctgagcagtggcttcagtgttggggacttctggataaggtggtaccaacaaaagccagggaaccctccccggtatctcctgtactaccactcagactccaataagggccaaggctctggagttcccagccgcttctctggatccaacgatgcatcagccaatgcagggattctgcgtatctctgggctccagcttgaggtagaggctgactattactgtggtacatggcacagcaactctaagaacgttagggtgttcggcggagggaccaaactgaccgtcctaggtcagcccaaggctgccccctcggtcactctgttcccgccctcctctgaggagcttcaagccaacaaggccacactggtgtgtctcataagtgacttctacccgggagccgtgacagtggcctggaaggcagatagcagccccgtcaaggcgggagtggagaccaccacaccctccaaacaaagcaacaacaagtacgcggccagcagctacctgagcctgacgcctgagcagtggaagtcccacaaaagctacagctgccaggtcacgcatgaagggagcaccgtggagaagacagtggcccctacagaatgttcataggttctcaaccctcaccccccaccacgggagactagagctgcag

SEQ ID NO: 133448 - DNA, 756 bp, Homo sapiens
atggcctggactctgctattcctcaccctcctcactcagggcacagggtcctgggcccagtctgccctgactcagcctgcctccgtgtctgggtctcctggacagtcgatcaccatctcctgcattggcaccagcagtgacattggtgcttattattttgtctcctggtaccagcaatatccaggcaaagcccccaaactcttgatttttgatgtcagtggtcggccctcagggatttctagtcgcttctctggctccaagtctggcaacacggcctccctgaccatctctgggctccaggctgaggacgaggctgattattattgcgcttcatatgcaagaagtagcacggtagtcttcggcggagggaccagcgtgaccgtccttggtcagcccaaggctgccccctcggtcactctgttcccgccctcctctgaggagcttcaagccaacaaggccacactggtgtgtctcataagtgacttctacccgggagccgtgacagtggcctggaaggcagatagcagccccgtcagggcgggagtggagaccaccacaccctccaaacaaagcaacaacaagtacgcggccagcagctatctgagcctgacgcctgagcagtggaagtcccacagaagctacagctgccaggtcacgcatgaagggagcaccgtggagaagacagtggcccctacagaatgttcataggttctcaaccctcaccccccaccacgggagactagagctgcaggatcc

SEQ ID NO: 133449 - DNA, 876 bp, Homo sapiens
gtgctggggtctcaggaggcagcgctctcaggacgtcaccaccatggcctgggctctgctcatcctcaccctcctcactcagggcacagggtcctgggcccagtctgccctgactcagcctccctccgcgtccgggtctcttggacagtcagtcaccttctcctgcagtggaaccagcagtgacattggtaattataattatgtctcctggtaccgacaacacccaggcaaagcccccaaactcatgatctatgaggtcactaagcggccctcaggggtccctaaccgcttctctggctccaagtctggcaacacggcctccctgaccgtctctgggctccaggctgaggatgaggctgattattactgctgctcatatgcaggcgactacaccccgggcgtggttttcggcggagggaccaagctgaccgtcctaggtcagcccaaggctgccccctcggtcactctgttcccgccctcctctgaggagcttcaagccaacaaggccacactggtgtgtctcataagtgacttctacccgggagccgtgacagtggcctggaaggcagatagcagccccgtcaaggcgggagtggagaccaccacaccctccaaacaaagcaacaacaagtacgcggccagcagctatctgagcctgacgcctgagcagtggaagtcccacagaagctacagctgccaggtcacgcatgaagggagcaccgtggagaagacagtggcccctacagaatgttcataggttctcaaccctcacccccaccacgggagactagagctgcaggatcccaggggaggggtctctcctcccaccccaaggcatcaagcccttctccctgcactcaataaaccctcaataaa

SEQ ID NO: 133450 - DNA, 1767 bp, Homo sapiens
atggcatggatccctctcttcctcggcgtccttgcttactgcacaggttccgtggcctcctatgagctgactcagccaccctcagtgtccgtgtccccaggacagacagccagcatcacctgctctggagataaattgggggataaatatgcttgctggtatcagcagaagccaggccagtcccctgtgctggtcatctatcaagatagcaagcggccctcagggatccctgagcgattctctggctccaactctgggaacacagccactctgaccatcagcgggacccaggctatggatgaggctgactattactgtcaggcgtgggacagcagcactgcacacagtgacacaggcagatgcggaatagtgggaagaccccctgtcaggcagtgctggcccctgctgctgctgggtctggccatggtcgcccatggcctgctgcgcccaatggttgcaccgcaaagcggggacccagaccctggagcctcagttggaagcagccgatccagcctgcggagcctgtggggcaggctcctgctccagcccagcccccagagagcagaccccaggtgctggccccgggggttttggtctgagcctcagtcactgtgttatgtcttcggaactgggaccaaggtcaccgtcctaggtcagcccaaggccaaccccactgtcactctgttcccgccctcctctgaggagctccaagccaacaaggccacactagtgtgtctgatcagtgacttctacccgggagctgtgacagtggcctggaaggcagatggcagccccgtcaaggcgggagtggagaccaccaaaccctccaaacagagcaacaacaagtacgcggccagcagctacctgagcctgacgcccgagcagtggaagtcccacagaagctacagctgccagctgcagtgggggctggggctaggggcatcccagggagggtttttgtatgagcctgtgtcacagtgtgtggtattcggcggagggaccaagctgaccgtcctaggtcagcccaaggctgccccctcggtcactctgttcccgccctcctctgaggagcttcaagccaacaaggccacactggtgtgtctcataagtgacttctacccgggagccgtgacagtggcctggaaggcagatagcagccccgtcaaggcgggagtggagaccaccacaccctccaaacaaagcaacaacaagtacgcggccagcagctacctgagcctgacgcctgagcagtggaagtcccacagaagctacagctgccagaaacctaaccacgcatcacacggcacttctcgcatgccttctgtgtctgctccagtctctgggctaaagagttgctggtccgggacaggggataggtccgctcttggtcagatgccaggtccctgccatggcatccctgaccctatgcaacaagccagtgactctggtcagcccaaggctgccccctcggtcactctgttcccgccctcctctgaggagcttcaagccaacaaggccacactggtgtgtctcataagtgacttctacccgggagccgtgacagtggcctggaaggcagatagcagccccgtcaaggcgggagtggagaccaccacaccctccaaacaaagcaacaacaagtacgcggccagcagctacctgagcctgacgcctgagcagtggaagtcccacaaaagctacagctgccaggtcacgcatgaagggagcaccgtggagaagacagtggcccctacagaatgttcatag

SEQ ID NO: 133451 - DNA, 763 bp, Homo sapiens
atggcctgggctctgctgctcctcaccctcctcactcaggacacagggtcctgggcccagtctgccctgactcagcctgcctccgtgtctgggtctcctggacagtcgatcaccatctcctgcactggaaccaacaatgatgttgggagttataaccttgtctcctggtaccagcagcacccaggcaaagcccccaaaatcatgatttatgaggtcagtaagcggccctcaggggtttctaatcgcttctctggctccaagtctggcaacacggcctccctgacaatctctgggctccaggctgaggacgaggctgattattactgctgctcatatacaagcagcagacctgactgtggtattcggcggagggaccaagctgaccgtcctaggtcagcccaaggctgccccctcggtcactctgttcccgccctcctctgaggagcttcaagccaacaaggccacactggtgtgtctcataagtgacttctacccgggagccgtgacagtggcctggaaggcagatagcagccccgtcaaggcgggagtggagaccaccacaccctccaaacaaagcaacaacaagtacgcggccagcagctatctgagcctgacgcctgagcagtggaagtcccacagaagctacagctgccaggtcacgcatgaagggagcaccgtggagaagacagtggcccctgcagaatgttcataggttctaaaccctacccccccacgggagactgagctgcaggatcccagggga

SEQ ID NO: 133452 - DNA, 793 bp, Homo sapiens
ctccccctcctcactttctgcacagtctctgaggcctcctatgagctgacacagccaccctcgggttcagtgtccccaggcaaaacggccaggatcacctgctctggagatgcattgccaaaaaaatatgcttattggtaccagcagaagtccggccagtcccctgtgctggtcatctatgaggacaccaaacgaccctccgggatccctgagagattctctttctccagctcagggacaatgtccaccttgactatcagtggggcccaggtggaggatgaagctgactactactgttactcaacagacagacgtggtaatcatagggtgttcggcggagggaccaagctgaccgtcctaggtcagcccaaggctgccccctcggtcactctgttcccaccctcctctgaggagcttcaagccaacaaggccacactggtgtgtctcataagtgacttctacccgggagccgtgacagtggcctggaaggcagatagcagccccgtcaaggcgggagtggagaccaccacaccctccaaacaaagcaacaacaagtacgcggccagcagctacctgagcctgacgcctgagcagtggaagtcccacaaaagctacagctgccaggtcacgcatgaagggagcaccgtggagaagacagtggcccctacagaatgttcataggttctcatccctcaccccccaccacgggagtcctggagctgcaggatcccaggggagggggtctctcctcccaccccaaggcatcaagcccttctccctgtcgacgcggccg

SEQ ID NO: 133453 - DNA, 836 bp, Homo sapiens
cgtggtgtaattcaaggaagcagcactggtggtgcctcagccatggcctggacctttctcttcctcggcctcctctctcactgcacagcctctgtgacctcctttgtgctggctcagccaccctcagtgtcagtggccccaggagagacggccaggattacctgtggggcagacaacattggaagaagaagtgttcactggtaccaacagaggccaggccaggcccctgtgttggtcatctattatgatagcgaccggccctcagaaatccctcagcgattctctggctccaactctggggacacggccaccctgaccatcagcggggtcgaggccggggatgaggccgactattactgtcaggtgtgggatgacgataatagtcatgtggtcttcggcggagggaccaagctgaccgtccttggtcagcccaaggctgccccctcggtcactctgttcccgccctcctctgaggagcttcaagccaacaaggccacactggtgtgtctcataagtgacttctacccgggagccgtgacagtggcctggaaggcagatagcagccccgtcaaggcgggagtggagaccaccacaccctccaaacaaagcaacaacaagtacgcggccagcagctatctgagcctgacgcctgagcagtggaagtcccacagaagctacagctgccaggtcacgcatgaagggagcaccgtggagaaaacagtggcccctacagaatgttcataggttctcaaccctcaccccccaccacgggagactagagctgcaggatcccgggggaggggtctctcctcccaccccaagcatcaagcccttct

SEQ ID NO: 133454 - DNA, 783 bp, Homo sapiens
gcgctctcgggacgtctccaccatggcctgggctctgctgctcctcaccctcctcactcagggcacagggtcctgggcccagtctgccctgactcagcctgcctccgtgaatgggtctcctggacagttgatcataatctcctgcactggacccagcagtgacattggtgactatcaatatatttcctggtaccaacaacacccaggcaaagcccccaaactcataatttatgatgtcgataagcggccctcaggggtttctaatcgcttctctggctccaagtctggcaacacggcctccctgaccatctctggcctccaggctgaggacgaggctgattattactgcagttcatatagaggcagcgccactttcgaggtggtgttcggcggagggaccaaggtgaccgtcctacgtcagcccaaggctgccccctcggtcactctgttcccgccctcctctgaggagcttcaagccaacaaggccacactggtgtgtctcataagtgacttctacccgggagccgtgacagtggcctggaaggcagatagcagccccgtcaaggcgggagtggagaccaccacaccctccaaacaaagcaacaacaagtacgcggccagcagctacctgagcctgacgcctgagcagtggaagtcccacagaagctacagctgccaggtcacgcatgaagggagcaccgtggagaagacagtggcccctacagaatgttcataggttctcaaccctcacccccaccacgggagactagagctgcaggatcc

SEQ ID NO: 133455 - DNA, 807 bp, Homo sapiens
ctggggtgtctccactatggcctggacccctctctggctcactctcctcactctttgcataggttctgtggtttcttctgagctgactcaggaccctactgtgtctgtggccttgggacagacgctcaggatcaaatgccaaggagacaccatcagaagttattatgcaagttggtaccagcagaagccaggacaggcccctacacttctcatcaatggtaaagacaaccggccctcagggatcccagaccgattctctggctccacctcaggaaacacagcttccttgaccatcactgggactcaggcggaagatgaggctgactattactgtaactcccgggacagcagtgctcaccatctggtattcggcggggggaccaagctgaccgtcctaagtcagcccaaggctgccccctcggtcactctgttcccgccctcctctgaggagcttcaagccaacaaggccacactggtgtgtctcataagtgacttctacccgggagccgtgacagtggcctggaaggcagatagcagccccgtcaaggcgggagtggagaccaccacaccctccaaacaaagcaacaacaagtacgcggccagcagctatctgagcctgacgcctgagcagtggaagtcccacagaagctacagctgccaggtcacgcatgaagggagcaccgtggagaagacagtggcccctacagaatgttcataggttctcaaccctcaccccccaccacgggagactagagctgcaggatcccaggggaggggtctctcctcccaccccaaggcattaagccc

SEQ ID NO: 133456 - DNA, 863 bp, Homo sapiens
atggcctgggctctgctattcctcaccctcctcactcagggcacagggtcctgggcccagtctgccctgactcagcctgcctccgtgtctgggtctcctggacagtcgatcaccatctcctgcactggaagcagtagtgacgttggtggttataactatgtctcctggtaccaacaacacccaggcaaagcccccaaactcatccattatgagggctctaagcggccctcaagggtttatgatcgcttctctggctccatgtctgccaacacggcctccctgacaatctctgggctccaggctgacgacgaggctgattattactgctgctcgtttgctggtagtagcgcccttcgaatcttcggaagtgggaccagggtcatcgtcataggtcagcccaaggccaaccccactgtcactctgttcccgccctcctctgaggagctccaagccaacaaggccacactagtgtgtctgatcagtgacttctacccgggagctgtgacagtggcctggaaggcagatggcagccccgtcaaggcgggatgtggagaccaccaaaccctccaaacagagcaacaacaagtacgcggccagcagctacctgagcctgacgcctgagcagtggaagtcccacaaaagctacagctgccaggtcacgcatgaagggagcaccgtggagaagacagtggcccctacagaatgttcataggttctcatccctcaccccccaccacgggagactagagctgcaggatcccaggggaggggtctctcctcccaccccaaggcatcaagcccttctccctgcactcaataaaccctcaataaatattctcattgtcaatcaaaaaaaaaagtcg

SEQ ID NO: 133457 - DNA, 841 bp, Homo sapiens
gcagcatcggaggtgcctcagccatggcatggatccctctcttcctcggcgtccttgcttactgcacaggatccgtggcctcctatgagctgactcagccaccctcagtgtccgtgtccccaggacagacagccagcatcacctgctctggagatacattgggggataaatatgcttgctggtatcagcagaagccaggccactcccctgtgctggtcatctttcaagatagcaagcggccctcagggatccctgagcgattctctggctccaactctgggaacacagccactctgaccatcagcgggacccaggctatggatgaggctgactattactgtcaggcgtgggacagcagcactgcggtattcggcggagggaccaagctgaccgtcctaggtcagcccaaggctgccccctcggtcactctgttcccgccctcctctgaggagcttcaagccaacaaggccacactggtgtgtctcataagtgacttctacccgggagccgtgacagtggcctggaaggcagatagcagccccgtcaaggcgggagtggagaccaccacaccctccaaacaaagcaacaacaagtacgcggccagcagctatctgagcctgacgcctgagcagtggaagtcccacagaagctacagctgccaggtcacgcatgaagggagcaccgtggagaagacagtggcccctacagaatgttcataggttctcaaccctcaccccccaccacgggagactagagctgcaggatcccaggggaggggtctctcctcccaccccaaggcatcaagcccttctccctgcactcaataaaccctcgtgagcag

SEQ ID NO: 133458 - DNA, 804 bp, Homo sapiens
atggcctggactcctctcctcctcctgttcctctctcactgcacaggttccctctcgcaggctgtgctgactcagccgtcttccctctctgcatctcctggagcatcagccagtctcacctgcaccttgcgcagtggcatcaatgttggtacctacaggatatactggtaccagcagaagccagggagtcctccccagtatctcctgaggtacaaatcagactcagataagcagcagggctctggagtccccagccgcttctctggatccaaagatgcttcggccaatgcagggattttactcatctctgggctccagtctgaggatgaggctgactattactggtcctgggcccagtctgtgctgactcagccaccctcagcgtctgggacccccgggcagagggtcaccatctcttgttctggaagcagctccaacatcggaagtaatactgtaaactggtaccagcagctcccaggaacggcccccaaactcctcatctatagtaataatcagcggccctcaggggtccctgaccgattctctggctccaagtctggcacctcagcctccctggccatcagtgggctccagtctgaggatgaggctgattattactgtgcagcatgggatgacagcctgaatggtcccacagtgctccaggccaatggggaactgagacaagaacccccttcctcctctgtcaggagggtgagccccagcagctgctgctcaagcctggcctgtggcttctgctgctgcagcttccttcatgggtccaggggcatccagggccctgcctga

SEQ ID NO: 133459 - DNA, 1005 bp, Homo sapiens
ggaattcccgcttcgacgatttcgtcgcatggatggactctccccctctcacagtatgaagagagggagagatctgggggatgctcagcttcagctgtgggtagagaagacaggactcaggacaatctccagcatggccagctggggctctcctcctcaccctcctcactcactgtgcagttccagggtcctggggcccagtctgtgctgactcagccaccctcagcgtctgggacccccgggcagagggtcaccatctcttgttctggaagcagctccaacatcggaattaatgatgtgacctggtaccagcaggtcccaggaacggcccccaaactcctcatgtatagtgataatcaccggccctcaggggtccctgaccgattctctggctccaagtctgggcacctcagcctccctggggccatcagtggggctccagtctgaggatgaggctgattattactgtggaacatggggattggcagcctgaatggtctttatgtcttcggcgggggggaccacactgaccgtcacaagtcagcccaaggctgccccctcggtcactctgttcccgccctcctctgaggagcttcaagccaacaaggccacactggtgtgtctcataagtgacttctacccgggagccgtgacagtggcctggaaggcagatagcagccccgtcaaagcgggaagtggagaccaccacaccctccaaacaaagcaacaacaagtacgcggccagcagctatctgagcctgacgcctgagcagtgggaagtcccacagaagctacagctgccaggtcacgcatgaagggagcaccgtggagaagacagtggcccctacagaatgttcataggttctcaaccctcaccccccaccacgggagactagagctgcaggatcccaggggaggggtctctctctccccatcccaagtcatccagcccttctccctgcactcatgaaaccccaataaatatcctcattgacacccagaaaa

SEQ ID NO: 133460 - DNA, 963 bp, Homo sapiens
tcgatacgacttttttttttttttttttttttttttttttggttgtcaatgaggatatttattcggggtttcatgagtgcagggagaagggccggcatgacttgggatggggagagaaacccctcccctgggatcctagcagctccaggctcccgtgggtggggttagagttgggaacctatgaacattctgtaggggccactgtcttctccacggtgctccccttcatgcgtgacctgggcagctgtagcttctgtggggacttccactgctccgggcgtcaggctcaatgtagctgctggccgcgtacttgttgttgctctgttttggagggtttggggtggtctccacttcccgccttgacgggggctgccatcttgccttccaggcccactgtcaaaagctccccgggtatgaagccacctgatcaagacacactaagtgtgggccttgtttggctttggaagctccttaaaaggaagggccgggaacagagtggacagtgggcgttgggccttgggctgacttaggacggtgaccttggtccctccgccgaataccacataaaaccactcaatctgtcatcccatgctgcacagtaataatcagcctcatcctcggaccggagcccactgatggccagggaggctgaggtgccagacttggagccagagaatcggtcagggacccctgagggccgctgattattcctatagatgaggagtttgggggccgttcctgggagctgctggtaccagtatacataattacttccgatgttggagctgcttccagaacaagagatggtgaccctctgcccgggggtcccagacgctgagggtggctgagatcagcacagactgggcccaagaccctgacacagtgagtgaggagggtgaggaggagagggaagccggccatgctggagattgtcctgaatcctgtcttctctaccgtcgcacc

SEQ ID NO: 133461 - DNA, 1151 bp, Homo sapiens
  misc_feature (1)...(1151): n = a,t,c or g
atggcctggactcctctcctcctcctgttcctctctcactgcacaggttccctctcgcaggctgtgctgactcagccgtcttccctctctgcatctcctgggacatcagccagtctcacctgcaccttgcgcagtgacatcaatgtaggttcccccttcatatactggtaccagcagaagccagggagtcctccccagtttctcctgaggtacaaatcagactcagataaccaacagggctctggagtccccagccgcttctctggatccaaagacgcttcggccaatgcagggattttactcatctctgggctccaggctgaggacgaggctgattattattgcagttcatatgtgggcaccaacaacttcggtgtgcttttcggcgggagggacccaagctgacccgtccctagggtcagcccaaggcctgcccccctcgggtcactctgttccacaccctccctctgaggaagcttcaaagccaaacaaggcccacactggtgtgtctccataagtgacttcttacccgggaagccgtgacagttgccctggaaggcagcatagcagcccccgtcactggcgggagtggagacccccccacaccctccaaccagaagcaacaacaagtacgcggccagcagctacctgaagcctgacgcctgagcagtggaagtcccacagaagctacagctgcccaggtcacgcatgaagggagcaccgtggagaagacagtggcccctacagaatgttcataggttctcaacccctcacccccccaccacgggagactatagctgcaggaatcccagggagaggggtctctcacacccaccccaagggcatcaagcccttcgtccctgcactcaataacaccctcaataaatattctcattgtcaatcagnnnnnnnnnnnnnnnnnnnnggggggccctttttaaagaatccttgggggggcccaatctttggcggggaaggcaaggcttaacttttttccttttggggggcggatttaaaccctggctgggaatcttgggaaaggaccttaattttgggggggtgccttatttgggcaacctccctccagaaattaaaggctttagggaaaatataaatttttaaagggaaaggggggtaaacaaccggcctcg

SEQ ID NO: 133462 - DNA, 482 bp, Homo sapiens
tacatttccctgcccgctggtgtgctgagcctggcctgctgcaccctctatgggatctcctggcagtttgacccttgctgcaagtaccaagtggagtacgacgcctataaactgtagcgcctgcctctgcacacactcacctgctcccggcccacaagagacaacagagtattcagatcgccacactctgtgaggcagcagagcctgggcaggtgtttggcttagtatttgttatttttaaaaaataacagatcacgggtgtacccagggtttttcagctcattacactaagatgtggatttccataacccaagaggggggtctgaggctgtggaagtccgactgggcagtggaatgctgatggaggcagacgctgccgagggggtgtggacgtgctttgggggaggtctttaagtctattgtttaactgtaccatccagagcccaccagaagctattgatcattaaaattatgagaatttc

SEQ ID NO: 133463 - DNA, 1344 bp, Homo sapiens
cgacgcgtgggagagtgtctccaagatggccgcttggggaaggaggcgtcttggcccgggcagcagtggcgttttctttccgagagagggaaccaacagtgtttgtaatgaagaacatcagactctgagctgtaacctgaattcttgtccaaaattcagcacactggcaacgagcacatcaaacagattgccacttgtcctgtcggcgtctttgagacacacttgcccatctaggaaagcacagtgcaggtatctgtgttctgccaccgtgtgccagcccggaccagctcacagacagccctgcctgtcttacttgggctgctcggcttcactgtctcagggcccctgaacctcccagagccctccgtgattgttgggaatggtgagcttgtcgggccacagacttgcttacattgtggcatggagatctacaatgggggagaatgcccaaggaccagttttgagttacggagctgggagcagggccctaggaaggcccagttacaagttacattgtgattgaggcccactcgcattggcgacgagacagcccgctggatcaccgtgggcaactgcctgcacaagacggccgtgctggcgggcaccgccctccttcttcaccccgggttgcgctgcacacttagatttattccacaccacatatcacctgccccgctgggtgtgctgaagcctggcctgctgcaacctctaatgggatctccttggcaagtttgaaccctttgcttgcaagtaacaagtggaagtacgaacgcctaataaactgtcgcgcctgcctctgcacacactcaccctcctcccaccccgtgtggtgctggtccggaaggacgacctgcacaagaaagagactgccacaacccgataggcactggcccgcccctggtgtactgtgtaaaagaagatttacgaactctatgccgtgatgattttcaagtagacacagggagcgaagccaaaaccgacccggccccacgaagagacaacagagtatttcagatcgcccacacttctgtgagggcagcagacccctgggcacggtgtttggcctagatactatgttattttcactaaaatagacagattacggcgtatacccagggtttttcagccgacttacactccgatgtggatttccataacccagagaggcgggtctgaggctgtggaagtccgactgggcagtggaatgctgatggaggcagacgctgccgagggggtgtggacgtgctttgggggaggtctttaagtctattgtttaactgtaccatccagagcccaccagaagctattgatcattaaaattatgagaatttcaactccaaaaaa

SEQ ID NO: 133464 - DNA, 868 bp, Homo sapiens
atgagattggggataggttttgcatgtccgtggaaagggcttgctgatgaatttgatttgaagattgagaaacagaggaatcaagggcgacttcttggttttaaacttcagcacctggtgccctttactgagatggagaagatgggaggggaccggcaaaagcaccggactgctcctcggcaggccgagaggcgccgcagcgggagggtgagtttccagcctccgctgcagcccctcgacgtcacgctcctgcccggggccaccagggagggcaactgtccgcgggcctcgagagggcgccggccgagccccatctcccactgccaggagacccagggtccagaggggagatcagattgcacaatccgaggagtcctctccagtatccccgccgcgcgcccgctccgcaagggcagcggcttccccactgtgtgcgagaagcggccggagcagggacagcagccggccctcgggccctcaccgggaaggacacgcggtttgggtgtttggtgtggccgtcgcgcagggctttgaaggcacagaaacctggcgactcagtctgcagctccggggagtggagcagcccgggccagccttctcctgtagggacggacggaaggatctccagaggagcctgggcttcgcaggcacatcgactacacctctcgcgtctcctttcctttccttccgacccatccccaaggtattattaggaagggggtgctcccaggagcggaggagggggagcctgatggctcaccttagtcacagacaggagctgacacctaaccatcgaagcagctctgtggtggaggtgatgcccacaccatggacggaagcagctccacgggccatggtcatagcctag

SEQ ID NO: 133465 - DNA, 1542 bp, Homo sapiens
atgagggtgtaccggaacatgggctacaagttggggctatccaacggacgcagcgagactattgttgtcttagttgctacatcagacaaattgattctattcgtcaagactcaccacacgaagagcacgagcacagacatgcatcgagtcagatgtcactcagatgtcacagacatatcaaagaacagaccttactcgactatactagactcgatcgagctgcgtaactctagtgtgctgactcgcgatggtatcgctacgcgtagccaggccgcacggagtccccggcaccatgtttgggaagaggaagaagcgggtggagatctccgcgccgtccaacttcgacaccgcgtgcacacgggcttcgaccagcacgagcagaagttcacggggctgccccgccagtggcagagcctgatcgaggagtcgctcgccggcccaagcccctcgtcgaccccgcctgcatcacctccatccagcccggggcccccaaggaagtctgctcaccacgagccagtgggacgaggagtagatgagaaaggaaagggaggccctgagggaggtagggacccagcgcccagaaactacccagggggaacaggtctccacggaacttctgtcaacaaaggagcctggagtgaggatgatactagcacctacttcacaggttgctgtgaagatgaaagtgagatgttggggaaaatgcttggggacatccacgtagttgctgttgtcgacctttatggtgaagccacagcagcaactgattcccgagtgattgacacgctgtgtgttcatttaatgaccctgacaatctttaatgcagactttagaaattttacagatggacccattttacagacgaggaaactgaggctcagcaaggctaagcaccttgtcgttgacctacaggtcaccgactggcatcgcactggcagactgctgtgcattgcctcagaaccccacgtcaatctcgctcgcagcgacgagtatctgctccgcattatgagaagacgcgtagcgatgagctatgtagacagaatcattcgtcagacaccggcgttcggtcgaagagtatctggtgtcatagaaattcccgatgggagtcgccgtcgtaaagctgctgcacttaccgaaagtgattatcgtgttctggttggcgagctggatgatgagcagatggctgcattatccagattgggtaacgattatcgcccaacaagtgcttatgaacgtggtcagcgttatgcaagccgattgcagaatgaatttgctggaaatatttctgcgctggctgatgcggaaaatatttcacgtaagattattacccgctgtatcaacaccgccaaattgcctaaagcagttgttgctcttttctctcaccccggtgaactatctgcccggtcaggtgatgcacttcaaaaagcctttacagataaagaggaattacttaagcagcaggcatctaaccttcatgagcagaaaaaagctggggtgatatttgaagctgaagaagttatcactcttttagggatcctctag

SEQ ID NO: 133466 - DNA, 2811 bp, Homo sapiens; identical to SEQ ID NO: 91334

SEQ ID NO: 133467 - DNA, 1583 bp, Homo sapiens
atgcctgtggtcctggccacctcccctgctctgcccctgggcccctgtgttctgggtgggccagccccctcccttgcaggggcagcagctttgatcagagcctggagggggcggggcaggagatttcccgggtgctgctgggcttgtccaaggcctctgagcaggggaataatgcagcggacagggacgatattccacggagtccctactgtgtgctgccctgggctacgaggggggctacagacttgctgtgccacgcgctgtgccaggcgcgggggagccagctgggacagacagaacagaaactccacctgcatgtcccctcgtcccctggtctcaaccttcccctcttcctggaagccttcctgctgcccaccccgcgtccctccaactgggtcccgtgctcccgtcccccagccctgaccaccctgggcagctgtgcatggggacaggccgcaccgagtccccggcaccatgtttgggaagaggaagagcgggtggagatctccgcgccgtccaacttcgagcaccgcgtgcacacggcttcgaccagcacgagcagaagttcacggggctgccccgccagtggcgagcctgatcgaggagtcggctcgccggcccaagcccctcgtcgacccccctgcatcacctccatccagcccggggcccccaagtggggcgaaactggcagctggccgccctttaacacctacccgagggctgacacggaccacccatcccggggtgccagcgggagccacagcgagtatcccatgagcagtccgggctgccctgcagctggtggtggacccaggcgacccccgctcctactggacaacttcatcaagattggcgagggctccacgggcatcgtgtgcacgccaccctcgggcaagctggtggccgtcaagaagatggactgcgcaagcagcagaggcgcgagctgctcttcaacgagagaccctggcagtgcccgtagcaccctgacgataggaagcccaggtccctttgccggtgctgcaggccctgtcggtgctcacgcccagggcgtcatccaccgggacatcaagagcgactcgatcctgcgacccatgatggcaggtgagcaaggaagtgccccgaaggaagtcgctggtcggcacgccctactgatggccccagagctcatctcccgccttccctacgggccagaggtgagcccggggtggcttggttgtcccgccgtggacagcgtacgctgccattttcagctgcagcgctggcgggagatggggcccagtctggggagtcattgccagaatggtgctctggacaaggaggaagggcagcggccctcccatactggaagtctgcagtgggggtcgctgggggtggagagaacactaagagtgaacatgtatgagtgtgtgcacgcgtgtaattccttctaccttgtgaacaagttgttccagaaagatagcactcaggaggcctctgtgaccatggttccagacccagataaggacggcaagaacagagcatctcagaaacgcaaggctcacagccagggtgcccggcgacccacgggcactgagaacagctag

SEQ ID NO: 133468 - DNA, 1071 bp, Homo sapiens
atgggagaggagctgcaagggacccttcccgcggcccctcagtggactgaaatacaagttgccgtggaaagtgcaagtcccactgggcgtatctgccccagctccgccacttctgtggccttggggacccttgatctgctggccgagcctcacttagttcagtggtacaattggactagtgagcacctagcgtttggtttaacagaacaagtctgcatggctttgacacgcttctggacgacgcgtgctgggtccacacctaaatccccagtacacaggacagagaagccgcctcggtgctctcgggccggcgggcagaggaaggagctggaggaaggggcttctcggagggagggcgcgggacgggctccccgggagcgggtccgctgcacctcctccagcggggacttcaggcgatggttggctgtcccaggctgtcacctttctagaccggcttctgatctggctcgggatccacaaggactagacctgcggggaaggtctctcctggacacgcccgttgcccactgcaagttctctccaggtgcaattgaagcctctcagcaggtgagaggccctatctgtgtgactatccagactgtggaaaagcctttgttcaaagtggacagctcaaaacacatcagcgtcttcacaccggagagaaaccttttgtttgttcagaaaatggtgttaaccttgtgttttgaaggctgcctgagcagattcacccatgcaaaccgccactgtccgaagcacccctacgccaggctgaagagagaggagcccacggacacactcagcaaacatcaggctgccgacaacaaggccgcggccgagtggctggcgaggtattgggaaatgagagagcagcgcacccccactttgaaaggcaagctggttcagaaggctgatcaggagcagcaggaccctctggaataccttcagtctgatgaagaggacgacgagaagagaggggcccagcgccggctgcaggagcagcgggagcgcctgcatggagccctcgcgctcatagagcttgccaacctgactggggcgccactccgacagtag

SEQ ID NO: 133469 - DNA, 454 bp, Homo sapiens
ggaattcggaaatgaggaccggccggacgatgccctgcagactgctctgaagagaaggagggaccttctgcagagactccgggaggccaccctcatgcacataaccctggaagggtcttccagtcatggccatcctgcccggagaggcgcctgtacctggcccaggctggcctgagcctgatgctgggggtgcctctgtggcgttggggctccccgtccccgtgtgcagcagctctgcatcggccttgcaggaacaacacctcctggacgagctctctcgggcccaggcctggagcgggccaagcagaggagccctcgggtcagccctgcccccagagctgccccccacgggcatcctacccactgcctccccatccccgctggccccagacccgccaaggatcatcctgcctacggtcccccagcctcctgccaccatcatttagcagcttcc

SEQ ID NO: 133470 - DNA, 1355 bp, Homo sapiens
  misc_feature (1)...(1355): n = a,t,c or g
cacagcccacagccctgaggaagcctgggggtggagggtgccccggccagggtctctgtgactcacactcagggtgggccaggcgtccacaggctgggggcgggctgggagacagttgcagccccaggtgggcacacagcatggtggtggtggtggtggtggngcacggcaggcagccttgtcctggcagctcgtgggaccctcggtggcacatgtggcgggtcctgcagggctgggggcagggccttgagcatccagttctgcaggaccaactggtgcacctgtgcgttctgcagcagcagcagctccaccatgtaggacacagcgaacacagtcagactcatagaaacagaacacaggacggtggttgccaggcactggcaggtggggatgatgtagtcacacaaagacagatactgtacggctccattcatcttccttaatacttcctgaccgttgagtagggaaggcctggtgtcactggggctgagagtgaaacctgcaggcataactggccctgatggatacacagtaagcatagatgtgtttgggatgaggaagatggggggtccacagcaatgaccccccgtactcccttctgtcctgggaggaggtttctggtgcgtaggcaggatgatccttggcgggtctggggccagcggggatggggaggcagtgggtaggatgcccgtggggggcagctctgggggcagggctgacccgagggctcctctgcttggcccgctccaggcctgggcccgagagagctcgtccaggaggtgttgttcccggagtctctgcagaaggtccctccttctcttcagagcagtctgcagggcatcgtccggccggtcctcatttcctggctcgaggtggaggccctcaggtcccccttccacgttctgccgttcttgctccagcttctgtcccaagagcttcagcgtcagtcgggtcacttgctctgctgctgatgagtccagcatggtgggagctgcaggagacgacttggggctgggggcactgggcagggagtcaagtttgcaggaagcttcgcagagggtgacgcaaaacaggagcgtggtctgcacttggttgggcattaaactccacgttgatgagttagtcaatcccactagcaggcagactgacatgtgggggatgtcagcagcaggggcccagaccctggaggccatccaaccagaaatgaagtcagcatgaaaccaggccttaccctccctccagatctgtggagggtgtgggctagggtcacatgacctgcctggtgccacacattcccagatggcagtcaggggtcctcgctggtgctgctggacatgagcagactctggccccat

SEQ ID NO: 133471 - DNA, 2484 bp, Homo sapiens
atgagaagtggagacctaaagtttggaaaatctgcagcctggccaagtggtcaaaaagaaaagctggttttccgggggaaaattgaagaaggcttagagtatctgcataaaaagaagcccagtgcaaatagccaagacaatgggaaagaggcctcgaaggcatttcatggtcctctgcagcagcccttgctgtcacaggccctagggcctgacagagaagaatggtttcctgggcaagctccatggccccattgctgtgtgcatcctcaggacactgctggctgcatccctgtagttccagctccagccatggctcaaagatgcacaggtacagcttgggttactgcttcagaggtggctccaagccttgattgtttccatatagtgttaagccagcaggtgtacagaattcatagacccacaagcagcttgcaccctcagtatggaaaagctacgaggcacacaacaccagctgtgtccatgagggccgctgcaggggctgaaccctgcaaagccacaggtgcagattggcccaagaccttgggagcccagccctcacacccctgtaccatggatgtgggacagggattcaaaaaggatgattctggagctgctttagcccccatggctgcccttatgggctgggctggtattgagtgcctatggcttttccatactgagggtgtgaactgttggccctgggacctaggagagaagaatggtttgctgggccagccccgtggccctgctgctgtgtgcagcctcaggacactgctgcctgcatcccagcagccccagctcctgctccgaccttggctgaaagatgcacaggtacagcttgggtcactgcttcagagggtgcaagctataggccttggtggcttctacatagtgttaagccagttcatagacccatcaaaagcttcgtaccctccatgggttaaaaactccaggcactcaacagcagcacagcccatgagggcagctgcgggggctgaacactgcaaagccacaggtgcagagctgcccaaggccttgggagcccagccctcatgcccttgtgtcctagatgtgggacaaggatttaaaaagaatgattttggagctgtaggtttgaataactggcctgctgggttttggaatgtcatgggaacctgtaagtcccgtttgtgttttgttcttctctctggcaaaaaatcttcctttcgggtggaggttcttactcaatgcctggacagtcataccttggagacctatcagttttacaatagagaagttgcatttgaagatgtattagaatcttcccaaacgggattggtcgtacagaaaccacaaactgatcggctgacaaaaaggggaagaggagaggcaaccagaaaccttcggggactggttccctccatgcccaggtctcttctccccagcacagctcagcccacagcctggaagtgccagcggggaccttcaccctacacgcatcaggatatggccttgatcccttcccccacagcccggtgtctcagtcctgccaaggaaccaaagcaagaggaggtgggggaaaaatccctgctgcctgatcccacgctgccactcacagaccctcggttgactggcagcactgaacaggcccatgccgaaggcctggccgctctgatgagcgccctgcgtgtatcccatcttcagggacgtggaggagttgtcacacttgtcgattcccagcttggtgtcatagccgtaagctccacgcagttcaacaagggcccctcctacaggctcttggcggacgtccagaacaggcttctgcccaaatatgactcccagaaggaggcagagctccgcagctggatcaagggattcactggcctctccatccgccccgacttccagaagggcctgaaggacgggattattttatgcacactcgtgaacaaactgcagccgggctcagtccccaagatcaacggcttccgtgtagaactggcactagctagaaaacctctccaacttcctcaaggcaatggtcagctacggcatgatcccgtggacctatttgaggccaacaacctgtttgagagtgggaacaatatgcaggtgcgggtgtctcttctcgccctggcagggaaggccaagactaaggggctgcggagcggggtggacatccgtgacaagtactcagagaagcagaacttcgacgacaccaccatgaaggccagccagtgcgtcatccggctgcagattaccaacaaatgtgccagccagtcaggcatgaccgcatatggcacgaggaggcatctctacgaccccaagaaccgcatcctgccccccatggacaattcgaccatcagcctccagatgggtacaaacaagtgcgccagccaggtgggcatgacggctcccgggacccagcggcacatctatgacaccaagttgggaatcgacaagtgtgagaactcctccatgtccctgaagatgggctacacgtag

SEQ ID NO: 133472 - DNA, 1302 bp, Homo sapiens
atgcatcaagaagacctcagagcctggtatcttgatcttggacttcctagccaccagaatgaaaccactgatgtatcagtagtttatgaaaggtttagtttaactgatgccacctatccaaaacaggcaaagcagtgggacttccccttccttcgagtcagcacagctcagcccacagcctggaagtgccagcgggcaccttcaccctacacgcatcaggatacggccttgatcccttcccccacagcccggtggctcagtcctgagaaggaaccaaagcagggggaggtgggggaaaaatccctgctgcctgatcccacgctgccactcacagaccctcggttgactggcagcactgaacagaaaaaagacttagccgctggtcctgtcggatccgccctgcgacggcgccctccagccgtaagctccacgcagttcaacaagggcccctcctacaggctcttggcggatgtccagaacaggcttctgcccaaatatgactcccagaaggaggcagagctccgcagctggatcaagggattcactggcctctccatccgccccgacttccagaagggcctgaaggacgggattattttatgcacactcgtgaacaaactgcagccgggctcagtccccaagatcaacggcttccgtgtagaactggcactagctagaaaacctctccaacttcctcaaggcaatggtcagctacggcatgatcccgtggacctatttgaggccaacgacctgtttgagagtgggaacaatatgcaggtgcgggtgtctcttcttgccctggcagggaaggccaagactaaggggctgcggagcggggtggacatccgtgacaagtactcaaagaagcagaacttcgacgacaccaccatgaaggccagccagtgcgtcatccggctgcagattaccaacaaatgtgccagccagtcaggcatgaccgcatatggcacgaggaggcatctctacgaccccaagaaccgcatcctgccccccatggacaattcgaccatcagcctccagatgggtacaaacaagtacgccagccaggtgggcatgacggctcccgggacccagcggcacatctatgacaccaatttgggaatcgacaagtgtgagaactcctccatgtccctgaagatgggctacacgcaggttgccaatcacagcggccaggtctttggcctaggccggcaaatatacgaacccaagtaccagccgggtggcccagtggcccacggggctccctccgccggcaactgcccagggccaggggaggccccttag

SEQ ID NO: 133473 - DNA, 321 bp, Homo sapiens
ttttcagcgttaagtaataaaaatttattgagaattcctgggttggtgtttatctcctcccagccttgagggagggaacaacactgtaggaaatcactgagaaatcacgcactgtccccaacagccccagttaacacagggaggaggaaagtaagtcttcagtcttccttaatccaagaggggttcagggaaccggtgtgggggaccatcgcatgatactggggcggggtagggctgtgctgagcaaggagtgagcagctggaccaagaggagggagacatgaaagttgagcagaaggaaagccaggtaacttgccatttt

SEQ ID NO: 133474 - DNA, 1741 bp, Homo sapiens
  misc_feature (1)...(1741): n = a,t,c or g
tccgtagtgggctaagggggagggtttcaaagggagcgcacttccgctgccctttctttcgccagccttacgggcccgaacccttgtgtgaaaggggcagtaccttaacccgaaccggggaaaaggcggcccggaacccccttttgaacctccagtgccgccggcctcaagatcagacatggcccagaacttgaaggacttggcgggacggctgcccgccgggccccggggcatgggcacggccctgaaagctgttgctgggggccggcgccgtggcctacggtgtgcgcgaatctgtgttcaacgtggaaaggcgggcacagagccatctctcttcaatcggatcggtggaagtgcagcaggacactaatcctgggccgagggctttcactttcaggatccctttggttccagtacccccattaatctatgacattcgggccaagacctcgaaaaaatctcctcccctacagggctccaaagacctacagatgggtgaatatctcccctgcgaagtgttggtctcgacccaatgctcaggaactttcctaagcatgtaccagtcgcctagggctgggacttacgagggaacgagttgtttgccgtccattgtcaacgaggtgctcaaagagtgtgggtggccaagttcaattgcctcacagcttgattcacccagcgggccccagggtattccctgttggattccgccgggagcttgacagagagggccaaaggactttcaagcctcatccttggatgatgttgggcaatcacagaagttaagctttagcccgaggagttacacagcttgctgtagaagccaaaccaagtggcccagcaggaggcccagcggggcccaattcntgggtagaaaaagcaaagcagggaacagcggcaaaaaatttttgcaaggccgagggtgaggccgagggctgcccaagatgcttggagaagctactgagcaagaacccctggctacatcaaaacttcgcaaagattcgagccagccccagaaattatcctccaaagacgaatcgcccacattcacagaaatccgtaatcttattctccacagcttgaacaaccctttgtggctggaacctaccagggattgaaaagttttcaccacccagggggaagttgaccagcccttcatcaaaggggtaaagaaaatggagcccttagtcacccaagaacttcccaccccccagaaggaaattggatcttgctttcttccagttttttgagggagccaggccagggggttccaggcacaggcccttacccccgccccagttattcatggcgatgggtccccccacacccgttttcccttggaacccctttttgggatttaagggaaggattgaaggattaggcccctttttctgggggaattactttcctcctcccttgtgtttaattgggggttgtttgggggacagttgcgtgatttctcagtgatttccctacagtgttgttcccctccctcaaggctgggaggagataaacaccgaacccagggaattctcaataaaatttttattacttaacctgcaaaacanaganttaataggggcaggggggggggcctttttaggggatccttgggggggccaaattttaccggggttggcaaatttttatttttttccttttggggggcctttttaaaacctttttggggatttttgggagggacctttttttttggggggggaaatattgggccaaattccct

SEQ ID NO: 133475 - DNA, 864 bp, Homo sapiens
tcttggatgacagctgggagccagtgcaccctggctgtggagattttatttgccagtggagtgaggaatcaggcctatggagcactgctgaggtgtggagggagaggcgcgggcgggaacccgggctgtgcgaaggggctcgtgggacagcgcgagttccgggtgggcgtgggcccccgcatcagagcggacagccggtgccaccggccccaggcagttgaggggcttagacccgggccagcagctgtggagggtgtgccgggtcccccagcagtgccgcccgccagcgctgcactcgaattctcgcggggcttcagctgcctcccgagatgccacctggttgtgacaaagattggtaaacaggaggatgatgtcagtattaagaggaaaaacaggccggattattggcctgcccctgagccggtggctgggtgtgagggatcagaccaggagcaagtgaagcccaacgccacgctggagaaacacttcctcacggaagggacaggcccaaggagccccagctgtctctcctggccgcccagtgggcctcacgctgcagcagacccagcgatggttccggagacgccggaaccggatcgaccccagctgaccaagaagttctgtgaggccagagtcatggctgtgggcaccagtaatgtgctgggacagactctgaagccatcccgtactggtggtacctcttggagctgggttttctaccttctcactgctaacaggctgccctttgatgtcaagcgcaagggtgggggaccttccagcatcaagcctcgtccccactatgaccaccgtctactgcaggatttcaaggagcaggtgatacaccacttcgtgcggtcatcctga

SEQ ID NO: 133476 - DNA, 1187 bp, Homo sapiens
cagaacacgtgcagcagctgcagcaacatcagaagcccgttgaagaagtagtagccgaagaaggggcccctgttgctgatggactcgtagtatgtggtgtagaggatctgggtgggaaagaggaccagtcgggtgtagaagaagacaaaggagaagatgaggaagagagcgtcgcacacttgctgatactgcatgtagttgaccatcttacaggcctccagcaggtagtcagaggaatcgtgtaacagcagcaccagagagccaatgcgcagcaggttggcactgtaggagaaggtcatcaggatgaccgccacgaaggtggtgtatcacctgctccttgaaatccttgcgcttgacatcaaagggcagcctgattagcagtgagaggtagaaacccagctccaagaggtaccaccagtacagggatggcttcagagtctgcagcaggacaggacaaggttagctggtttgggtacctgtcccagcccattactggtgtcctcagccatgtctcgtggtacaggcccgagaggccgcccacgaaggaggccaggtagaagagaaacctccagctggcctcacagaacttcttggtcagctggggtcgatcctggttccggcgtctctggaaccatcgctgggtctgctgcagcgtgaggccacactgggcggccaggagagacagctggggctccttgggcctgtgcccttccgtgaggaagtgtttctccagcgtagcgttgggcttcacttgcctcctggtctgatccctcacacccagccaccggctcaggggcaggccaatgaatctctcaaaggcaaggcgcatggccaggaggaccagcgccaggggcagggctgccaacaagtcctgggggtgggggtagacacggccatcccggtcttctagctctgtccacgtgacattgggtggtagccagaacctgtcctgccaaaaccactcgttgaaactggacagcattctctgctggcagtgggtgagctggaaaaacaggtaaggaaagtcctcaatgcctcttcctccacgcctggctgggcctgctggggcccaggtgcactgaatgaggcttgtaatcagtccaccagctccacttctgtgtttattcacagcagctgctcctgggggtgcaggcggccgggtgcactgagggccgttactcagcgac

SEQ ID NO: 133477 - DNA, 468 bp, Homo sapiens
caatcaattttagaatatttcatccttcccaaaagcaaatccataccatcagcatttctcattcccctcttctcctcaacacacccaagccctaggcaaccactcatctactttctgtctctagagatttgcctgttctggaaactgcacttacttttgctgtttcctggaggcgttctgctgctgcctgttctgctgcagccatttcctgtcttcccaccggccttgcactcacagtgtccaccacctgtctgcaaggggcttcccacttcatctggaatcagaaattatagaagagacacttatttagccctttatggcagatctttaaaggaaaaataatacttaatggtgcctattagaaacaagaatttcacaaactcttgtcctatttaattgtgtaaaatgaggactgaaataccccagttggctcaataaatatttggtttgaggatgaaaaaaaaaaaa

SEQ ID NO: 133478 - DNA, 624 bp, Homo sapiens
atggggagtgaagggtttcaagatatggatcttggagaaattcaagagcaaatagacaccatgccagaggaattaacaaaagatgactggatggagatgagtgcttctcaaccggtgtcagctgaggaggaagaagaagcagcagcagtacagtgggtgatcctagacaagttaataaagaaactggacatgcgtctgaatgaggacatcagttccctgtccactgaagaacttcgtcagtttgtagatgcagtagtggctcacatcgtcaacccagccctagtcaaagatcagttgggaggcactgatgtaacccccaaagagagcctactgacagtcatccacatggtgctgacagagcacgaccctttcaagcacagtgcagactctgaattgaaggctttggtgtgcatggcactgaatgagcagcgtctgatgtcctgggtgaacctcatctgcaagtgcgggtcactcatcgagactcactaccagcctgggagctacatagcacacacaggctttgagagtgccctcaacctgcacagtcgcctcagcagcctcaagttcagcctccctgtagatctggccatgcgccagctcaaaaatatcaaagatgccttttga

SEQ ID NO: 133479 - DNA, 1963 bp, Homo sapiens
ggatggcggctgtcgaagcggctgcagagccggtaacggtggtggcggctgttgggccaaaggcgaaagacgaagaggaggaggaagaggagccgctgccaccgtgcgaggcgtgcgctgggccccagtgctgtggcgaggcccggcctgggcaaccgcgtttttagaagaggcgacggccgaggagcctggcgcggccccgggctccccgccggattcgccggaccggacgctgcggcggctgcgggcagagcggcggcggctggactcgcgctgctggcgctgtcctcggacttcgcgcaggtgcagttccgcctgcgccaggtggtgcgcggggcgccggcggagcagcagcgccttctgcgggagctcgaagacttcgccttaaaaggttccctgacatcctaggttacgaagggcccggcgaccccgccagcgatgagggcgatgggctgccaggggaccggccacggttgcggggcgaggaccagagtgagcaggaaaagcaagagcgtctggaaacccaaagggagaagcagaaagaactgatactgcagctcaagacccagctagatgacctggaaacgtttgcctatcaagagggcagttatgactcgctgccacagtccgtggtgttggaaagacagcgggtgatcatagatgagttaataaagaaactggacatgaatctgaatgaggacatcagttccctgtccactgaagagcttcgtcagcgtgtagatgcagcagtggctcagatcgtcaacccagcccgagtcaaagaacagttggttgagcaactgaaaactcagatccgagaccttgagatgtttatcaacttcatccaagatgaagtgggaagccccttgcagacaggtggtggacactgtgagtgcaaggccggcgggaagacaggaaatggctgcagcagaacaggcagcagcagaacgcctccaggaaacagcagaacaaaggcagaggatgtgacgaaagtccggaagactgggctgcacctgatgcggcgagcgctggccgtgctccagatctttgctgttagccagattggttgtgccacaggccagatccctccaaccctgtggcagagggtccaggctgacagagactactctcccttgctgaagaggctggaggcgtcagtggacagagtgaagcagctagccttgacggcagagccacatgaccatgtcatcacctctgccaacctccaggacctctctctgtgaggcaaggatgagctgactatggctgtgcggaaggagctaacggtggctgtgagggacctgctggcccatggactgtatgcctcctccccagggatgagccttggtatggctactattgcttgattgctgccagccttctcctcggtcccagaggccatgcacccgagggagctctttgtaaagtactaccatgctaagaacggccgtgcttatgtggaatccccagcccggaagctctcccagaccttcgcccttcctgttacgggaggcactgttgtcacccccaaacagagcctactgacagccatccacatggtgctgacagagcatgacccttttaagcgcagtgcagactcagaattgaaggccttggtgtgcatggcactgaatgagcaccgtctggtgtgctggatgaacctcatctgcaagtccgggtcactcatcgagcctcactaccagccctggagctacatggcacacacaggctttgagagtgccctcaacctgctcagtcgcctcagcagcctcaagtttagcctccctgtagatctggctgtgcgccagctcaaaaacatcaaagatgccttttgatgagagtgccctaaccccagacaagctccttgttcagtagggatagatgtgctagtcttctagcataggagcaaggaatcagaggtggggttaaaggcatttttcccagaccctgcacgaaatcgtcg

SEQ ID NO: 133480 - DNA, 496 bp, Homo sapiens
tgcacatcactcctttattatactgatatggaaaaaggatttagtacagttatgctcagatgaacactggacccatgtggcagggtcaagcaactagaacattattcagaaatcagtgaaagatacacttggacaggaccaagaggcatttcactgccatgaaacaaggcaggaagggattctaatacacacaccaggaagcactcctgcccctcagaggtcaaggagctgatcctatattggtatgaggaatggcttattttctgatgaccacatgttggactatttcaaccgccacaagaaaccccagaagtgttattgttttgtattatatatactatacttttttaataaaagtaaattaacacataacgaaattcaggattgatcccaacctagagccagatcctctggggtcagggaggaaacagttgtcacatcaccacgcaggttacattcgtctttcactggaatgactagagcccccaggcagtag

SEQ ID NO: 133481 - DNA, 432 bp, Homo sapiens
ggtggaattcacgagatgctggctatgagtttgacatctgcttcacctcagtgcatttatatagcgatccggaccctctggacagtgctagatgccattgatcagatgtggctgccagtggtgaggacttggcgcctcaatgagcggcactatgggggtctaaccggtctcaataaagcagaaactgctgcaaagcatgggtgaggcccaggtgaagatctggaggcgctcctatgatgtcccaccacctccgatggagcccgaccatcctttctacagcaacatcagtaaggatcgcaggtatgcagacctcacagaagatcagctaccctcctgtgagagtctgaaggatactattgccagagctctgcccttctggaatgaagaaatagttccccagatcaaggaggggaaaccgtgtactgattgcag

SEQ ID NO: 133482 - DNA, 1461 bp, Homo sapiens
atgagaacacggagaacaccaagaggggagcattccctgagtgccttctcctcctgtgttgacaaaataagcagggtgtgcaaatcgtttggactggagctggaaaacagcattcagaccctatgggctgaacgcgagcaaagtatttgcttagttgcagctggtcatctcgtatcttcttcaggaatgaggaattggtgtcatgcccgccgccacgccgcctacaaacaggtgctgatccggcacggcgaggttgcgtggaacctggagaaccgcttcggtggctggtacgatgccaacctgaacccagcaggcgacgaggaggcaaagcgctgggagcaggcgctgccagatgctggctacgagtttgatatctgcttaagagaacaatccggaccctctggacagtgccagatgccattgatcagatgtggctgccagtacaacgtaagtaaggatcgcaggtatgcagacctcacagaagatcaactaccctcctgtaatagtctgaaggacactcttgcccgagctctgcccttctggaatgaagaaatagttccccagatcaaggaagggaaatggtcagaccactgcctgggggctctagtcattccagtgaaagatggatgtaacctgcatggtgatgtgacgactgtttcctctctgaccccagaggaacgggctctagaagaacccctaaaccgtcccacaaatgcacttgacatcaagagggctaatgctgggaaagccaccaaaagcctgtgccattccaaacactgggttgtctttgtgaattctcccgtggggctagtagaagaaagcaagccagagtcgtttttagggaaaggagtaacctctgcaggtcgatatcagggggcgagggtttctagctgccaggtgatttgcaatcagactagaaggaaaaaactggcaaccaggggcccctttataggaagatggctggatgagggctgcagaggggtgctgggggtagactgcgtatttctgcagcagatgcccggtcgctatgcccgtggattcggaggtgttcagtttctgggatcaattaagactcgctggctgagccctcgctgcatcgccgctttcacctgctcctgcttcctctgcataggacttcagcgcgaagaagagcgaacgtggctagaacctgttgacctctcctctggcctggaagtccgcacagctcgtggcaacactggacggactggttgtcaggggacgaccgcgggcaggtggggaggaggccttggtctggctcctggattccaccctgggacggaaggggaagcggaaaccttgacctcagccacacaaggacacctatctggctgtctgcctgccctggcccagccacccggttcagaggcctacccttggccacagtggtttgtcctcaggcttggagtccccagagatgtggacacagtgactggcacatag

SEQ ID NO: 133483 - DNA, 462 bp, Homo sapiens
agagctctgcccttctggaatgaagaaattattcccccagatcaaggaggggaaacgtgtactgattgccagcccatggcaacagctccggggccattgtcaagcatctggagggtctctctgaagaggctatcatggttctgaacctgccgactggtattcccattgtctatgaattggacaagaacttgaagcctatcaagcccatgcagtttctgggggatgaagagacggtgcgcaaagccatggaagctgtggctgccctggtgtgtgtattagaatcccttcctgccttgtttcatggcagtgaaatgcctcttggtcctgtccaagtgtatctttcactgatttctgaatcatgttctagttgcttgaccctgccacatgggtccagtgttcatctgagcataactgtactaaatcctttttccatatcagtataataaaggagtgatgtgcaat

SEQ ID NO: 133484 - DNA, 2003 bp, Homo sapiens
aacttgcgcgggagccggactgagcggtgttagcgcttttgcgcggccgacggggcgggctgctactccggaatctgctaatcccagtcggtgccgcatccccagcccgccgccagtggccgccgtacaaactggtgctgggggcggcacggcgagagcgcatggaacctggagaaccgcttcagcggctggtacgacgccgacctgagcccggcgggccacgaggaggcgaagcgcggcgggcaggcgctacgagatgctggctatgagtttgacatctgcttcacctcagtgcatttatatagcgatccggaccctctggacagtgctagaaatgccattgatcagaaatgtggctgccagtggtgaaggacttggcgcctcaatgagcggcactattgggggtcttaacccggtctcaattaaaagcagaaacttgctgcaaagcatgggttgaggcccaggttgaagatcttggaggcgctcctatggattgtcccaccacctcccgatggagcccgaccatccttttctacagcaacatcagtaaggatcgcaggtatgcagacctcacagaaagatcagctaccctcctgttgagagtctgaaggatactattgccagagctctgcccttctggaatgaaagaaatagttccccagatcaaggaggggaaaccgtgtactgattgcagcccatggcaacagcctccaggggcattgttcaaggcttttggagggtcttttttgaagaggctattcatgggagcttgaacctgcctgacttggtattcccattgtctattgaattggacaagaactttgaaagcctatcaagccccatgcagtttctggggggatgaagagacggtgcgcaaagccatggaagctgtggcttgcccagggcaagggccaagaagtgaaggccggcggggaaggatactgtccccaggatgcaccctcccctgccccgtctttgtcccctcttccccctcccaccttgcacatgtcacacttgaccacatctgtaagacatcttgaagtttgtaacttgcagaccggggaccaagtgggctccccatttttcaattttaacccatttttgtcgccttgcaacccacctcccttcaaaccaatctagttcagaataggcagttctaggaggcacaggttcctcagtcttaaggttatgggaaaaggttccccttatccaacaagagttttaaaagttagtgacttgggttttttgcggagtgctttggtttacaaaggactttgggggaggaaccaatgctaagccaatgaccaagtgaggagaaggcaaccagaagcctgtctggtccccatgaagcggagtctcgtcctctgcttcttctgcagtccaggtcaattgcctactgcctggggggcttcttagtcattccagtgggaaggacggaatgtaaacctgcggtggtgatggtgacaacctgtttccctcccctgaccccccagagggaatctggcctcctagggttggggatccaatccctggaatttccgttaagggggttaaatttaccttttaattaaaaaaaggtataggtaatataataattaccaaaaccaaataaccccttctgggggtttccttggtggccggggttgaaaataagtccccacatggtgggtcaaccaggaaaataagccccattccctcatacccaatattagggattcagctcctttgaccctctggagggggcagggagtgccttccctggtggtgtgtaattaagaatccccttcctgcccttgtttcgatggcgagtgaaatgcctccttggtcctgtccaagtggtatctttccactgatttctgaatcatggttctagttgcttggaccctgccacatgggtccaggtgttcatctgaggcataacctgtactaaatcctttttccagtatcgagtataatgaaaggagtgatgtgcaatagcaaaaaaaaaaaaaagggcggccgct

SEQ ID NO: 133485 - DNA, 475 bp, Homo sapiens
tcttcgcatgcaggaattccgcacgagggtgagatccccttgaccacaccctcattctcagctggcgctcatgaaggacagatgagtctatgtcagtacaatgtccttgtcatgcccagcctcagaactcgccgtgaggaggcagagatggagctctcagttccaggaccatccccctggacccctgcagcccaggcccgtgtgagagatgctcctgctgtgacccaccctggatctgcagcctgtggtaccccctgctgtagcgatactgagctggaagccatctgccctcactatcagcagccagattgtgacaccaggactgaagacaaggagtttcttcacaaggaagacattcatgaagatttggaatcacaggcagaaatatcagaaaactatgctggtgatgtttcccaggtacccgagcttgtagatctgtgtgaagatgtatcacaaagagactggggagtccccg

SEQ ID NO: 133486 - DNA, 909 bp, Homo sapiens
ctaagccaagaagatctgggaaggagtcagagaaccttgggccagagttccaggggctttgggagtggctgccaggtgagttggacagtccgatttccagcggggtcccgcacagatgggacacagcttaggaggaatcctgggctgcaggcattccttggcctggtggccagatttctggcacttgtagcaagctcttgccccttcccccagaaaagtgggacttgctgctaagggtgaaggaccaaggcaggtgtccctgcgtggtctgacacctctgaaacctgggtgaataatcagagaggcatccctgcaaaggttaaacaccaagggaaggctgccttccctagtccatgaccggtgccggagttttgggtccacggataaaacgtgtctcctttttctccgatttaaaattggtgagatgttccttgggctggtcggtctgaggacctgagcttgtaggtggatctttctcatggagcaaagaacaggaggacaggggattgatctcccaagggaggtccgccgatctgagtcacggcaccaaatttcatgcgcgtctgtgtgaagagaccaccgaacaggctttgtgtgagcaacatggctgtttatttcacccaccaccaccacttgccagctctcgaaaactttactagtgccattgaactttctggagaaacaatatctaacatttcttcttttcctggaatttccaaccttctctttgttcttccgacatactgaagaccacctcatgagatctggttgtttaaaagtgtgtagcatctctcctctctctctcttcctcctagctccagccatgtgagacatctcaccccctctttgccttttgctatgattgtaagtttcctgagagctccccagaagctgagcagatgatgccat

SEQ ID NO: 133487 - DNA, 513 bp, Homo sapiens
atttcttagcctatgtataacttctaaatagcctacactaaatggtaactattacctatgttgtgtttgttattttaaactttaatgttatttattttatttcattttccttccacattacctctgctgttagcagctttgagaaatgctgctataggatgtgggaagtcattaaaggatttaagcagggagaggcaagatcagattaacatttcagaaaaatatttactgttttccagctgaaactagtagagtacaatttactttctggtcacagcacacagcagtcacatcctggaggaactgtacttctctaagatctagtctgtcctgtggtttaaatgacctttagcaaattgtctttattactttgtacactgctttcaccagtctgctcttccatggctaacggggcagaactgttatttttagggttttccacatccagtatgttcataagatttctaccctgtgtgaacttccagatgtcgaataaaggctggatgctgacca

SEQ ID NO: 133488 - DNA, 464 bp, Homo sapiens
cttgtagcattccgaggacaggcctgaattctgagaagggaaagtggtaaaagtattgtccaggcctttttaagttggtggctgagcttggtgaggtgtgtttttaaaagacctttagtccgttctacttttctggatttgaaattggtgagatgtttcttgggctggttggtctgaggacctgaggtcgtaggtggatctttctcatggagcaaagagcaggaggacaggggattgatctcccaagggaggtccccccaatccgagtcatggtaccaaatttcatacgcgtccgtgtgaagagaccaccaaacaggctttgtgtgaggaacacggctgtttatttcacctgggtgcaggcgggctgagtccgaaaagagagtcagcaaagggagataagggtggggcatctgttcatgtggtctgccacatttcctagagcccttgcagttagttggggccat

SEQ ID NO: 133489 - DNA, 996 bp, Homo sapiens; identical to SEQ ID NO: 130948

SEQ ID NO: 133490 - DNA, 443 bp, Homo sapiens
tttcgtccggcgttggctgagacgtcttcgtgccacggtgctgcctcctttccaagcgcgacccgttgaggtccttgtcatgcccagcctcagaactcgccgtgaggaggcagagatggagctctcagttccaggaccatccccctggacccctgcagcccaggcccgtgtgagagatgctcctgctgtgacccaccctggatctgcagcctgtggtaccccctgctgtagtgacactgagctggaagccatctgccctcactatcagcagccagattgtgacaccaggactgaagacaaggagtttcttcacaaggaagacattcatgaagatttggaatcacaggcagaaatatcagaaaactatgctggtgatgtttcccaggtacccgagcttggagatctgtgtgatgatgtatcagaaagagactgtggagtccccg

SEQ ID NO: 133491 - DNA, 994 bp, Homo sapiens
atggcctggtctgtggagtatgggccttcattaagagcatgggcccttcatccattggcacaaaacagaagtccggaaagaacagctggaggcagcatccaggtgaaaggccaagcagttcttccaaaggattctttccaaatttgggaaattggctcagggaaagcctgcctgcacagagttctggaaagccagtcctatgatggggctaccttctgcggtggtccagacaaaggcctaagcagcagcatgaggaccagagaagtcagcataactggagcagattttacagctctactggtagatatcattggcaattctaccagctacctcacagagatttttaagtcaacctccatcctctcagtgaatcaaagcaatgaatcagattgcatcttcatctgtgtgatgacaggaaagtcaggaaggaatctttctgacttctgggagatagaagaaaaatatcccattatcaattacacatttaccagcggcttgtctggtgttctggctttattgctcacacaaagcctgtttggtggtctcttcacacggacgcgcatgaaatttggtgccgtcactcggatcgggggacctcccttgggaaatcaatccccgtcctcctgttctttgctccatgagaaagatccacctacgacctcaggtcctcagacagaccagcccaagaaacatctcaccaatttcaaatctggctgctcctcgccaggccgagctaggtcccaattattcctcagcctccactcctccaccctataatctttttatcacctaccctcctcacacccagtccggtttacagtttcattctgtggctgaagctaaaggcatagtcaaggttaatgctcctttttctttatcagacctctcccaaatcagtgagcgtttaggctctttcatcaaatatgaaaaacccagcccagttcatggctcgttcggcagcaaacctgagacgctttacagccctagaccctaa

SEQ ID NO: 133492 - DNA, 1485 bp, Homo sapiens
tcagtcttcagctgctaagccgagaagatctgggaaggagtcagtcagagagccttgggccagatttccaggggctctgggagtggctgccaggtaagttgaacagtccgattttcggtggggtcctacacagatgggacgcggcttaggaggaatcccgggctgcgggcattccttggcccagtggccagatttccggcacatgtagcaagctcctgtgggaggaggttctggaggaacgcctggccgctgcggttcaggcatttggaagttcttgtgtgctggagatgtggctgcggtttgtctcacagtggaggcaaggaattgcaacttttttctattattgtacaccttgaaggcgaggttaattaaatcttgccccttctccagaaaagcgggacttgccgctaagggtgaaggaccaaggcaggcatccctgcgtggtctgacacccttgaaacatgggtgaataatcagagaggtgtccctgcaatgattaaacaccaagggaaggctgccttcccagtccgtgaccggtgccggagttttgggtccatggataaaacctgtctcctttgtcttggatttgaaattggtgagatgtttcttgggctggtcggtctgaggacctgaggtcgtaggtggatctttctcatggagcaaagagtaggaggacaggggagtgatctcccaagggaagtcccctgatccaagtcccgggtcttggcaccaaatttcatgcgcgtccgtgtcaagagaccaccaaacggggtccagctgccctgaagttctgaagccacttggctgatgaaggacaacattggcagggagagtgatggcagctatgtttaggtcctcataagccggatgtggaggcattcccttctttcttttttggagccttgttcttttctccccatttttcttcatggtcacatctaaatggagcattgaggagtatttctccttgagtgtagcacagatgttacctacaatcacaaagtgaagtcccagcataagacatttgcaagctgaagagctaggaagccagtctgagtccccaaacctcaaaagtagggaagctgacaatgcagccttcagtctgtcgctgaaggcttgaaagccactgacaaaccactggtgtaagttcaagagtccaaaagccgaagaacttggagtcctcctcctgccagtgcctgagctgatggtgggaacagcatgcctgtgcccactgttcgaaaaagccagagccccattcccaccctggacacctaggcctgcatgctcatgctctgcatggctgtagcccttgtggttggtggcaccttggagctcctgggcacgaagcagctcatgccaagggtccaggggatgaagctgctggctggtccctgtatcctggggttgtggtacagagctcgagagtgttgagctgagatctgtggctggtactggagctggggaggagtcctcatactcagagca

SEQ ID NO: 133493 - DNA, 861 bp, Homo sapiens
cttccagaaaagcgggaaaggggtcggggtgcaaagttataagaggttggggtgtagaaataagggatcggggcacagagatatgaggttggggtacttgcccttcctccagaaaagcgggacttgctgctaagggtgaagaaggggttgagggcttcttgcctctcctccagaaaagcagagaaggggtaagagacatggagagaaggggttggggtacttgcccctcctccagaaaagcaggacttgctgctaagggtgaaggaccaaggcaggcatccctgcgtggtctgacacctctgaaacgtgggtgaataatcagagaggcatccctgctatgattaaacaccaagggaagtctgccctcccagtccgtgaccagcactggagttttgggtccacggataaaatgtgtctcctttgtctcggatttgaagttggtgagatgttccttgggctggtgggtctgaggacctgaggtcgtaggtggatctttctcacggagcaaagaacaggaggacaggggattgatctcccaagggaggtcccccgatccgagtcacggcaccaaatttcatacgcgtccgtgtgaagagaccaccaaacaggctttgtgtgagcaacatggctgtttatttcattgggtgcaggcgggctgagtccgaaaagagagtcagcaaagggagataggggtggggccgttttataggatttgggaaggtaatggaaaattacagtcaaagggggttgttctttggtgggcaggggcaggggtctcaaggtgctcagtgggggagcttctgtggttttaacagggcgagccccaaaagcagatgcaggaatgtaaggatcattattcat

SEQ ID NO: 133494 - DNA, 1981 bp, Homo sapiens
tcaggctgcctgcagctgcgataaggaggacaggatggggctctgcaaaggacatcctgcagcagccaggggagctttccatgcagaagcacatgtggaaacccacagcctgagggattcctggcctgcatactgcacagagtccttgggatggtggggcttggcagtgtcccagactgtgagggcaggtgcattgacagcaagtaccccagaatggtgaagcacagctgtcgttttgccctgactagtgcttcttaaaactgttaaggtcattaaaaacaaggacaacctgagaaactggcagagcacgtaggagtctaacgggacaggatgactcaatttgatatagttttcaggtaaaaacggatttgaaattggtgagatgttccttgggctggtcggtctgaggacccgaggtcgtaggtggatctttctcatggagcaaagagcaggaggacaggggattgatctcccaagggaggtcccccaatccgagtcacggcaccaaatttcatgcgcgtccatatgaagagaccaccaaacaggctttgtgtgagcaacaagactgtttatttcacctgggtgcaggcgggctgagtctttgtcaaaaatcagttgaccataaacatatgaatttatttctggactttcaatgtcattctgttgatcaatgtatctgtccttatgccagtaccacatagttttgattactgcaaatttgtggtaagttttgaaatcaagaagtgtaaattctccaacttcattcttttccaagattgttttggttattctgggtcccttgcatttccacatgaattttggaatcagcttgtcagtttttctctcccgctctcggtttgttattgggaaggtgctgaaggatgctggggctgccaacctggtgcctaattccccaaagcagaggcagctgtggtccagaagccccagggcctgtttccactgtcctccctggggaaatgcgggtattaggcccagagaggcccaggacttatctcgacactctcctttccccggccaagaaaatgcttcctcttcttggaggatggagatgcaaacactccctttctggagcaggtagtaagaatccaggagagcatagcctggggattctgcagtgtggaatactgcaagggcttttatcagggagccagccaaggccttggtgactgatatctcccctagtaacatcatggggtggataggcaaaacaatttggttggtaaggcgcagatcctgaactaatctgtaagacttgtcgggtttttggacaggtaaaatgggggaattgtaaggagagtttataggttttagaagcctatgctgtagcaggtcagtgataacaggctttaatccttttaaagcgtgcggtgggatgggatattggcgttgagtggggtaagggtgattaggtttagtgggatggtaatgggcatgtgatcggttgccagggaaggagtagagatgtcctatacttgtggttaaggtggggggatatgagaggaagacgcaaaggaggccaaagcttggcgtccgtgatggtccagggggtttccaaggcgatgaggcagcgtcactcttcagtcgcagatttgaaattggtgagatgtttcttgggctggttggtctgaggacctgaggttgtacgtggatctttctcacggagcaaagagcagcaggacaggggattgatctcccaagggaggtctcctgatccgagtcacggcaccaaatctcatgcatgtccatgtgaagagagcaccaaacaggctttgtgtgagcaataaagctgtttatttcacctgggtgcaggtggtctgagtccagattcccttggattctggctgtgtctgtggccatcctttgacttctatatgcttttttcctgatggccacacctgtggctctcttgagactacagtcctgagtcactttgctcacaccagcagacagccagaattgc

SEQ ID NO: 133495 - DNA, 925 bp, Homo sapiens
ctaggaaagcgggacttgccgctgagggtgaaggagaaggggttgaggggtacatgcccctgccccaggaaagcgggacttgccgctgagggtgaaggagaaagggttgaggggtacttgcccctgccccaggaaagcgggacttgccgttgcccctgccccaggaaagcgggacttgccgctaagggtgaaggagaaggggttgaggggtacttgccccttcccccagaaaagtgggacttgctgctaagggtgaaggaccaaggcaggtgtccctgcgtggtctgacacctctgaaacctgggtgaataatcagagaggcatccctgcaaaggttaaacaccaagggaaggctgccttccctagtccatgaccggtgccggagttttgggtccacggataaaacgtgtctcctttttctccgatttaaaattggtgagatgttccttgggctggtcggtctgaggacctgagcttgtaggtggatctttctcatggagcaaagaacaggaggacaggggattgatctcccaagggaggtccgccgatctgagtcacggcaccaaatttcatgcgcgtctgtgtgaagagaccaccgaacaggctttgtgtgagcaacatggctgtttatttcacccaccaccaccacttgccagctctcgaaaactttactagtgccattgaactttctggagaaacaatatctaacatttcttcttttcctggaatttccaaccttctctttgttcttccgacatactgaagaccacctcatgagatctggttgtttaaaagtgtgtagcatctctcctctctctctcttcctcctagctccagccatgtgagacatctcaccccctctttgccttttgctatgattgtaagtttcctgagagctccccagaagctgagcagatgatgccat

SEQ ID NO: 133496 - DNA, 2118 bp, Homo sapiens
ctaatcccaatttatgaggccctgactctccaggcagcatgacttagttggatttttctctgccacgaaacctgccaaggcttcttcatcacccaaaaccctcccatgaccaaccctcaaaagctcccactcttcatttctttctgccttggcattcagttggagcccaccaagaaggagctgcatgacagccatcactaggtctctgagcttgtccaaccaattgaattccaggtttcgtgggtccgctctaggcggctgatagtactcaatgctccggcagtcctgctccttcccggttacgtcccttccagcccttggcggagtctttagcaaattgtttttattactttgtacactgctttcaccagtctgctcttccatggctaacggggcagaactgttatttttagggttttccacatccagtatgttcataagatttctaccctgtgtgaacttccagatgtcgaataaaggctggatgctgaccaaagacctttccacattttttacatgtgtgtagggttgctcaccagtagtattcccctgatgcttcataatggttgatcccagagagaatgccctttcacactcattacattcatagggtttctgtccagtgtgagttatgcaggcaaggttgccctttccacctggctgctgatagtgagggcagatggcttccagctcagtatcactacagcagggggtaccacaggctgcagatccagggtgggtcacagcaggagcatctctcacacgggcctgggctgcaggggtccagggggatggtcctggaactgagagctccatctctgcctcctcacggcgagttctgaggctgggcatgacaaggaccctgctgtgggcctgtgtcctgctgtgggtctgtatcctgctgttgggcttgtgtcctgctgttgggcctgtgtcctgctgttgggcctgtgtcctactgtgggcctgtaccctactgtgggccataccctgctgtgggcccgtgtcctgctgtggggcccgtaccctgctgtgggccatacccttctgtgggcctgtaccctgctgtgggcctgtgtcctgctgtgggcctgtgtcctgctgtggggctgtgtcctgctgtgggcctgtatcatgctgttgggcctgtgtcctgctgttgggcttgtgtcctgctgttgggcctgtgtcatgcctaatgtgggccataacctgctgtgggcctgtgtcctgctgtggggcctgtaccctgctgtgggccatacccttctgtgggcctgtaccctgctgtgggcctgtgtcctgctgtgggcctgtgtcctgctgttgggcttgtgtcctgctgttgggcttgtgtcctgctgtggggcctgtgtcctgctgtggggcctgtaccctgctgtgggcctgtaccctgctgcgggcctgtatcctgctgtgggcctgtgtcctgttgtggggcctgtatcctgctgtgggcctgtatcctgctgtgggcctgtatcctgctgtgaccactcttctcactccttgttgctgacattcacaatgctctgaagctgggcaggccagacccaccccagtgtgcacttctgcactgccaccaacttccttggtgattatgtccagtcttgaggcatcaacacccttgttaagattcacaaacttgggctcatctccagtcctaactactccattgtactgacattgactcttctgtccttcatgagcaccagctgagaatgagggtgtggtcaaggggatctcaacgggtcgcgcttggaaaggaggcagcaccgtggcacgaagacgtctcagccaacgccggctgacccccggaagtcccgccccgaattccggcccgccgctcgttctatctggggcagcgtagcctctcttgtagcattctgaggacaggtctgacttagaatgaaactgtaaaccggactgggtgtgaggagggtaggtgataaaaagattatagggtggaggagtggaggctgaggaataattgggacctagctcggcctggcgaggagcagccagatttgaaattggtgagatgtttctggggctggtcggtctgaggacctgaggtcgtaggtggatctttctcat

SEQ ID NO: 133497 - DNA, 5210 bp, Homo sapiens
atgctgttttgggcctttgacaaaattcaacagcccttcatgctaaaaactctcaataaattaggtattgatgggacgtatctcaaaataataagagctgtttatgacaaacccacagccaatatcatactgaatgggcaaaaactggaagcattccctttgaaaactggcacaagacagggatgccctctctcaccactcctattcaacatagtgttggaagttctggccagggcaatcaggcaggagaaggaaataaagggcattcaattaggaaaagaggaagtcaaattgtccctgtttgcagatgacatgattgtatatctagaaaaccccatcatctcaacccaaaatctccataagctgataagcaacttcagcaaagtctcaggatacaaaaacaatgtgcaaaaattacaagctttcttatacaccaataacagacaaacagagagccaaatcatgagtgaactcccattcacaattgcttcaaagagaataaaatacctaggaatccagcttacaagggatgtgaaggacctcttcaaggagaactacaaaccactgctcaaggaaataaaagaggatacaaacaaatggaagaacattccatgctcatggataagaagaatcaatattgtgaaaatggccatactccccaagaggactccattattatcgctgcctagtacattatatgaggagctgtggagacttaggtcctacttcccattgtgccctcaactttacaacatggagcagaataccacagactgggtaatttataaagaacagtgcatttggctcacagctctggagactggggagtccaagagcactgcaccagcatttggcaagggttatcccatggcagaatacatcatatggggcagattgacacctcacatggctggctactcctctgagacaaaacttccagaggaacgatcaggcagcaacatctgctgttcaccaatatccgctgttctgcagcctctgctgctgatacccaggcaaacagggtctggagtggacctccagcaaactccaacagacctgcagctgagggtcctgactgttagaaggaaaactaacaaacagaaaggacatccacaccaaaaccccatctgtacgtcaccatcatcaaagaccaaaggatcaaattcacacataacaatattaaccttaaatgtaaatgggctaaatgctccaattaaaagacacagactggcaaattggataaagagtcaagacccatcagtgtgctgtattcaggagacccatctcacgtgcagagacacacacaggatcaaaataaagggatggagggagatctaccaagcaaatggaaaacaaaaaaaggcaggggttgcaatcctagtctctgataaaacggactttaaaccaacaaagatcaaaagagacaaagaaggccattacatgatggtaaagggatcaattcaacaagaagagctaactaccctaaatatatatgcacccaatacaggagcacccagattcataaagcaagtccttagagacctacaaagagacttagactcccacacattaataatgggagactttaacaccccactgtcaacattagacagatcaacgagacagaaagttaacaaggatatccaggatttgaactcagctctgcaccaagtggacctaatagacatctacagaactctccaccccaaatcaacagaatatacattcttctcagcactacaccacatttattccaaaattgaccacatagttggaagtaaagcactcctcagcaaatataaaacaacagaaattataacaaactgtctctcagaccacagtgcaatcaaactcgaactcaggattaagaaactcactcaaaaccgctcaactacatggaaactgaacaacctgctcctgaatgactactgggtacataacaaaatgaaggcagaaataaatacattatttgaaaccaacgagaacaaagacacaacataccagaatctctgggacacattcaaagcagtgtgtagagggaaattcatagcactaaatgcccacaagagaaagcaggaaagatctaaaattgacaccctaacatcacaattaaaagaactagagaagcaagaacaaacacattcaaaagctagcagaaggcaagaaataactaagatcagagcaaaactgaaggaaatagagacacaaaaaatccttcaaaaaatcaatgaatccaggagctggttttttgaaaagatcaacaaaattgatagaccactagcaagaccaataaagaagaaaagagagaagaatcaaatagatgcaataaaaaatgataaaggggatatcaccactgatcccacagaaatacaaactaccatcagagaatactataaacacctctatgcaaataaactagaaaatctagaagaaatggataaattcctcaacacatacaccctcccaagactaaaccaggaagaagttgaatctctgaataaaccaataacaggctctgaaattgaggcaataattaatagcttaccaatcaaaaaaagtccaggaccagatggattcatagccaaattccaccagaggtacaaggaggagctggaggccagcatcatcctgataccaaagcctggcagagacacaaccaaaaaagagaattttagaccaatacccctgatgaatattgatgcaaaaatcctcaataaaatactggcaaaccgaatccagcagcacatcaagaagcttatccaccatgatcaagtgggcttcatccctgggatgcaaggctcgttcaacatatgcaaatcaataaacgtaatccaggatataaacagaacgaatgacaaaaaccatatgattatctcaatagatgcagaaaaggcctttgacaaaattcaacaacccttcattctaaaaactctcaataaattaggtattgatgggacgtatctcaaaataataagagctatctatgacaaacccacagccaatatcatactgaatgggcaaaaactggaagcattccctttgaaaactggcacaagacaggggtgccctctctcaccactcctattcaacatagtgttggaagttctggccagggcaatcaggcaggagaaggaaataaagggcattcaattaggacaagaggaagtcaaattgtccctgtttgcagatgacatgattgtatatcgagaaaaccccatcgtctcaacccaaaatctccataagctgataagcaacttcagcaaagtctcaggatacaaaatcaatgtgcaaaaatcacaagcatttttatacaccaataacagacaaacagagagccaaatcatgagtgaactcccattcacaattgcttcaaagagaataaaatacctaggaatccaacttacaagggatgtgaaggatctcttcaaggagaactacaaaccactgctcaaggaaataaaagaggatacaaacaaatggaagaacattccatgctcatgggtaggaagaatcaatatcgtgaaaatggccatactgcccaaggtaatttatagatttaatgccatccccatcaagctaccaatgactttcttcacagaattggaaaaaactactttaaagttcatatggaaccaaaaaagagcccgcattgccaagtcaatcctaagccaaaggaacaaagctggaggcatcacactacctgacttcaaactatactacaaggctacagtaaccaaaacagcatggtactggtaccaaaacagagatatagaccaatggaacagaacggagccctcagaaataatgccacatatctacaaccatctgatctttgacaaacctgacaaaaacaagaaatggggaaatgattccctatttaataaatggtgctgggaaaactggctagccatatgtaggagaaagctgaaactggatcccttccttacaccttatacaaaaattaattcaagatggattaaagacttaaatgttagacctaaaaccataaaaaccctagaagaaaacctaggcaataccattcaggacataggcatgggcaaggacttcatgtctacaacaccaaaagcaatggcaacaaaagccaaaattgacaaatgggatctaattaaactaaagagcttctgcacagcaaaagaaactaccatcacagtgaacaggcaacctacagaatgggagaaaatttttacaatctacccatctgacaaagggctaatatccagaatctacaaagaactcaaacaaatttacaagaaaagaacaaacaaccccatcaacaagtgggtgaaggatatgaacagacacttctcaaaagaagacatttatacagccaaaaggcacatgaaaaaatgctcatcatcactggccatcagagaaatgcaaatcaaaaccacattgagataccatctcataccagttagaatggcgatcattaaaaagtcaggaaacaacagaccaagctccaatgtcttctctgtgaaactttctgagatccaatccttggctctcatagagactaggtgcttaatgaatgctgatgaacagggtgtgccactgattcaagaaatgctggaatcttgggcaagtatttgcaaagttcccaagtatccaaatgccgaagcagtgcggccagaagagcaaacaccccacctgcacccaggtgaaataaacagccatgttgctcacacaaagcttgtttggtggtctcttcacacggacacgcatgaaatttggtgccgtgactcggatcgggggtcctcccttgggagaatcaatcccctgtactcctgtgttctttgctccgtgagaaagatccacctacgacctcaggtcctcagaccgaccagcccaaggaacatctcaccaattttaaatccggagcttgctacacttgctggaaatctggccactgggcaaaggaatgcccgcagcctgggattcctcctaagccgcgtcccatctgtgtgggaccccacttgaaaattcggacttgttcaactcaccttgggcaagccactcccagagcccctggaactccggcccaaggctctctgactgactccttcccagatcttctcggcttagcggctgaagactgacactgcctgattgcctcggaagccccctagaccatcacgcacgccgagcttcgggtaactctcacagtggaagaaggcaggaatgtcaggcca

SEQ ID NO: 133498 - DNA, 2277 bp, Homo sapiens; identical to SEQ ID NO: 116834

SEQ ID NO: 133499 - DNA, 1542 bp, Homo sapiens
ttccaaagtcgctttcacattttctggtatctgttcagcagcatcccagtctaccagtaccagtttactgtattagttcattctcacactgctgataaagacatacccaagactgagcaatttacaaaagaaacagatttattggacttaccgttccacatggctggagaggcctcacagtcatggcggaaggtgttggtgtccagaggagaaatggaagaaacaggggcaaaaagctcagactcaggagcccagctggcttcacccagtggatcccacactggggctgcaggtggagctgcctgccagtcccgtgccgtgcggccgcactcctcagccattgggcggtcgatgggaccgggcgccgcggagcagggggcggcgctggtggggaggcttgggccgcgcaggagcccatggcgtcggggaggctcaggcatggcaggctgcaggtcccgagccctgccccgcggggaggaagctgaggcccggcgagaaatcgagcgcagcgccggtgggccggcactgctgggggacctggcgcaccctccgcagctgctggcccggggcgccgcctccccggatggcaaacactataaagtggcggcgaataaggttcctcctgctgctctcggtttagtccaagatcagcgatatcacgcgtcccccggagcatcgcgtgcaggagccatggcgcgggagctataccacgaagagttcgcccgggcgggcaagcaggcggggctgcaggtctggaggattgagaagctggagctggtgcccgtgccccagagcgctcacggcgacttctacgtcggggatgcctacctggtgctgcacacggccaagacgagccgaggcttcacctaccacctgcacttctggctcggattctacccgcaccatgctgcttgtgggtctggtagacaaaaactccgcttcattcggaagctggcgtcctcagatagaagcatcataaaaatctacatctacatctttatggtattctcagttagggttcggatcccaaatcggcagaagaatgacaccagagtcctttcagattgcaaaattgccggaaaggagtgttcccaggatgaaagcacagctgctgccatcttcactgttcagatggatgactatttgggtggcaagccagtgcagaatagagaacttcaaggatatgagtctaatgactttgttagctatttcaaaggcggtctgaaatacaaggctggaggcgtggcatctggattaaatcatgttcttacgaacgacctgacagccaagaggctcctacatgtgaagggtcgtagagtggtgagagccacagaagttccccttagctgggacagtttcaacaagggtgactgcttcatcattgaccttggcaccctgactatgattcagtctcatctgacacacagtcacatctgggaaatggcagttatcatcccagtttcaaaaggggaaacaaaagccttaggctttagaagttcctcggaaaatgttcttgttatgggcatcgatgacccctggtaa

SEQ ID NO: 133500 - DNA, 418 bp, Homo sapiens
atgcctgagcctcccacccactccatgggctcctgtgcggcccgagcctccccgacgagcgccaccccctgctccacagcgcccagtcccatcgaccacccaagggctgaggaatgcgagcgcacggtgcaggactggcgggcagctccacctgcagccccagtgcgggatccactagaaacagggaaaattgaccaagagattcacaaatacaacaccccaggattcactggttgcctctccagagtccagttcaaccagatcgcccctctcaaggccgccttgaggcagacaaacgcctcggctcacgtccacatccagggcgagctggtggagtccaactgcggggcctcgccgctgaccctctcccccatgtcgtccgccaccgacccctggcacctggatcacctggattcag

SEQ ID NO: 133501 - DNA, 819 bp, Homo sapiens; identical to SEQ ID NO: 116837

SEQ ID NO: 133502 - DNA, 1083 bp, Homo sapiens; identical to SEQ ID NO: 128836

SEQ ID NO: 133503 - DNA, 524 bp, Homo sapiens
tcatacctctaaagctgcgtgcacagatgaggtatctgcaaggtctgtgcagagcccttgtgtattggcattgagactgaagccttgaatagtatagtctatctttgctgaactaattgggatgaagaaatagattttggccgatgtaagcatttttagtttgaggagctgagtggaggcagctccaagaaatcttaggtgatttctcggtgtcttagctgccttcccgcggggcaggacttgggacctgcagcccgccatgcctgagcctcccaccccctccatgggctcctgtgccgcccgagcctccccgatgagcactgccccgtgctccacggcgcccagtcccatcgaccacccaagggctgaggagtgcaggcgcagggcgcgggactggcaggcagctccacctgcagccccagtgcgggatccactgggtgaagccaactgggctcctgagttctttgggtccacactgcctttacgagctgtaacactcaccgtgaaggtctgcagcttcactc

SEQ ID NO: 133504 - DNA, 855 bp, Homo sapiens
ctagacataaagactctccacgtccccaccagactcaggagcccagctggcttcacgtagtggatcccacaccggggctgcaggtggagctgcctgccagtcccgcaccatgcgctcgcactcctcagcccttgggtggtcgatgggactgggtgccccattgcagagacactgaattaatagttcaggtggcagctggttggttgataaagaatcttttccagtcccatcagctctcaacttttcccctttggggagaaaaagttctccatgttccaaagtcctgtatatgcctaatcctgtcagccatagcatgatccccagtggctctgagagatcaatggacacaaatggatcctgttggtacctcacttgttcacttagcgcccctggcaggagagacaccaggatcaggaaagtgttttcccaagggaggctccttgtgctgactctcatgatttccccaagtgtaggacactcaactgcataatctgtgtagtgggagatagtgtttatgccctccccaagggaggcatcagggacatcagtggaggtggggatgggtggggtggagcatggggagaagccaactgctgcccagcccagcaggaacagatgcccccatctccagagttcaactgagcccacgtgggcaatctggattctccgacccagcactgaggaggcagccccttcatttccccttgatgttgatggctgttgagtgatgagggtggtggttgctgaaggctcaggtggctgtggcagtttacactgcttggtgttctttgagttttctgaatcctggatctgtgctttggtgtctgccattaattttgtaatgttcttgaccat

SEQ ID NO: 133505 - DNA, 498 bp, Homo sapiens
gaatgattttcacctttcgtcctgtaaaggcagctcgatgaagcggcgtgtctcccatgtcattcaacacattcacttctgcaccagccttcaacagatcctggaccacttgtctgtgtccaaaatagcatgccagatgtagaggtgtccagcccaagttagacttacttcttcctttgcaattaatgtcagcaatcacttcattcctcgccatggtctctaatagttgtcttacttcttcagcattgccatttctggcgtgatggagaagctgttgctccgcttctgtgttcatttctacgcggtcacccgggctcccagagctcccgaggcggtggccacgaccccaggcttcccgtccgcccgccccacgtcgaggaagtggtcgtcaccaactctggctggcactccccgaggacgctcgagcccgcgtaacgtctgtctccgggacccggcgccgggaccacggcggagcgcgaggtggcgccgcccacgaaa

SEQ ID NO: 133506 - DNA, 1565 bp, Homo sapiens
aaatgaacacagaagcggagcaacagcttctccatcacgccagaaatggcaatgctgaagaagtaagacaactattagagaccatggcgaggaatgaagtgattgctgacattaattgcaaagcgcccagtcccatccaccacccaagggctgaggagtgcgggcgcatggtgcaggactggcaggcagctccacctgcagccccagtgcgggatccactgggtgaagccagctgggctcctgagtctggtggggagaatgaggaaattgaagcaatggcagccatttatggcgaggagtggtgtgtcattgatgactgtgccaaaatattttgtattagaattagcgacgatatagatgaccccaaatggacactttgcttgcagcagcaaccacctttatcccctgaagatcctgtccagccatctgtcacatggtcatgtaggccacaaacgccaacacaacatggggatgagaagaaagtacccacaaatggaaacactggttacatgggatggggccagctggtgctcagactgccacatggggttgagggacagccgtggcggctgcagctggtccctcggatggggtacattgaagtaggaggcttgttgtgcactgctgctggagagatgtcaactcacgctagaagtgctaaggaagtaggatctgctcttttcaaaccaggagtggccatccagagtgcccacaatgtcactggacgagacaaaaccattcatccattcagcagccgcacaaagcagcctacaccaagaaaacaacaatacatcccccaaacagatccaacagctgctcatcaatctggtgcaagctgcagaaactgtacatgtgtggaccatgagggagaagctttaatttcagtgcaaatcttcatcagccccagaaggggcacagtggagagagacctttctgaaaaaaacaagggcagggccatcttgttgaagagccacagagttcacactcaagagatgccatttccatgcagcaaggttggaaaaggctacctggtcagctctggcctcttccagcaccaagcaattcacaatgagaagccatgcaggagtgccatgtatggggacatgtttcatactcaacaaggacatttcaaatgcattgactatggagaagcattcagtcctaaagacactcctggccagcaccagataattcacactggagaaaagccttatgtgtgcactgaatgtgagaaaacctgcacaagaagttccaatctcattcagcacaagcccaagggtttgttgtctttgcttgtgctaagtccctccactggaaacgccctcttttccaccctctctcagcttacgcagcttctgctcacctttgatgtccgctcagatgctaccttcttcaggaaaggaagtggtcgtcaccaactctggctggcactccccgaggacgctcgagcccgcgtaacgtctgtctccgggacccggcgccgggaccacggcggagcgcgaggtgttgtctgtcttattcacggctgtgtccccgacaccagaagcagccccgatgtatggtag

SEQ ID NO: 133507 - DNA, 1519 bp, Homo sapiens
atgataagagaacagaaggtgaaggaagtatacatctgtgctgggaagaagaagagccatatgcacctgtggcacaatggggaaaaatacaacagacttggacgtaaagacagaaaaatgactcacgagggatggcttataaagatcccgcatttccctggaagaaaatacaaggcatctggattacactgggaacagatgaagcatatggggggtagagggaaggtgcatctggaattcacagagatgtatgtggcagggcggagaggggaggtgaaagatgaggtgttggaaccgatgtcgctgactgaagtctacattccaactgagaatgacagggaggtgtggagggagaggcgcctgcgggcacctgggctgtgcgcggcgcttgagggccagctggagttccgggtgggcgtgggcttggcgggctccgcactcgaagcagctggccagccctgctggccccgggcaggcagggctcgggacctgcagcccgccatgcctgagcctcccccagcctccgtgggctcctgtgcagcccgagcctccctgaggagcgccgccccctgctccacggcgcccagtcccatcggccacccaagggctgaggagtgcgagcgcacggcgcaggactggcaggcagctccacctgcagcccccgtgcgggatccacttggtgaagccagctgggctcctgagtctgtcatgtggccacccctggattcaaggcagtctgaggaggtgagtgtttcaaagaggcacatggatgccacagacaaaatcaagtttccatggttgaaggagaagaggacgatagagtttggggaggcagcaggctacgtctgccacagaagatataaagatatggagccacacgagaagatgggggaggctgccaaaaaagtccactgggtacagatgaggagcagggctcgggacctgcagcccgccatgcctgagcctcccacccactcaaagggctcctgtgcggcccgagcctccccgacgagcaccaccccctgctccacgacgcccagtcccatcgaccacccaaagggctgaggagtgcgggcacatggcgtgggactggcaggcagctccacctgcagccccagtgcgggatccactgggtgaagccagctgggctcctgagtctgctgtaacatacgccgtgaaggtctgcagcttcacccctgaagccagcgagatcgcaaacccaccggggggagcgaacaactccagacgcgcgcccttaagagctgtaacactcactgcgaagggctgcagcttcactcctgagccagcgagaccacgaacccaccagaaggaagaaactacgaacacatccgaacatcagaaggaacaaactctggacacgccgcctttaagaactgtagcactcaccacgagggtccgcggcttcattcttaaagtcagtgagaccaagaacccaccaattccggacacaatgccatcaccagtaagaagatacatcaacatgatgttccctcagtag

SEQ ID NO: 133508 - DNA, 567 bp, Homo sapiens
ccgaattcctgggctcccttccgaacagctccgcgcaccgccccgcgacgcagcccggcgcaactactttcttctctctcctttctttcttcctctcctttttcccctgctgggtagtggctgcggcggggtgggggagactttgaatgaccgagctcgcgtccacctttctcttcatgtcgacgtccctggaaacggccacacggatgccatggttacttttgccacgatcttacaggtgaacaaggtgatgtccatcttgttttatgtgatatttctcgcttatctccgtggcatccaaggtaacaacatggatcaaaggagtttgccagaagactcgctcaattccctcattattaagctgatccaggcagatattttgaaaaacaagctctccaagcagatggtggacgttaaggaaaattaccagagcaccctgcccaaagctgaggctccccgagagccggagcgcggagagcccgccaagtcagcattccagccggtgattgcaatggacaccgaactgctgcgacaacagagacgctacaactcaccgcgggtcctgtg

SEQ ID NO: 133509 - DNA, 813 bp, Homo sapiens
atgactggaaaatgccagatcatagttgtctcactacctggcctgctctcttcggctaccatccggttctcgcatcaggtcggcgtggctcattccaagcattatgttgctaaactacacgtctcccggcctcccacgccaccgctcaaagtccgagaacaggctggacgataccgcaaggagatcccctgggatggccgggcccgggtgcccgccgctccccggaggggtcccagatgtgcgggctgcgtacggagctccaacatctgcgcaaaggcccagggtggggtggccaccgggtgggcgctggccaagaggagcccggggcgcgaggtcttttctgaaaaaaccctttcggggaactccaacgcaggtacgcggcgcgtggcagtgcccgccgcctccccttaccgtggcaaaagtaaccatggcatccgtgtggccgtttccagggacgtcgacatgaagagaaaggtggacgcgagctcggtcattcaaagtctcccccaccccgccgcagccactacccagcaggggaaaaaggagaggaagaaagaaaggagagagaagaaagtagttgcgccgggctgcgtcgcggggcgcacgaacacgcccaaggacaatcgctccccggcgaactccccgctcccggggacccgcacccaggacgctgtgtcggcggtcaagggaggtcaaggatggggccctgcagctaatcactcgcccagcacccaccagtctgcacgcggggacagcgcgagaagcaggaaaggcgagcaacaaacaaacctgttcgtggcgccccgaaagtaa

SEQ ID NO: 133510 - DNA, 1854 bp, Homo sapiens
atggacgagggtgctttgctcaggaatggaaaagttaggtctactgatgttatttctcacgtggtacaagttctcaaagggagaggagaaagctctcaaagaaacacaaagccagaccatcagtgcacaccttcccataggaatacctaccagcaaagagttcaaatgagtgagaaaggaaaagctggctatagaagaaaagctgggagaaggaaaggtctggccactgcttcgtctacagtgggaaagttacaccacacacacatgtcaaagggaaaaggcagcatttctgaagagcccactgtgtatctggcgacgtcactgaatattccattggctgaattattaatccatccatctactgaaaagcatcttggttacttccaagttttggcaattacaagtaaagctgctacaaacacttgtgtgcaggtgggacaagatggctacagtgggctggacattggtattttccttctgccttgtggaataatagacctggctgaagtcgggtatctcctttcctccagcactgttcacaatagcaaagacttggaggtaacccaaatgcccatcaatgatagactggataaagaaaatgtggcaatatacaccatggaatactatgcagccatagaaaaggatgagttcatgtattttgcaggaacatggatgacgctggacactgtcattctcagcaaattatcacaagaacagaaaaccaaacaccgcatgttctcactcataagtgggagttgaacaatgagaacacatggacacagggaggggaacatcacaccggggcctgtcggggaagcgtacccggctacgcctacgcccaacggcatttagctttggcgatatttgctgccgcgcacgaccagtacgcgaaccatattgtcacacgaagagaccgctacctgcgggactgtgcgttgctttttggtggtgggcggtacacctttggggacatggtgcactacgccaacgcgagtttacttaagtgtgtgattagacgaaaccataaagacgggggcagacggcagacgccggcccgcttccagaaaggaggcccaggagccgatataatacacttgcctgaagtgaaccctaccgcaacccggcgtgcgaaagggttgtcggccacatacggccgtgtcaccaaggggcacatggacacccagcaacgccgagttttacacctcagggccctagacccagcagccaacggtcactcccctgaaaaggtaaatcaaggggtttcttcttggtttggatccattgctggtctagtcacccagcaggtctaccaggctctgggctggtacagcagaggggttgtctgcacagagtcctgtgatgtgaactgtctatgggtctctcagctgtggataccagtgcttgttctggtggaggtacttttcatttttaactcctaataacaaccctaatgaagtagctattattactcccccctcccccactcagcagataggggaactctgggccacaaaagtcaaacaacttaccgaacagctccaaaagaggttcccagaccccctgatttacctgctccagcctggggtggctgctcacctccaggtgatggcctcgggggagcctcttaagacttggagcagaggtggctccgaactgaaggacactgacaattggcagcttgcctctgtcctcttctctcccttccctcacaggaacggagctggacaactgagctcaccatacgaacgatcgaatcttattgcggaacatctgcgagccacgatccgtgctagtgggcagcaaccattcaaactacgagggcattcaaccatctcgctctttaacatcgtctag

SEQ ID NO: 133511 - DNA, 954 bp, Homo sapiens
tgctgcgtctactgcgaggctgggacacactggggcccgctgtcggtctcccgtcctccgacatcttgtctggaacttccgcctggcagtctccagtaggagtggagctctgtgcggcgtattttggtggaaaaacgggccttgcgtcggcctcacccccagtgtttgtgtttcagaatgaagactattctcagcaatcagactgtcgaccattcccagaaaaatgtcgacattactctgaaggggacgccccagtaatcgtgtaagggccccagaggaacctctgcggaagggacttcaatccacatcaaatgtggaacctcagcccttcttgggaaagaacaacaaagaggcttccgggttgaccaaatggtggggtaaccggaaagggaactgggctacccgttcgggactatttggtagtcatgtacaggaccatgatccaaggggtgttaccactggggcttccggttacaaagatgagggtcctgtgtatgcctcaccttccccccatccaaccgttgttatcccagggagaaatgggtcctctttgttgaaatcccgaaattttcttgggtgaaaaatacatcccgcagggtttccggatgaagaccagggtgttgctttgttcagtatctcaaagcccagaaaagatgaaattaatccttgaaaggaaatgacatttgagcttgttttcaaatttcagcgggctttgattcagcaaagccacaacagttaaaaacaaagggtatcaggaaattttttggatgggtatcaatgtctctggaaaaaggaactgttcaaccaggcttgattgaataagatctaagaagttacctggctacagaaaaaaagatgccacgatgacacttcacgacctacttgtgatatattaaaagatgcaaaaaaaaacacatattagatttggaaaaaaaaaaaaaaaaaaagtcgagc

SEQ ID NO: 133512 - DNA, 574 bp, Homo sapiens
  misc_feature (1)...(574): n = a,t,c or g
gatccncagttctccnggtgggtgataagccagttgtagtgaaagtctgtttgctccacattaacagatttaggatgaacagcaaccaggccatcggtttttgtgtaaacttttaccatttttcttttttttacccaaatttagtcgaattttagcaactttgggatataaaccagcacagatgacagctttaattatcttctcattatctgcagtgtgtttgaagacagaaaatattcccagcaatagtccttttcgtatctgaaaccacgtcgcctagcctcttcccagccctcaaacgcattcacaactgttaagtgatcacttctagtatcctttgccaattcctttcttcttgcatctgcaatcttttcttttcccagtggaatgacaaatgggatctttgaaactgagactagcagcaatagtgagtactgggtctaagcaagcagaacaagtgcttcaaaaagaatcattttttcaatatgtggntcaacngggtaatcgtgcccaagtggacttcaagangtgtcaattcttcttggttatccaaaggcgtcagcttcatcaggtg

SEQ ID NO: 133513 - DNA, 1479 bp, Homo sapiens
atggatgaacgacgagaagaacaaattgtacagttactgaattctgttcaagcgaagaatgataaagagtcagaagcacagatatcctggtttgctcctgaggatcatggatacggtactgaagtttctactaagaacacaccatgctcagagaacaaacttgacatccaggaaaagaagttgataaatcaagaaaaaaaaatgtttagaatcaggaacagatcatatattgaccgagattctgagtatctcttgcaagaaaatgaaccagatggaactttagaccaaaaattattggaagatttacaaaagaaaaaaaatgaccttcggtatattgaaatgcaggaattggtaaatttaattgataaccatcaggtaacagtaataagtggtgaaactggttgtggcaaaaccactcaagttactcagttcattttggataactacattgaaagaggaaaaggatctgcttgcagaatagtttgtactcagccaagaagaattagtgccatttcagttgcggaaagagtagctgcagaaagggcagaatcttgtggcagtggtaatagtactggatatcaaattcgtctccagaggtatttgtccagtgttagtcatatcgtacttgatgaaatccatgaaagaaatctgcagtcagatgttttaatgactgttgttaaagaccttctcaattttcgatctgacttgaaagtaatattgatgagtgcaacattgaatgcagaaaagttttcagaatattttggtaactgtccaatgatacatatacctggttttacctttccggttgtggaatatcttttggaagatgtaattgaaaaaataaggtatgttccagaacaaaaagaacacagatgccagtttaagaggggtttcatgcaagggcatgtaaatagacaagaaaaagaagaaaaagaagcaatatataaagaacgttggccagattatgtaagggaactgcgaagaaggtattctgcaagtactgtagatgttatagaaatgatggaggatgataaagttgatctgaatttgattgttgccctcatccgatacattgttttggaagaagaggtgtttaaaagaacccctcctggtgttcggaaaatagtaattgctaccaacattgcggagactagcattaccatagatgatgtcgtttatgtgatagatggaggaaaaataaaagagacgcattttgatactcagaacaatatcagtacaatgtccgctgagtgggttagtaaagctaatgccaaacagagaaaaggtcgagctggaaggggctgcctcaatgcatatccatctggaggaggctactcagctttaattaaagaaacagtggttgagagggtccgcctacaaccactgaaagtaataaatgtacatggtgtaaaattcaaatactgccaaaaagtatgcactgagaaacaagtccccctgtatgactggtttggggcgtag

SEQ ID NO: 133514 - DNA, 325 bp, Homo sapiens
cattaccatagatgatgtcgtttatgtgatagatggaggaaaaataaaagagacgcattttgatactcagaacaatatcagtacaatgtccgctgagtgggttagtaaagctaatgccaaacagagaaaaggtcgagctggaaggggctgcctcaatgcatatccatctggaggaggctactcagctttaattaaagaaacagtggttgagagggtccgcctacaaccactgaaagtaataaatgtacatggtgtaaaattcaaatactgccaaaaagtatgcactgagaaacaagtccccctgtatgactggtttggggcgtag

SEQ ID NO: 133515 - DNA, 2232 bp, Homo sapiens; identical to SEQ ID NO: 119027
  misc_feature (1)...(2232): n = a,t,c or g

SEQ ID NO: 133516 - DNA, 3689 bp, Homo sapiens
tcggactgatgaccgtagtacagagcggtggaattccagcggttgctggttctgacgggttgtagtctgccaggacaattagttatgactactatcagaactggggccgtgatgggggtccccgcagctccggtgggggctatggaggggggccagcagggggtcatggaggtaaccgaggctccggaagaggcggcggcggcggagggggtggtcgaggcggcaggggccggcatcccgggcacctgaaaggccgcgaaatcggcatgtggtacgcgaaaaaacaggggcagaagaacaaggaagctggagaggcaagagagagctgtagtacacatggatgaacgacgagaagaacaaattgtacaggtactggattctggtcaagccgaaaatggataaagagtcagaaccacagatttcctggtttgctcctgaggatcatggatatggtactgaagtttctactaagaacacaccatgctcagagaacaaacttgacatccaggaaaagaagttgataaatcaagaaaaaaaaatgtttagaatcaggaacagatcatatattgacccgagattctgagtatctcttgcaagaaaatgaaccagatggaactttagaccaaaaattattggaagatttacaaaagaaaaaaaatgaccttcggtatattgaaatgcaggaattggtaaatttaattgataaccatcaggtaacagtaataagtggtgaaactggttgtggcaaaaccactcgaagttactcagttcattttggataactacattgaaagaggaaaaggatctgcttgcagaatagtttgtactcagccaagaagaattagtgcccattccagttgcggaaagagtagctgcagaaagggccagaatcttgtggccagtggtaatagtactggatatccaaattcgtctcccagagtcggttgcccaaggaaacagggttctatcttatactgtaccaaccaggaatcatccttccagtggctcccagtcagacccgtatttgtccagtgttagtcatatcgtacttgatgaaatccatgaaagaaatctgcagtcagatgttttaaatgactgttggttaaagaccttctcaattttcgatctgacttgaaagtaatattgatgagtgcaacattgaatgcagaaaagttttcagaatattttggtaactgtccaatgatacatatacctggttttacctttccggttgtggaatatcttttggaagatgtaattgaaaaaataaggtatgttccagaacaaaaagaacacagatcccagtttaagaggggtttcatgcaagggcatgtaaatagacaagaaaaagaagaaaaagaagcaatatataaagaacgttggccagattatgtaagggaactgcgaagaaggtattctgcaagtactgtagatgttatagaaatgatggaggatgataaagttgatctgaatttgattgttgccctcatccgatacattgttttggaagaagaggatggtgcgatactggtctttctgccaggctgggacaatatcagcactttacatgatctcttgatgtcacaagtaatgtttaaatcagataaatttttaattatacctttacattcactgatgcctacagttaaccagacacaggtgtttaaaagaacccctcctggtgttcggaaaatagtaattgctaccaacattgcggagactagcattaccatagatgatgtcgtttatgtgatagatggaggaaaaataaaagagacgcattttgatactcagaacaatatcagtacaatgtccgctgagtgggttagtaaagctaatgccaaacagagaaaaggtcgagctgggaagagttcaacctgggtcattgctattcatctgtattaatgggtcttaggaggcaagtcttctaggatggactattcaactgccagaaatttttgaggaactccttttgggaaggaactttgtttacaaaataaagatttttaaggctaggtgaaattgcttattttctgagtagataaatggacccaccatcaaatgagccagtgttactctccataagacacttgatggagcttgaacgctttggataaacaagaagaattgacacctcttgggagtccacttggcacgattacccgttgagccacatattggaaaaatgattcttttttggagcactgttctgctgcttagacccagtactcactattgctgctagtctcaagtttcaaagatccatttgtcattccactgggaaaagaaaagattgcagatgcaagaagaaaggaattggcaaaggatactagaagtgatcacttaacagttgtgaatgcgtttgagggctgggaagaggctaggcgacgtggtttcagatacgaaaaggactatttgctgggaatattttctgtcttcaaacacactgcagatgctgcataacatgaaaggacagtttgctgagcatcttcttggagctggatttgtaagcagtagaaatcctaaagatccagaatctaatataaattcagataatgagaagataattaaagctgtcatctgtgctggtttatatcccaaagttgctaaaattcgactaaatttgggtaaaaaaagaaaaatggtaaaagtttacacaaaaaccgatggcctggttgctgttcatcctaaatctgttaatgtggagcaaacagactttcactacaactggcttatctatcacctaaagatgaggaacaagcagtatatacttgtatggactgcacagaggtttccccattactgtctcttgttttttgggagggtggacatttccatccagaagggataacgatcaggaaactattgctgtagatgagtggattgtatttcagtctccagcaagaattgccccatccttggttaaggaattaagaaagggactaggatattccttcctgccaagagaagattgaaagtcctcatcctgttaggactgggaattgacactaaatccagagactgtgccagtacttgtcagctatttataggactttgatccaaaacaccaggggaaagggcaacttcccaggggacttttcccgccacggtttccaggatggatattacagctgacagcttttcaggggtggtctgaaaagccagtttgacagccattcttcatcattgtttaaattttggctggatgcccaaacccctgggaccatgaacaattttcatgtgtaaggtagaagccttccagtaggtagtaaagacttaatggggcatgacttgatgttatatggtcggagatatatatatatatatatatatatataccataaaagcaatatggtcctctgatcatatactcctgctggtgggccatgccccactcctttggggagtatattcccctttatatatattgaagtattgtacccacttgagaaattcctttgttctgtggtacaaaattaatctttctgctcataatgattgatgataccaccagtaaaaataggatgtttaccccaaaacaagtgtcaattaagaatttgaacacaaccacattttttaaaatgaaacttcttatcgggaagtaaattaatttgttgtaataaagtccagtatttaataaaatgtacaatgttaaatctcaaaaaaaaaaaaaaaaaaaaattgcgggg

SEQ ID NO: 133517 - DNA, 2657 bp, Homo sapiens
  misc_feature (1)...(2657): n = a,t,c or g
tttcgtaagacgacgaggaggctgcgaaaagttaagggccggaccgcaggctgtgctcgcttccggaagtggcttctgcgacaacatggcttgcggactctcggcttaatctgtaaccatacgtctaggatgacgaggtgccggtggagcgccgagtcggactccggggacgaggaagaggaggggcccattgtgctgggcagacgacaaaaagctttggggaagaaccgcagtgctgatttcaaccctgatttcgttttcactgagaaggaggggacgtacgatggcagctgggccctggctgatgtcatgagcccactcatgaagaagagggcagccactacattacatgagaagattgagaaagctcgaaagagaaggaaaactgaggataaagaagccaagtctgggaagctggaaaaggagaaagaagcaaaggagggctctgaaccaaaggagcaggaagaccttcaagagaatgatgaggaaggctcagaagatgaagcctcggagactgactactcatcagctgatgagaacatcctcaccaaagcagatacactcaaagtaaaggatcggagagaagaagaagaagaaaggacaggaagcaggaggattttttgaagatgcatctcagtacgatgaaaacctcttcgttccaggacatgaacctttcccgccctcttctgaaggccattacagccatgggcttcaagcagcccaccccgatccagaaggcgtgcatacctgtgggtctattggggaaggacatctgtgccctgtgcagcccctggcacaggtaaaactccgccctttgccctgcctgttttggagcgtctgatttatataccctcgccaggctccagtcttctcgcgtgctggtgctagtgcccacccgagagctgggcatgcaggtgcactctgtcaccagacagctggcccagttctgcaacatcaccacctgcctggctgtgggcggcttggatgtgaagtctcaggaagcagctcttcgggcagcgcctgacatcctcatcgccaccccaggccggctcatcgatcacctccacaactgcccttccttccacctgagcagcatcgaggtgctcatcctggacgaggctgacaggatgctggatgagtactttgaggagcagatgaaggagatcatccgaatgtgttcccaccaccgccagaccatgctcttctcggccaccatgacagacgaggtgaaagatctggcttctgtctccttgaagaatcctgtccggatatttgtgaacagcaacacagatgtggctccctttctgcggcaggaagttatccggaaccggcctaatcgtgaaggagaccgggaagccatcgtggcagctttgttgacgaggaccttcactgaccatgtgatgctgttcacgcaaaccaagaagcaggcccaccgcatgcacatcctcctggggctcattgggcgtgcaggtgggtgagctccatggcaacttgtcacagacgcagcggctggaggccctccggcgttttaaggatgaacagattgacatcctcgtggccactgatgtggcagcccgtggacttgacattgagggggtcaaaacggtaatcaacttcacaatgcctaataccatcaaacattatgtccaccgggtggggcgaacagcacgtgctggcagggctgggcgctcagtctctctggtgggagaagatgagcggaagatgctgaaggagattgtaaaagctgccaaggcccctgtgaaggccaggatacttccccaagatgtcatcctcaaattccgggacaagattgagaaaatggagtaaagatgtgtatgcagttctgcagctagaggcggaggaaaaagagatgcagcagtcagaagcccagatcaatacagcaaagcggctcctggagaaggggaaggaggcagtggtccaagagcccgagaggagctggttccagaccaaagaagagaggaagaaggagaaaattgccaaagctctgcaggaatttgacttggccttaagaggaaagaagaaaaggaagaagtttatgaaggatgccaaaaaaaagggggagatgacagcagaggaaaggttctcagtttgaaatcctcaaggcgcagatgtttggttgancggctagcgaagaggaatcgcagagccaagcgggcccgagcaatgcccgaggaggagccagtgagaggtcctgccaagaagcaaaagcaggggaagaaatctgtatttgatgaagaactcacccaacacaagcaagaaggccctgaaacagtatcgagctggcccttcctttgaagaaaggaaacagttgggcttgccccaccagagacgaggaggaaactttaaatctaaatccagatacaagaggaggaagtagctgtcgtggcctgaagaaattcatgggggcagcccttaaatcccttcccctgtgggaagtcatcctggctggtctgtcttttctccatttgtttaaaaaaaaaaacaaaaacaaaaaacaacactttggtgtggtggtatggtacgtagctattttcctaagcatgtctgtcaatctcccttcttgctgattagctttcatatgactatattaaatggaagtatttttgggaaaagagaaaccaaaaaaaaaaaaaaaa

SEQ ID NO: 133518 - DNA, 582 bp, Homo sapiens
  misc_feature (1)...(582): n = a,t,c or g
aagtgaggagtgcctctgcccggcccgccccatctgggaagtgtacccaaagctccgaagagacagtgaccatcgagaacaggccatgatgacgatggcggttttgttgaaaagaaaagggggaaatgtggggaaaagaaagacagatcagatggttactgtgtctgtgtagaaagaaggagacataggagacaccattttgttctgtactaagaaaaattcttctgccttgggatgctgttaatctataaccttacccccaaccccgtgctctctgaaacatgtgctgtgtcaactcagggttaaatggattaagggtggtgcaagatgtgctttgttaaacagatgcttgaaggcagcatgctcattaagagtcatctccactccctaatctcacgtacccagggacacaaatactgcggaaggccgcaggaacctctgcctaggaaaaccagagacctttgttcacgtgtttatctgctgaccttctctccactattatcctatgaccctgccacatccccctctttgagaaacacccaagaatgatcaataaatcctnnnnnnnnnnnnnnnnnnnnn

SEQ ID NO: 133519 - DNA, 452 bp, Homo sapiens
tgttcgtccgggttttttacgttttaatttccaggacttgaactgccatgtcctctgaagaaggaaagctcttcgtgggagggctcaactttaacaccgacgagcaggcactggaagaccacttcagcagtttcggacctatctctgaggtggtcgttgtcaaggaccgggagactcagcggtccaggggttttggtttcatcaccttcaccaacccagagcatgcttcagttgccatgagagccatgaacggagaggtggggcctcctatctgcagagggaccttgtccccatctgcggcttccttcattctttttgtttttccctctgtgtctgctcggggcagcgtggctcaccaagccccgcagtgcccactcacaggagcatgactgccttttgttctatggggtggagggcagcggcagacagagcctggccgcctgggaggcgag

SEQ ID NO: 133520 - DNA, 1704 bp, Homo sapiens
tgagttcccttagtatttattgatcatctgtgggtgtttctcaaagagggggatgtgtcagggtcacaagacaattgtggggagagggtcagcagacaaacacgtgaacaaaggtcttggcatcatagacaatgtaaaggattaagtgctgtgcttttggatatgcatacacataaacatctcaatgctttacaaagcagtattgctgcccgcaggtcccacctccagccctaaggcggtttttccctatctcagtagatggagcatacaatcgggttttataccgagacattccattgcccagggacaggcaggagacagatgccttcctcttgtctcaactgcaagaggcattccttcctcttttactaatcctcctcagcacagaccctttacgggtgtcgggctgggggacggtcaggtctttcccttcccacgaggccatatttcagactttcacatggggagaaacgttggacaatacctggctttcctaggcagaggtccctgcggccttccgcagtttttgtgtccctgggtacttgagattagggagtggtgatgactcttaaggagcatgctgccttcaagcatctgtttaacaaagcacatcctgcaccgcccttaatccattcaactctgagtggacacagcacatgtttcagagagcacggggttgggggtaaggtcatagattaacagcatccccaaggcagaagaatttttcttaagtacagaacaaaatgggagtctcctatgtctacttctttctacacagacacagtaacaatctgatctctctttcttttccccacatttcccccttttctatttgacaaaaccgccatcgtcatcatggcccgttctcgatggtcgctgtctcttcacagctgttggatacacctgcagacaccattgatacaatcatcaaggctgcaagcagcatactctctggggtttgtttcacctttgtgttctctagatattttgtagctaactgcgtcagcttctttagttgtgcccaagttggcggctctgccttcttggtggatggcaacttcatctgttcttctgacgtcaccattttgttcatcttgtgagtcaacggtgctcgattgcgatgtctccgtctccgcggaggtgcttttctttgcatctctgatgggttcattgtagaacttcaaatgtcgtaaggctgactgtagatgtactcgggatctctcgtcgacttgtcctcaatgaccacgctcgagcgtaccttcaccctagagaaaagcctccacgttgggcaccagatgtaggggtgggttgcccctacacacctgtgggtgtttctcgtaaggtgggacgagagatttggaaaagaaaaagacacagagacaaagtatagagaaagaaagaaggggacccggggaaccagcgttcagcatatggaggatcccgccagcctctgagttcccttagtatttattgatcatctgtgggtgtttctcaaagagggggatgtgtcagggtcacaagacaattgtggggagagggtcagcagacaaacacgtgaacaaaggtcttggcatcatagacaatgtaaaggattaagtgctgtgcttttggatatgcatacacataaacatctcaatgctttacaaagcagtattgctgcccgcaggtcccacctccagccctaaggcggtttttccctatctc

SEQ ID NO: 133521 - DNA, 1963 bp, Homo sapiens
ccaaattattgtatctcacagtgtggggaaaaggaagagagatcagattgttactgtgtctgtgtagaaagaagtagacataggagactccattttgttatgtactaagaaaaattcttctgccttgagattctgttaatctataaccttaccccccaaccccgtgctctctgaaacatgtgctgtgtcctctcagaattgcctgttttttgtgctcctccgagctcgctgttcgtccgggttttttacgttttaatttccaggacttgaactgccatgtcctctgaagaaggaaagctcttcgtgggagggctcaactttaacaccgacgagcaggcactggaagaccacttcagcagtttcggacctatctctgaggtggtcgttgtcaaggaccgggagactcagcggtccaggggttttggtttcatcaccttcaccaacccagaagcatgcttcaagttgccaatgaagaagccaatgaaccggagaagtctcctggaatggtccgtcagatcccgttgttggatcatgcaggcaagtcttgctccggggaaccaagaggaaggtgggctttggggcccatgggcgttgggtcgcagctaattttagaggttgttggggaccagggctaatgggagtggcaggtattatgacagtcgacctggagggtatggatatggatatggacgttccagagactataatggcagaaaccagggttggttatgaccgctactcaggaggaaattacagagacaattatgacaactgaaatgagacatgcacataatatagatacacaaggaataatttctgatccaggatcgtccttccaaatggctgtatttataaaggtttttggagctgcactgaagcatcttattttatagtatatcaaccttttgtttttaaatatgacctgccaaggtagctgaagaccttttagacagttcccatctttttttttaaattttttctgcctatttaaagacaaattatgggacgtttgtagaacctgagtatttttctttttaccagttttttagtttgagctcttaggtttattgggagctagcaataattggttctgggcaagtttgggccagactggactttcaaaaaattaaatgtgttatccaggggaccattttaaaaaacctgttacacagtgtttaatggtgggttagggaagcaaatttcccccaatgtacctattaagaaaatgtgccatcaagcccagccctgacccaacatgggtgaaaaccccccatctgtacctaaaccataaaaaaaattacccccggcatgggtggtgtaccgccctgtaatcccccagtgaccttgggaggctgaggcaggagaatcgcttgaaccccgggaggcggatggttgcagtgagctagattcgcgccccctgtactcccagccctgggcaacagcgagagctcccatctcaaaaaaaaagggaaatgtgtatcaagaacatgattatccaggggtattttcctaattcagatcgatcaaactgattatatagaagagttggctttaaaatgtttgcaaatgtctttttttttttttaatactgggaagaaaaaatattctgttgtgtctcatacagtgcttaggggtgtctttcacagagcttattaaaaagatgaaacctgagaacaaactgctttattcttaactcagcccattttgcaaattaaaagtggggggcagaggtgggcggatcacctgaggtcaggagttcgagaccagcctggccaacagggcaaaaccccatctctactaaaaatgcaaaagttggcggggcgtggtggcgggtgcatgtagtcccagctgctcgggaggctgaggcaggagagttgcttgagcccgggaggcggaggttgcagtgagctgagattgtgccactgcactccagcctgggtgacagcaagactctgtctcaaaa

SEQ ID NO: 133522 - DNA, 414 bp, Homo sapiens
cggacgcgtgggcccaccgagacgcgccggcggaccgcgggcgagtgcagccggtgacccggcgagaggcggcgccgctcccaagatgtcgcagacggccatgtccgaaacctacgattttttgtttaagttcttggttattggaaatgcaggaactggcaaatcttgcttacttcatcagtttattgaaaaaaaatgtccgtgacgagaagttattaccgaggcgcggccggggctctcctcgtctatgatatcaccagccgagaaacctacaatgcgcttactaattggttaacagatgcccgaatgctagcgagccagaacattgtgatcatcctttgtggaaacaagaaggacctggatgcagatcgtgaagttaccttcttagaagcctccagatttgctcaagaaaat

SEQ ID NO: 133523 - DNA, 662 bp, Homo sapiens
atatgggatcagcaggaccagaccgattcaggtccgtgacgagaagttatcactgagggcggccgggggctctcctcgtctatgatatcacagcccgagaaacctacaatgcgcttactaattggttaacagatgcccgaatgctagcgagccagaacattgtgatcatcctttgtggaaacaagaaggacctggatgcagatcgtgaagttaccttcttagaagcctccagatttgctcaagaaaatgagctgatgtttttggaaacaagtgcgctcacaggggagaatgtagaagaggcttttgtacagtgtgcaagaaaaatacttaacaaaatcgaatcagaaagaatgggctcaggtattcagtacggagatgctgccttgagacagctgaggtcaccgcggcgcgcacaggccccgaacgctcaggagtgtggttgttaggagagcacacaggtgttcatacagtggcatttgggacccaatcgttggaacctgaagaatctgaagttttttttacccccatctttttttactctgtatggaagtagatctttatggggaaaagagaatttggggtgttttgcaagccagtcaaagtggcccagcaaatcatataaatcgaattaaatggacaaccccgttaaaaaaaaaaaaaaa

SEQ ID NO: 133524 - DNA, 669 bp, Homo sapiens
atgcgctgtgcacacgcccccgccccgcgcacccgctaccccacccgagcccccagcggcccgcgtcccccatcccggtcccaagcccagacacctccgagatccgtcccgcggctccggccgcgccaccgccaccctcaagacccccgcagcccaggcccggccccgcgccaccgacgccccccgcggcccgacccgcgcgccccgccagcccgggcctcgtaccgtaggtttcggacatggccgtctgcgacatcttgggagcggcgccgcctctcgccgggtcaccgtgcactcgcccgcggtccgccggcgcgtctcggtggggaaggacctggggcgggggaccggaggagggaggggcccgaccggtccccacggcaaccgccggtcctcccagcggctgcggcccagccggactccagctccgcgcaggcgccagggccctccaccctccgtccggccgcgaccgcgaggaggaagaggagatgggctacgcgaggcccggcccaccccgcgttcgcgcgtgcgcacggggaggccggggcggggcgcgtgaggacttcggcgcgcgccggaagcacgtgcgcgggctgggcgctctggcggtgtgcgctgaggtgggcagagcggcaggtgggggcgttgggggctgagtcccgatttccc

SEQ ID NO: 133525 - DNA, 486 bp, Homo sapiens
atggggtcaggcctgaaaagagggaaattaagtgaaaatgaaagcctctggcccccaacccacctcccctacctcttccctggtcgctggcagccagagagggtggggaccttgacaggcttttggggagtagcagagatggacactaggttggcggtgaagaagaggaagctgcagggcagggatgcaggtgggtgtagggccgtggtgactatggattcctgtggtgactatggattccaccgcgccgagaggtggcgagaactggaagagatggagaaaattgtgccagggagtggggtagatgaggagctcgcagagaaccgagaaacctacaatgcgcttactaattggttaacagatgcccgaatgctagcgagccagaacattgtgatcatcctttgtggaaacaagaaggacctggatgcagatcgtgaagttaccttcttagaagcctccagatttgctcaagaaaatggcaagtga

SEQ ID NO: 133526 - DNA, 609 bp, Homo sapiens
atggcagcagctgacccgctcaaaggaactgcacaggcagctggtccttcagagacaaacagcaccaaaaggaaacctgcaacatcaggaatgaagaaaagcaaccaaaatggcaactatctgggcatcaggcacaccaaagcagccctgtcccagggagctcttagcccaggagagaagacaaacaaggacaaggtacaatcaatgagatcaatagcaagaaaggaggtccagacagagaatcatgggagttgggtgtctgcatatgctgaggtcagagaaagcgccgcagcagagaagttttgcacactgcaccccaaagagcagcaggccttccgctcgactgacttagagggctggctgaggagcattccagaaaaagcacagtacaatgtgttttctagcagggagaccagcaaactggaagtggatgagcggccccagcttacatggtctattgtatttgatcaactgctgagagaagtattagtagcccagagaggagtggacactctgcttgctcacctcctacttcttcctaacggacggccagccatcttctaccttcataattctgctgaaattgttcttgatcaaaatgatcactga

SEQ ID NO: 133527 - DNA, 2512 bp, Homo sapiens
ggaattctcccaccgagacgcgccggcggaccgcgggcgagtgcagccggtgacccggcgagaggcggcgccccctcccaagatgtcgcagacggccaatgtccgaaacctacgattttttgtttaaagttcttgggtattggaaatgcaggaactggcaaatcttgcttacttcatcagtttattgaaaaaaaaattcaaagatgactcaaatcatacaatagcgagtggaatttggttccaaagataataaatgttggtggtaactatgtaaagttacaactatgggatacagcagggacagaccgattcagctccgtgacgagaagttactaccgaggcgcggccggggctctcctcgtctatgatatcaccagccgagaaccctacaatgcgcttactaattggttaacagatgcccgaatgctagcgagccagaacattgtgatcatcctttgtggaaacaagaaggacctggatgcagatcgtgaagttaaccttcttagaaagccctccagatttgctcaagaaaatgagctgatgtttttggaaacaagtgcgctcacagggggagaatgtagaagaggcttttgtaccagtgtgcaagaaaaatacttaacaaaatcgaatcaggtgagctggacccagaaagaaatgggctcaggtattcagtactggagatggctgccctgaggacagcgtgaggtttcaacccgccgcgcacaggccccgaaacgctcgggagtggtggttgttaggagaggcacacaggtgttcatacagtggcatttgggacacaattcgttgggaacctgaaggatcttgaagtttttttttaccaccatctttttctactctgtaaggaagtagatctttatggggaaaagagaatttggggtgttctgcaagccagtcaaagtggcacagcaaatcatataaatccgaattaaatggacaacaccgttagatgtgtatgtaaaaattttctgtttcatatttttcctttcacctttcggtttaaaacatgctatatgtactgtatgtcctgtagcccagtgcggctccacagcatggaatctgatgtatgatatgatagaatgtggccactaaatgcagtttcagattttatttttttttaatcatatgaacttaaaattgtcaattgtgaggtgtgcttttcttcatcatgttggttatattgcacaattggttatatttatgacctgatattcaaagactctggcattggatagccagtgtgttttcttatttaactccgtttactacattctacatggtgtttacgtgattccacacttgaaaatactaggatcagtagacattcactaatataccaaaataaaatgaaaaattgcgtttttccgtgaactttatactgtccaggctctgttgattctaaagcctcttcatccaggtcagttcaggaagtatatctggagtacctgctctgtttttggcttgtgagactagcactaaggattctggtacctttacccaaacctactgggctactaatacttctctcagcagttgatcaaatacaatagaccatgtaagctggggccgctcatccacttccagtttgctggtctccctgctagaaaacacattgtactgtggctttttctgggaattcagtataatgggcatcactggcctgtttttcacatctttttgttttcctgtttcattttaaggaaacctactaaatcccagttaatattaaatgggacacccactcattaagaaatttctttatggcttctgctgaatacttaaatgccttactacagttatccagtttgacatggtttttaattcatataaggtatattgggtatattgaagtatatattgtattacaaagacttgttcttgtattttaaaatgtcagtgcaaaaaatatatggtggaacctttctttaaagttgaaatgcagtattatttaaatctgaaaggttaaaaagctttcttcaccttatatatgttcttccactgtgacttttttagtttgaagactagtaaattaacttttagttagaagatgcctactgcttttgttgtttattttaatcagcagagcacagagacacataaaaactctgggaaatgactaggataaaaatatcagtatgtatctgttttagatattttggagttttgccttttttatgccctgaatattttatttccaaaaagtatcctgaagcaaattctcagactgaactactttttagacctcactgtaagaatattttattcaatgtcctcatttatgatagatttgcaagctgcctcatttttgaacagctttttgcatgggataggagcatgtctattctaacacatcagcttattcaaaagcaagaattttaaaaataagataaatgtaaagttgttttataaacgatcctgttaattaaaccacagacaccatatatccttctgcatcctttggccaataaaagttgctggagaaccaaaaaaaaaa

SEQ ID NO: 133528 - DNA, 907 bp, Homo sapiens
  misc_feature (1)...(907): n = a,t,c or g
atggataataaattagatgaacgggtcactcaagggtcctttggtgatgggcgagacagagaaaggggcaggaagcgtaagaaggttggaactttctaccagagacagggcaggctacaccgaggaggtgatattgaagcagagacccagaggagagcacacggccgcggagatgacgtcacgcaagcaacggcgctngacgtcacatatcaccgtggtgatgggcgtcacgtggccatgtagacgtcacgaagagatatagcgatggcgttcgtgcagattgcaggcacgttcgcacacagacatggggaacttggcatgacgtcacaccgagatgcagcaacgacgtcacgggccatgtcgacgtcacacatattaatgtcacacagacgcggcgatggcatcacacagacggtgatgatgtcacacacagacacagtgacaacacacaccatgacaaccgacacctatagatatggcaccaacatcacatgcacgcatgccctttcacacacactttcttacccaaattctcaccttagtgtcacgttcccccgaccctgggcacacgggggcaaggtacccaccaggatccccatccctcccgcacagccctggggccccagcaccttgccctcctccagcttcctggggcctcccaggccatttccttcacccccagtgcctggacccggaggtgagaacaggaagccattcacctcacctccttgagcgtgagtgtttcccaggacccccctcggggccctgagccgggggtgagggtcacctgttgtcgggaggggagccactccttctcccccaactcccagccctgcctgtggcccgttgaaatgttggtggcacttaataaaaaattagtaaatccttaaaaaaaaaaaaaaaaaaa

SEQ ID NO: 133529 - DNA, 760 bp, Homo sapiens
  misc_feature (1)...(760): n = a,t,c or g
tccggatcgacccacgcgtccgccaaggtgctcggtccttccgaaggaagctaaaggctgccgttggggttgagggcccctcactttcatccggcgaactaggcacccgcgtcccggcagcgccagccctacaactcgccccgcgcaatggccttctgtctccgtagctcgccctgcatcctactcggcccctcattcctgccaccgacgatgaggtgaacagtcacggaggataagatcaatgcccctcattaaaagcagcccgttgtaaatgttgagcctttttgcccctggcttgtttgcaaaggcccctggccaacgtcaacattgggagcctcatctgcaatgtaggggccggtggaccctgctgccagccagctggtggctgcacccagccaggagggtcctgccccctccactgctggttgcttccagcttgagggagaagaaagtgggaagcaaagaaagaaggattccgagggagttttgattgattgacatggggctttgggtctttttgactaaaacctcttttataaacatgtttcaataaaaaagctggaactttactgctgttggtcttgtccatagttttggaatgtgctctgcaaaaatggtctggtttgtaatgttggctttcagcctattctgccatgacacaggctggattttccctgccaccattgccggatgtgagatttagacaatcctgatgctaacaagaangcaccttatggtacagtgntgaaaactgcacctg

SEQ ID NO: 133530 - DNA, 415 bp, Homo sapiens; identical to SEQ ID NO: 125799

SEQ ID NO: 133531 - DNA, 1612 bp, Homo sapiens
  misc_feature (1)...(1612): n = a,t,c or g
atggcaagccgtctcctgctcaacaacggcgccaagatgcccatcctggggttgggtacctggaagggcagcatcctgcgagtggggtttgggagcagctcacgggagcccccgccctaccgcgggcaacccttgatgggcggcccaccagtccgcattttgggtcctagcgggcgccccaagcggcacaacgcgagagggaggcggggaaagtgggcttcacagaccggtggacctcgggcgcagacagggacgtggagccgtcggcaagggcaggtgactgaggcccgtgaaggtggccattgacgtcgggtaccgccacatcgactgtgcccatgtgtaccagaatgagaatgaggtgggggtggccattcaggagaagctcagggagcaggtggtgaagcgtgaggaagctcttcatcgtcagcaagctgtggtgcacgtaccatgaagaaaggggcctggttgaaaggaagcctgccaagaagacacttcaagcgacctgaagcttggacttacctggacctctaaccttaattcactggccgactggctttaagcctgggaaggaatttttcccattggatgagtcgggcaatgtgggtcccagtgacacccacatttctgacacgtgggcgggccatggagaagctggtggatgaagggctggtgaaagctattggcatctccaacttcaaccatctccaggtggagatgatcttaaacaaaccctggcttgaagtataaaccctgcagtaaaccagattggagtgccacccatatctcactcaggagaagttaatccagtactgccagtccaaaggcatcgtggtgaccgcctacagccccctcgggctctcctgaacagggccctggcccaagccccgaggacccttcttctcctggaggatcccaggattcaaggcggttcgcagcccaagcacaataaaaactacagccccaggtcctgatccggggttccccatgcaagaggaacttggtggtgatcccccaagtctgtgacaccagaacgcatttgctgagaactttaaaggtctttgaactttgaactgagccagccagggatatgacccaccttaactcagcctaccaaccagaaactggaggggtctggtgcccttgttggagctgtaccttcccaccaaggattaccccctccccatgaaagaagttttgaaagctngtggttgccctgctcgtcccccaagtgaccctataccctgtgtttccttgccctcattttttttccttgcaaaatggtagtatggcctgctgtcactcagcagtgggacagcaaccctgtagattgcccagcgaaggcgtgttctagcttgatggttggatctcaagggccctgtcagtagagttgaaggtctcttccaattttctttgcccttctttcttaccctgctgggagaaagtacaacccgaactacacctcctccgaaacaaagagaaagcaaaatctaccaggctcacaacagtgccacctaccgttggggtttgaacggctgggaactggaatcctttcagcaagacttctctttgcctcccaaccaaaagtgcttttgtgaaaaaaaaaaaaaaaaaa

SEQ ID NO: 133532 - DNA, 489 bp, Homo sapiens
  misc_feature (1)...(489): n = a,t,c or g
atcactgaaggccattttccacaggatttactggctcttttaatgggttcatccaccagggctgaatgccgatgtcggagactcgccactgacttccaaccctccggatccggcagggtgtccactgtgcttctgatccagtgaggcgcccattgccactcccgatcgggctagaggctcgtcattgttcctgcatggctaagtgcccaggttcatcctaaccaggctgaacactagtcgctaggttccacggttctcttccgtgacccacggcttctaaaagctgtaacactcaccgcatggcccaaggttccattccttggaatcaaaacttatgggatgccacaaaagcagttctaagagggaagtttaaatgccgcacagggagcggagccgaagcgccgggcgcgcgcgggagagagggcggcgactggcagcggaattccnccgcnctgtctagggtctacgatagggtttccttccccctcg

SEQ ID NO: 133533 - DNA, 471 bp, Homo sapiens
atggaggaggaagcgctcaagtttgtccttgaggagggcccttctcaaagttccagagtggaacgaagagccctggcggtaggacgagatgtggagacagatggaccaatacaggacagtcaggaaggatgtgactccctgagagctgactgtagtaattgttatttcttttctgcatctagccacccagcagggctacaggctctgggctggtactgggagttgtctgcagagtcctgtgatgtgatcatcttcaggtctctcggccacggataccagcaactgttccagtggagtggaaaaggagtgaaatggactctaaagaggaagaaaaggaaaagaaggagaagaaggagaaaagaagaagaagatgaagaagaagaggaaaagaagaagaagaagaaaggaggaggaggaggaaaaggaggagaaagaaaagaggaagaaaaaaatagattaaaaaaagagtag

SEQ ID NO: 133534 - DNA, 848 bp, Homo sapiens
atgggactgtataaggatttattagatactagatacctcttctaccttgtgccaggttatggcctgacacaaattgaactggaagtgatagcaaaggattcagccaagccagtaggcactccacgtgtggggctgaagctggagatgggaatttacctgagtgggcatcttgataagtttatttttgctatgccttttaaaataaaggatatcctttctttgaagaaagaggaagaaaaggaagaagaagaaggagaagaaggagaaaagaagaagaagatgaagaagaagaggaagaagaagaagaagaagaaaggaggaggaggaggaaaaggaggagaaagaagaagaggaagaaaaaaatagattaaaaaaagaatccggcagggtgtccgctgtgcttctgatccagcaaggcgcccattgctgctcccgatcgggctagaggcttgccattgttcctcatggctaagtgcccggaactgcgcaggaatatactaggaaagctgagagaatccacagaccctctgaaggagtggattgcttctgcaggacccaagaaacagcccaaatactgtgagtgccaaactgtgacagtgggaaaagaggattgtctgcccccaaacacaccctactggggaacctggaggtatagatcatggaaaatggatttgaccttaccggatctgattctggtatccgtggccgagagacctgaagatgattcacatcacaggactcgcagacaactcccagtaccagcccagagcctggtagccctgctgggtggtagatccagaaaagaaataacaattactacagttcagctctcagggagtacatcctag

SEQ ID NO: 133535 - DNA, 508 bp, Homo sapiens
tcgatacgacttttttttttttttttttttttttggggtcagagttttaatcctgggaaaaagaatctggccgctgggccatgccctgggactagcccgctgggtccctggtgtgtccgaatcagtgctccagtgcccgcctcttctccagcttcttctgtagctctgccgtcatgtctgccagcccggctgtggggaagagaggctgggctgaactgactggcagcttcctgcccaagccaccattaaagactttgggctctggaagagaagacagatgaggccaggtgtggtggctcacgccggtaatcccagcactttgggaggctgaggtgggtggatcacttgagggtcaggagttcgagaccagcctgggcaacatggtgaaaccccttctctactggcttgggtccaacgggtggctttggaagcttggcaggaggctttggcaacttctttggcttcaggatgactggccaactagaggaagccacatcttggttctcat

SEQ ID NO: 133536 - DNA, 1413 bp, Homo sapiens
cttcccggcccagctggggcacccactggaatgagtatgccaggcggttgaccctggctccgtcatggcctctgccctgaggccaccccgtgtccccaagcctaagggtgtcctgccttcacactactatgagagcgttctagagaagaaggggccctgtgaccgggattacaagaagttctgggcaggcctgcagggtctcaccatttatttctacaatagcaatcgggacttccagcacgtggagaagctcaacttgggagcatttgagaaactcacagatgagattccctggggaagctcacgtgaccctggcacccacttcagcctgattctccggaatcaggagatcaagttcaaggtagagaccttggagtgtcgggaaatgtggaaaggcttcatcttaacggtggtggagctccgtgtcccgaccgacttgaccctagcttcctgggcacctatacatgatgtctgaagtcttggccaaagaggaggcgcgccgtgcactggagacaccctcgtgcttcctgaaggtgagccggctggaggcacaactgctcctggaagcgctaccccgagtgcgggaacctgctgctgcggcccagcggggacggcgcccgacagcgtgtcggtcaccacgcggcagatgcacaacgggacgcacgtggttccggcattacaaggttgaagcgggaaggggccccaagtacgtgattcgatgtggaacagccgttctcttgcacctcccctggacgaccgtggtcaactatttcgtgtcgcataccaaaaaggcgctggtgccattcctgttagacgaggactacgagaaggtgctaggctacgtggaagccgataaggagaatggcgagaatgtgtgggtggcgccctccgctccgggcccaggtccttcacccttgcacaaggtgcccccaagccgctgtcaacctgcgtctagccaggacaagctgcccccactgcccccattacggaacccaggaagagaaattacgtgaccccccattggagatggcccagctgttgacttatgagaacccaagattgtggcttccttctagttggcccagtcatccctgaagcccaaagaagtttgccaaagcctcctgcccaagcttcccaaagcccacccgttggaccccaagccagagccccaaagtcttttatgggtggctttggccaggaagctgccagtcagttcagcccagcctctcttccccacagccgggctggcagacatgacggcagagctacagaagaagctggagaagaggcgggcactggagcactgattcggacacaccagggaccagcgggctagttcccagggcatggcccagcggccagatttctttttcccaggattaaaactctgaccccaggaaaaaaaaaaaaaaa

SEQ ID NO: 133537 - DNA, 1600 bp, Homo sapiens
  misc_feature (1)...(1600): n = a,t,c or g
ccaatcgagatcatagtccgtgtggtggaattcgccgggctgagaggagcgtggctgctntcctcatctccgccatggcgtgctgctcgcccactgactatcggtgtacttccgaaaagggggagtcatctggcaaaaatgtcactttgccctgctgtattcaaggctcctattcgaccagatattgtggaactttggttcacacccaaacctgcgcaaaaacaacagacagcccgtatgctggcaagggaattaagcaggtcatcagactaagtgctgaagtcttgggggtactggnccagagctgttggctcgaaattcccaagaagttcgaggtggtgggactcaccgctcttggccaagggtgctttttggaaacaatgtgtcggtggaggccgaaatgttttgcacccaaccaaaaccctgggccgccgttggcatccgtaggagtggnacacaacccaaaaaacggatacgcccatctggttctgcccctggctgccctcagcccttaccagcactgggtcatggtctaaagggtcatctgtattgagggaagtttcctgaaacttccttttggtaagttgaaagataaaagttgaaaggctaacaagaagaaccaagggaagctgtttttgctcccttaaggaaacttaaaaggcctgggaatgatattcaaaaagggtctatggcctcttcagcgaaatgaagagctgggcaaaaggcaaaattgagaaaacccgtcgcccgtatcccagcggcaggggccccgtgcatcatcctataatgaggataatgggtattcattcaaggcctttcaggaaacatccctggggattactcatgcttaattgttaaggcaagctggaacatttttgaaagcttgctcccttggtggggcatgtgggaccgtttcctgcatttgggacttgaaagtgctttgcgggaagtttaggatgatttgtaccggcactttggcgttaaagccactttccccttcaaggagttaacttaccaatcttttccccatggcacaaggatgattaaatacagattcttaggcagaatccttgaaaagcccagagattccaagagagccccttcgagcaccacggcaagaagatccattcgcagagttcctaaagaaggaacccactggaaaaactttgagaaatcatgttgaaggcttaaaccccttttgcaaaggcccatgcggccggaacaccattttttggccaggccaggaattcacaagctccgggtggataaggcagctgctgcagcagcggcaacttacaagccaattcagatgagaaggcggcggttgcaggcaagaagcctgtggtaggtaagaaaggaaagaaggctgctgttggtgttaagaagcagaagaagcctctggtgggaaaaaaggcagcagctaccaagaaaccagcccctgaaaagaagcctgcagagaagaaacctaactacagaggagaagaagcctgctgcataaactcttaaatttgattattccataaaggtcaaatcattttggacagcttcttttgaataaagacctgattatacaggcagtgagacaaaaaaaaaaaaaaaa

SEQ ID NO: 133538 - DNA, 730 bp, Homo sapiens
  misc_feature (1)...(730): n = a,t,c or g
ccaagcggctgccgaagatggcggaggtgcaggtcctggtgctttgatggtcgaggcccatctcctgggcccgcctggcgggccatcgtggctaaaccaggtactgctgggccggaaaggtggtggtcgtaccgctgtgaaggcatcaacagtttctgcaaatttcttacagaaacgaggttaaagtaccttggcttttcccctccaagcggaatgaacaccaacccttcccgaaggccccttaccacttcgggggcccccagccgcatcttcgtggcggacccgtgcgaggtatgctgcccccacaaaacccaagcggaggccaaggccgcntcttggaccgtcttcaaggtgtttgacgggcatccccaccgccctacggacaagaaaaaagcgggatggtggttcctggctgccctcaaggtcgtgcgttttgaagcctacaagaaagttttgcctaatctgggggcgcctgggctcccgaggttgggctggaagtaccaggcagtgacagccccccctggaggagaaagaggaaagagaaaagccaagatccactaccggaagaagaaacagctcatgaggctaccggaaacaggcccgagaagaaacgtggagaaagaaaattgacaaatacacagaggttctcaagacccacggacttcctggtctgagcccaataaagactgttaattcctcaaaaaaaaaaaaaaaaaaaagggcggccgct

SEQ ID NO: 133539 - DNA, 886 bp, Homo sapiens
cccacgcgtccgcggacgcgtgggcggcgaacgcggaagagcacgccaatgaagggcctcggggcacgctaccgagagtacaaggtatgtgggtcgctgcctgcccaccccccaaaatgcaacacgcggcccccttttaccggcatgcgaaatctttgcgccctaatcaatgtcgtcgccaaagtccccgctttctggtaactttgtatcctcagttaaaagaagatgaagaaattcttccaggggaagattgtctacttgtggggcaaggtgttttgagaaggttcccccctgcgggttgaaagaactttcggggatctgggcttgcggctattgactccccgggagcgggcaccccacaacattgttaccggggaatacccggggaccttgacccaccgcaggcggctgttcaacccagttgcttacccgagacaatggggttgcccggcaccggcgccccgaagcccacttccatttcagattcatggaagggtgggagggagatcgtgggccagcaagattccgccgggcgggctggtcaaagcaagttccaacgactccaagatcaaagtttcccgctggccccaccgggttccttgcggccttcaggaacaaggcacgcttcaccacccaagaggcccaacaccttcttctagggtgcagggcccctcgttccgggttgtgcccccaaaataaaactcaggaaacgccccggtgaatgattttaagatgaagaaaaaaatagatgagataacatttttcaccatgtggaaaaatggaatagtggaaagagatcagagtccacagcctggaaactgctgccggggctcttctgaggctcgtatttttaggctctttcccaccgtacataggatcctttttt

SEQ ID NO: 133540 - DNA, 471 bp, Homo sapiens
  misc_feature (1)...(471): n = a,t,c or g
gaggccgcgttctgntcccacgtttaccgacgtacnncaannannnntntgaagctgggcgcctgcccgggaacatcctcctggactcaatcatggcttgtggtctggtcgccagcaacctgaatctcaaacctggagagtgccttcgagtgcgaggcgaggtggctcctgacgctaagagtgagttcttccagcaaggtgcgttcatgggatactgagtgacagattagtcggtcagtggggctggagctggccgaggtggcctcatgcccacccgttaccccccagcttcgtgctgaacctgggcaaagacagcaacaacctgtgcctgcacttcaaccctcgcttcaacgcccacggcgacgccaacaccatcgtgtgcaacagcaaggacggcggggcctgggggaccgagcagcgggaggctgtctttcccttccagcctggaagtgttgcagaggtgtgcatcan

SEQ ID NO: 133541 - DNA, 822 bp, Homo sapiens
  misc_feature (1)...(822): n = a,t,c or g
ggctgaggaattcggacgaggacagctggtgccgcctgccacgggaaccatcctccntgaaactcaatcatggccttgtggtctggtcgcccagcaaccctgaatttcaacaccttggagagctgccttcgatttccgaagccgagttggcttcctgacgcttaagagctttcgttgctgaaacctgggacaaagaccgccaacaacctggtgcctgcactttcaaccctctgcttcaacagcccacgagatctgccagacacgcatcgctgtgcaacagccaaggcacggcggggcacgaggggggaccgacgcagcgggaggctgtctttcccttccaagcctgggaagtgttgcagaggtgttgcattcacctttcgaaccagggccaacctgaaccgttcaagcttgccagatgggattacggaatttcaagtttccccaaacggcttcaaccttggaagccatcaactacatggcagcttgacggtggactttcaagatcaaaatgtgtggcctttgactgaaatcagcgcagcccatggccccctaatagaagagcagctggcctctgctccctctgaagaaaaacagaagaaacaaagtagatatatatacttgcatctaataattaataatgaataatatggggggggccccttctataagaagcaaatttttattcccgtgcggttgccgtattttttattttttttgggcctcacaaaatttttaggctcggcgccttgttttaaacctcggtgagtaggagaaaacccgcggggacccacaatataaatgtcccggcgacgacaaataccg

SEQ ID NO: 133542 - DNA, 440 bp, Homo sapiens
  misc_feature (1)...(440): n = a,t,c or g
caagcagcagtgccgagacacgggtgacgaggtggtctgctcctgcttcgtgggctaccagctgctgtctgatggtgtctcctgtgaagatgtcaatgaatgcatcacgggcagccacagccgcgnctttggagaatcctgcatcaacacagtgggctctttccgctgccagggatcagcagctgcgngactggctatgagctcacagaggacaatagctgcaaagaatactctgggatccttccgctgccgacccaagctacagtgcaagagtggctttatacaagatgctctaggcaactgtattgatatcaatgagtgtttgagtatcagtgccccgttgccctatcgggatnacatggcatcaacacagagggctcctacaagtgccagaagaacgtgncccaactgtgggccgttggttaaccatcttaaagagg

SEQ ID NO: 133543 - DNA, 2156 bp, Homo sapiens
cccgccgcccatggagcgcgccgcgccgtcgcgccgggtcccgcttccgctgctgctgctcggcggccttgcgctgctggcggccggagtggacgcggatgtcctcctggaggcctgctgtgcggacggacaccggatggccactcatcagaaggactgctcgctgccatatgctacggaatccaaagaatgcaggatggtgcaggagcagtgctgccacagccagctggaggagctgcactgtgccacgggcatcagcctggccaacgagcaggaccgctgtgccacgccccacggtgacaacgccagcctggaggccacatttgtgaagaggtgctgccattgctgtctgctggggagggcggcccaggcccagggccagagctgcgagtacagcctcatggttggctaccagtgtggacaggtcttccgggcatgctgtgtcaagagccaggagaccggagatttggatgtcgggggcctccaagaaacggataagatcattgaggttgaggaggaacaagaggacccatatctgaatgaccgctgccgaggaggcgggccctgcaagcagcagtgccgagacacgggtgacgaggtggtctgctcctgcttcgtgggctaccagctgctgtctgatggtgtctcctgtgaagatgtcaatgaatgcatcacgggcagccacagctgccggcttggagaatcctgcatcaacacagtgggctctttccgctgccagcgggacagcagctgcgggactggctatgagctcacagaggacaatagctgcaaagatattgacgagtgtgagagtggtattcataactgcctccccgattttatctgtcagaatactctgggatccttccgctgccgacccaagctacagtgcaagagtggctttatacaagatgctctaggcaactgtattgatatcaatgagtgtttgagtatcagtgccccgtgccctattgggcatacatgcatcaacacagagggctcctacacgtgccagaagaacgtgcccaactgtggccgtggctaccatctcaacgaggagggaacgcgctgtgttgatgtggacgagtgcgcgccacctgctgagccctgtgggaagggacatcgctgcgtgaactctcccggcagtttccgctgcgaatgcaagacgggttactattttgacggcatcagcaggatgtgtgtcgatgtcaacgagtgccagcgctaccccgggcgcctgtgtggccacaagtgcgagaacacgctgggctcctacctctgcagctgttccgtgggcttccggctctctgtggatggcaggtcatgtgaagacatcaatgagtgcagcagcagcccctgtagccaggagtgtgccaacgtctacggctcctaccagtgttactgccggcgaggctaccagctcagcgatgtggatggagtcacctgtgaagacatcgacgagtgcgccctgcccaccgggggccacatctgctcctaccgctgcatcaacatccctggaagcttccagtgcagctgcccctcgtctggctacaggctggcccccaatggccgcaactgccaagacattgatgagtgtgtgactggcatccacaactgctccatcaacgagacctgcttcaacatccagggcgcgttccgctgcctggccttcgagtgccctgagaactaccgccgctccgcagccacccgctgtgagcgcttgccttgccatgagaatcgggagtgctccaagctgcctctgagaataacctactaccacctctctttccccaccaacatccaagcgcccgcggtggttttccgcatgggcccctccagtgctgtccccggggacagcatgcagctggccatcaccggcggcaatgaggagggctttttcaccacccggaaggtgagcccccacagtggggtggtggccctcaccaagcctgtccccgagcccagggacttgctcctgaccgtcaagatggatctctctcgccacggcaccgtcagctcctttgtggccaagcttttcatctttgtgtctgcagagctctgagcactcgcttcgcgtcgcggggtctccctcctgttgctttcctaaccctgccctccgggggttaataaagtcttagcaagcgtgggacacagtg

SEQ ID NO: 133544 - DNA, 2359 bp, Homo sapiens
cccgccgcccatggagcgcgccgcgccgtcgcgccgggtcccgcttccgctgctgctgctcggcggccttgcgctgctggcggccggagtggacgcggatgtcctcctggaggcctgctgtgcggacggacaccggatggccactcatcagaaggactgctcgctgccatatgctacggaatccaaagaatgcaggatggtgcaggagcagtgctgccacagccagctggaggagctgcactgtgccacgggcatcagcctggccaacgagcaggaccgctgtgccacgccccacggtgacaacgccagcctggaggccacatttgtgaagaggtgctgccattgctgtctgctggggagggcggcccaggcccagggccagagctgcgagtacagcctcatggttggctaccagtgtggacaggtcttccgggcatgctgtgtcaagagccaggagaccggagatttggatgtcgggggcctccaagaaacggataagatcattgaggttgaggaggaacaagaggacccatatctgaatgaccgctgccgaggaggcgggccctgcaagcagcagtgccgagacacgggtgacgaggtggtctgctcctgcttcgtgggctaccagctgctgtctgatggtgtctcctgtgaagatgtcaatgaatgcatcacgggcagccacagctgccggcttggagaatcctgcatcaacacagtgggctctttccgctgccagcgggacagcagctgcgggactggctatgagctcacagaggacaatagctgcaaagatattgacgagtgtgagagtggtattcataactgcctccccgattttatctgtcagaatactctgggatccttccgctgccgacccaagctacagtgcaagagtggctttatacaagatgctctaggcaactgtattgatatcaatgagtgtttgagtatcagtgccccgtgccctattgggcatacatgcatcaacacagagggctcctacacgtgccagaagaacgtgcccaactgtggccgtggctaccatctcaacgaggagggaacgcgctgtgttgatgtggacgagtgcgcgccacctgctgagccctgtgggaagggacatcgctgcgtgaactctcccggcagtttccgctgcgaatgcaagacgggttactattttgacggcatcagcaggatgtgtgtcgatgtcaacgagtgccagcgctaccccgggcgcctgtgtggccacaagtgcgagaacacgctgggctcctacctctgcagctgttccgtgggcttccggctctctgtggatggcaggtcatgtgaagacatcaatgagtgcagcagcagcccctgtagccaggagtgtgccaacgtctacggctcctaccagtgttactgccggcgaggctaccagctcagcgatgtggatggagtcacctgtgaagacatcgacgagtgcgccctgcccaccgggggccacatctgctcctaccgctgcatcaacatccctggaagcttccagtgcagctgcccctcgtctggctacaggctggcccccaatggccgcaactgccaagacattgatgagtgtgtgactggcatccacaactgctccatcaacgagacctgcttcaacatccagggcgcgttccgctgcctggccttcgagtgccctgagaactaccgccgctccgcagccacgctccagcaggagaagacagacacggtccgctgcatcaagtcctgccgccccaacgatgtcacatgcgtgttcgaccccgtgcacaccatctcccacaccgtcatctcgctgcctaccttccgcgagttcacccgccctgaagagatcatcttcctccgggccatcacgccaccgcatcctgccagccaggctaacatcatcttcgacatcacggaagggaacctgcgggactcttttgacatcatcaagcgttacatggacggcatgaccgtgggtgtcgtgcgccaggtgcggcccatcgtgggcccatttcatgccgtcctgaagctggagatgaactatgtggtcgggggcgtggtttcccaccgaaatgttgtcaacgtccgcatcttcgtctctgagtactggttctgagggctggtctgccgcacagccgcaggtgcacctccaggccaaatcattgctgccagtgactgtggtctgtacttgtttataccctcagacttttttaatgttaggtatttgtagcataaggccaacatgtatcaagctgagccagatgaataagtccatctgatgtattttcggtgtttaaaaaatgagcccagttgctcaactgtttggttgaaaaccttgctcattttttaatgc

SEQ ID NO: 133545 - DNA, 553 bp, Homo sapiens
ggcagccacagctgcggcttggagaatcctgcatcaacacagtgggctctttccgctgccagcgggacagcagctgcgggactggctatgagctcacagaggacaatagctgcaaagatattgacgagtgtgagagtggtattcataactgcctccccgattttatctgtcagaatactctgggatccttccgctgccgacccaagctacagtgcaagagtggctttatacaagatgctctaggcaactgtattggtaagaggtgtgccgccaggattagcgggttattccaggaggggtcagcgacctagccttggggcaggcctcttagaatctgcggggccgcatggtatacagaacaggggttggcaaactttttgtgtaaagggctggacagcaaatagagcaaatactttagccgttgtgggccatatggtctctgtcataatagtcaactctgctgttatagtctaaagcggccaagggccatctgtaaacaaatgggtgtggctgtgttccaataaaactttatttgcaaaaaaaaaaaaaaaaa

SEQ ID NO: 133546 - DNA, 2500 bp, Homo sapiens
  misc_feature (1)...(2500): n = a,t,c or g
cccgccgcccatggagcgcgccgcgccgtcgcgccgggtcccgcttccgctgctgctgctcggcggccttgcgctgctggcggccggagtggacgcggatgtcctcctggaggcctgctgtgcggacggacaccggatggccactcatcagaaggactgctcgctgccatatgctacggaatccaaagaatgcaggatggtgcaggagcagtgctgccacagccagctggaggagctgcactgtgccacgggcatcagcctggccaacgagcaggaccgctgtgccacgccccacggtgacaacgccagcctgggaggccacatttgtgaagaggtgctgccattgctgtctgctggggagggcggcccaggcccagggccagagctgcgagtacagcctcatggttggctaccagtgtggacaggtcttccaggcatgctgtgtcaagagccagggagaccggagatttggatgtcgggggcctccaagaaacggataagatcattgaggttgaggaggaacagagaggacccatatctgaatgaccgctgccgaggaggcgggccctgcaagcagccngtgccgagacacgggtgacgaggtggtctgctcctgcttcgtgggctaccagctgctgtctgatggtgtctcctgtgaagatgtcaatgaatgcatcacgggcagccacagctgccggcttgggagaatcctggcatcaacacagtggggctctttcccgctgccagcggaacagcagctgcgggactggctatgagctcacagaggacaatagctgcaaagatatttgacgagtgtgagagtggtattcataactgcctccccgattttatctgtcagaatactctgggatccttccgctgccgacccaagctacagtgcaagagtggctttattacaaggatgctctagggcaacttgttattggatattcaatggagtgttttgagtatccagttgccccgttgccctattggggattaacatggcattcaacacagagggcttctacaacgtgccagaaggaacgtgccccaactgtgggcccttgggttaccatcttcaacgggggaggggaacgcgctgtgtttgatgtgggacgagtgcgcgccaccttgcttgagccctgtgggaaaggggacatcgctggcgtggaactcttcccgggcagttttccgctggcggaatgcaaggacggggttactatttttgacggcatcagcagggatgtgttgttcgatgttcaacggagttgccagcgcttaccccggggcgcctgttgttggccacaagttacggagaacacgctgggctcctacctcttgcagctgttccgtgggctttccggctctctgtggatggcaggtcatgtgaagacatcaatgagtgcagcagcagcccctgtaagccagggagtgttgccaacgttttacggctcctaaccagtgttactggccgggcgaggttaaccagcttcagcgattgtgggatgggagttcacctgtgaaaggacattcgacggagttgcggccctgccccaccgggggcacacattttggttccttaccgctggcattcaaacatcctggggaagctttccagttgcagcttgcccctcgtctgggctaacagggtgggcccccaatgggcccgcaacttgccaaggacatttgatgagttgtgttgactgggcatccacaactgcttccattcaacggaggacctggtttcaaacattccaggggcgggcttccgttgcctgggcctttcgagttgccctgagaactaccgccgctccgcagccacatgatcgtaggggaactcttgcatgagggccatcggtgcaggctgggagaaggagaagggcaagttggcagggagttggaagaccacagggcatttgagccacttcctcatgtaacttaacttgtgccttcaggacctgctcaagcccgatcacgtatataccacttccatttgatgatgggaatgctgctgttcatgaccaactttatgggctagatggggtcagaaagcacccagtttcatggatagggcagtttcaggttcattatgggtgacttgatggacccaggagttcaaacatttcagttttccaccaaagccccattaaccagggccaagagctgtcttctcaaaagaagagtagttatctgcagaagatggcagggccttgctccgaaagcctagagaccgcccactgtgattcacctatgggggcctcgcaaacgcgtgcagccagcatccttatctgccactggacacctcaagcaacattggatctgctgggtcatatggcccaagtggcagagcaacttgcacaacagcctggacctgtcatagagctttctcctgttctggaccccactcaaaactggcagcctttcaggtcactcaataaatgtgctggagtaacacactcaaacgaggaatgtgttgcctccaaaatccaataggccc

SEQ ID NO: 133547 - DNA, 539 bp, Homo sapiens; identical to SEQ ID NO: 124603
  misc_feature (1)...(539): n = a,t,c or g

SEQ ID NO: 133548 - DNA, 763 bp, Homo sapiens
tttttttttttggaggagataaaccaattttatgtctatcatgttatacaaaaatctagaaattatatgttttgtgttctcatttattatcatttttttctgtacaaatctattatttctagatttttgtataacatgatagacataaaattggtttatctcctccaaggcagtttgtctttttctattcctcccccttcaacctgtgtcacaaaagaccaagaacagatgtcggaaaagtttttttttcttcagtattgtttaaaagtttcaatacaaaataagttataaataaaaggcttgtatgtacaaggctcctcagaaggaaatggagttgtcttcaaccccatagaatgatgtgagtccaagctggctctagaggatcacagcccaagtatcacaggcatgagatgggatggacaggccacactgacacaccaccacaccgcttgtgattctcaggttgtactttgtacatacaggacagatgaagtgggtttgcctcccactcagccagcatgatgctgagacacttttcatcaaactgcaagctcttctcatactcgctgatgatggactgctcttggttgatcagctcctgttgaatttcctccagcacagccatgtctatcagctcctccagctgagccaagtcttctggacaattctccactgactgcaaagcattccactcttcttccatcacctcttgaactagaaagctgttctgagaattccctggcccactgcttccagcctggcg

SEQ ID NO: 133549 - DNA, 693 bp, Homo sapiens
atgggactggaatcatacaactgatttgcttcccatctcctccacttactagctgtatgacctgcacgagaccacaccccactttctgttctaatactactatcttacagggcagtcacatggagaaaacagcatcattaaatgagaagttcttagcacaaagtctagcaccctggagacccttattattgagaagctagacagccaagatgtcagagtacaaaaggagtcttttggacacttgactgatggaggtagacaaaggggacttataaactaatcctgattggaggaaaggtcacagtattcccagtagctaaatacaggtaaggaaggaactaactaactaggggttaccttggttggatcaagctcctgttgaaatttcctcccagcacagccatgtctatcagctcctcccagctgaagccaagtcttctggacaattctccactgaactgcaaagcattccactcttcttcccatcacctcttgaaactagaaagctgttctgagaattcccctggcccactgcttccagcctggcggtacctgtttaggagcctgtcccggctgtttctcattctctccaggcatctctgccggaaagcctctttccaaggcggcgagcccaccagtttgtacagggagcggcgcggagacctcaacgactccgccatctcctcttcgcgg

SEQ ID NO: 133550 - DNA, 763 bp, Homo sapiens
ttttttttgttttgtgttctcatttattatcatttttttctgtacaaatctattatttctagatttttgtataacatgatagacataaaattggtttatcgtcctccaaggcagtttgtctttttctattcctcccccttcaacctgcgtcacaaaagaccaagaacagatgtcggaaaagtttttttttcttcagtattgtttaaaaggtttcaattacaaaattaagttataattaaaagctttgtaatgtacaaggctccttcaagaggggaaatgagttgtcttcaaccccattaggaatgatgtggagtccaagcttggctcttagagggatcacagcccaagtatcacagggccttgggttgatcagcttccttgttgaatttcctccagcacagccatgtctatcagctcctccaactgagccaagtcttctggacaattctccactgactgcaaagcattccactcttcttccatcacctcttgaactagaaagctgttctgagaattccctggcccacttgcttccagcctggcggtacctgtttaaggagcctgtcccggctggtttctcaatctctccaaggcatctctgccggaacagcctctttccaagggcgggcgagcccaccagtttgtacagggagcggcgcggagacctcaacgactccgccatctcctcttcgcgggagacaaagccacaagacccgttcccgaattccaccacatggtctaagggtcatctaagggtttcggg

SEQ ID NO: 133551 - DNA, 2182 bp, Homo sapiens
ccggcggcgcctcaggtcgcggggcgcctaggcctgggttgtcctttgcatctgcacgtgttcgcagtcgtttccgcgatgctgcctctgctgcgctgcgtgccccgtgtgctgggctcctccgtcgccggcctccgcgctgccgcgcccgcctcgcctttccggcagctcctgcagccggcaccccggctgtgcacccggcccttcgggctgctcagcgtgcgcgcaggttccgagcggcggccgggcctcctgcggcctcgcggaccctgcgcctgtgggagtggctgcggctcgctgcacaccgacggagacaaagcttttgttgatttcctgagtgatgaaattaaggaggaaagaaaaattcagaagcataaaaccctccttaaagatgtctggaggttgggagctggaactgaatgggacagaagcgaaattagtgcggaaagttgccggggaaaaaatccccgttccctttcaacattaacaacagcattccccccaacatttgatggtgaagaggaaaccctcgcaagggccagaaggtttgaagacagggagcctgaactgacatcacttcccaaatttggtggttgaaggttataaagaatgattgatggcaagaaaggcccctggtgttggaccgttcattatccagaggatgaggttggacaagaagacgaggctgagagtgacatcttctctatccagggaagttagctttcagtcccactggcgagtctgaatggaaggatactaattatacactcaacccagattccttttggactgggcccttatatgacccacctaatgggatttccttgaccgaaccgaggggtggacaacacttttgccagatgagcctggtggagctcagcacagccccccggagcccccccggagtaccattaccttttccttgaagacctccaagaagttttgctcaagagcccagtagagcagacagatgctgaaagcccatagtttccatgggcaggctttggccaagtggaacaaatccctactctgaagcctagacatgtgtctttgmaaatgattatcgatcctaatatcatggggggbaaaaataccgaaatttaaattatatgttttgtgttctcatttattatcatttttttctgtacaaatctaattattttctagattttttgtataacatggatagacataaacacctggtttatctcctccaagagcagtttgtctttttctattcctcccccttcaacctgtgtcacaaaagaccaagaacagatgtcggaaaagtttttttttcttcagtattgtttaaaagtttcaatacaaaataagttataaataaaaggcttgtatgtacaaggctccttcagagggaatgagtggtcttcaacccccataggaatgatgtgagtcccaagctggctctagaggatcacagccccaagtatcacaggccaagacagctcaatgagaagactggacttttcttctgttccttccagtgactgaaaattcaggtgtgtggggacaatgtgcactggtgctcatttatactaccctctaaacaggcacggaagcttctgctctgtcaactcagaagaatgagatgggatggacaggccacactggacacaccaccacaccgcttgtgaattctcaggttggtactttgtaaccataacaggaacagatgaagtgggtttgccttcccactcagcccagcatgaatgctgagacaacttttcatcaaaactgcaaagctcttctacatactccgctgatgatggaactgcctcttggttaatcagcttccctgttgaatttccctccagcacagccatgttctataaggctcctccaggctgagccaagtcttctggacaattctccactgactgccaagcattccactcttcttccatcacctcttgaactagaaagctgttctgagaattccctggcccactgcttccagcctggcggtacctgtttaggagcctgtcccggctgtttctcattctctccaggcatctctgccggaaagcctctttccaaggcggcgagcccaccagtttgtacagggagcggcgcggagacctcaacgactccgccatctcctcttcgcgggagacaaagccacaagacccgttccctgcggacgcgtgggcggacgcgtggg

SEQ ID NO: 133552 - DNA, 387 bp, Homo sapiens
agctggacacgaatttgcccgccaaccgagtgcccgcggggctggagaaacgactctgcgccgccgctgcctccatcctgggcaaacctgcggaccgcgtgaacgtgacggtacggccgggcctggccatggcgctgagcgggtccaccgagccctgcgcgcagctgtccatctcctccatcggcgtagtgggcaccgcccgagacaaccgcaggcacaggggcccctttctttgggttctcacccagggaactagccctgggccaggaccggatacttatacggttttttcccttggagtcctggcagaatggcaagataaggaccggcatgacttttttatgaatgggcaccgaaggattccaggcatctggtaacctgggtgtg

SEQ ID NO: 133553 - DNA, 647 bp, Homo sapiens
  misc_feature (1)...(647): n = a,t,c or g
cttcttccgccagagctgtttccgttcctctgcccgccatgccgttcctggagctggacacgaatttgcccgccaaccggagtgcccgcgggggctggaggaaacgactctgcgccgccgctgcctcccatcctgggcaaacctgccggaccgcgtgaacgttgaccggtacgncgggggcctngccattggcgcatgagcgggttccaccggagccctgcgcgtcagctgtccaatctcctccattcggcgtcagtggggcaccgccgaggacaaaccgcagccacagcgcccatttcttttgagtttcttcaccaagggagcttagccctggggccagggaccggataattttattccgttttttccctttggagtcctgggcagattgggcaagataggggacggtcattgatttttttatgatttggggcacggagggattccaggggcatcttgtgaacttggctgcttctttccagaagagatcttcttgggcagaagtgaagggcctgggangattaaccagcttttggattatccccgncattgcaacatttcctggtgattcacataatcctcttcttcatccttcatatgaaataaatgaagagagcttcctcattcagaaaaaaaaaaagtcgacg

SEQ ID NO: 133554 - DNA, 355 bp, Homo sapiens
ggatagttcctcccggccacgccgcgccggctctgggcactcagcatcgtttccttttcctccgctggagcagctatggcggcggtgaagaccctgaaccccaaggccgaggtggcccgagcgcaggcggcgctggcggtcaacatcagcgcagcgcggggtctgcaggacgtgctaaggaccaacctggggcccaagggcaccatgaagatgctcgtttctggcgctggagacatcaaacttactaaagacggcaacgtgctgcttcacgagatgggccttcatcctagaataatcactgaaggatttgaagctgcacaggaagaggcccttcagttattggaagaagtcacag

SEQ ID NO: 133555 - DNA, 800 bp, Homo sapiens
  misc_feature (1)...(800): n = a,t,c or g
ctgcagattgtcttaacagagcctgtagtgnactccattttgcccattaaaaagcaagatgancctattgatctctcaatgattgagatcatggagatgaaacataattctgaaactgatacaagcttaatcagagggcttgttttggaccacggagcacggcatcntgatatgaagaaaagggtggaggatgcatacatcctcacttgtaacgtgtcattagagtatgagaaaacagaagtgaattctggctttttttacaagagtgcagaagagagagaaaaactcgtgaaagctgaaagaaaattcattgaagatagggttaaaaaaataatagaactgaaaaggaaagtctgtggcgattcagataaaggatttgttgttattaatcaaaagggaattgaccccttttccttagatgctctttcaaaagaaggcatagtcgctctgcgcagagctaaaaggagaaatatggagaggtatccgagtaatttgacttttactcattttgcaagtgaattgggattatttctttttccttatactttatttttgggttttttcaactgtatagttaattggcattaactatattcacattgtgcaccccgtcagcactgtccatctctaggacttttttcatcatcacaaactgaaactgtatacccattaaatagttactccccatttctccctcccccttgccccttgtaaacattattttactttttgtttctgaattcaatatacttttttccaaagagctccccacaataaaaagcttttttaaaaaaaaaaaa

SEQ ID NO: 133556 - DNA, 2850 bp, Homo sapiens
  misc_feature (1)...(2850): n = a,t,c or g
ctggaagacccggatagttcctcccggccacgccgcgccggctctgggcactcagcatcgtttccttttcctccgctggagcagctatggcggcaggtgaagaccctgaaccccaaggccgaggtggcccgagcgcaggcggcgctggcggtcaacatcagcgcagcgcggggtctgcaggacgtgctaaggaccaacctggggcccaagggcaccatgaagatgctcgtttctggcgctggagacatcaaacttactaaaagacggcaatgtgcttgcttcaccgaaattgcaaatttcaacacccaacagcttccttaaatagcaaaggttagcaacaagccccaggaatgatataacttggttgatggtaccgacttcttaattgtcctaatcaattgggagagcttgctgaaacaggccggatctctacaatttctgaaggccttcatcctagaataatcacttgaaggattttgaaggtgcaaaggaaaaggcccttcagtttttggaagaagtcaaagtaagcagagagattggacagggaaacactttatagatgtggccagaacatctcttcgtactaaagttcatgctgaacttgcagatgtcttaacagaggctgtagtggactccattttggccattaaaaagcaagatgaaccctattgatctcttcatgattttgtgatcatggagatgaaacataaatctgaaactgatacaagcttaatcagagggcttgttttggaccacggagcacggcatcctgatatgaagaaaaggtgggngggatgcatacatcctcacttgtaacgtgtcattagagtatgagaaaacagaagtgaattctggcttttttttacaagagtgcagaagagagagaaaaactcgtgaaagctgaaagaaaattcattgaagatagagttaaaacaaataatagaactgaaaaggaaagtctgtggcgattcagataaaggatttgttgttattaatcaaaagggaattgaccccttttccttagatgctctttcaaaagaaggcatagtcgctctgcgcagagctaaaaggagaaatatggagaggctgactcttgcttgtggttgggggagcccctgaattcttttgacgacctaagtcctgactgctttgggacatgcaggacttgtatatgagtatacattgggagaaagagaagtttacctttattgagaaatgtaacaaaccctcgttctgtcacattattgatcaaaggaccaaataaggcacacacttcactcaggatccaaaggtggcagtgaggggacgggctttgaggggctgtccaaaaatgctattgatgatggctgtgtggttccagggtgctggtgccgtgggaagtgggcaatgggcaggaagccctggatttaaacataagcccagttgttaaagggccagggcacagcttgggagtcccaagcatttgcttgatgcatttgctcattatttccccaaggttctttgcttcaggaactctgggtttttgacctttcagggaaacattaagttaaaattcaaagcagaaccattcagaatcaggtccagcttgtgggtgtggacccttgaacaccaggtgagcccaattggtggccagccagaagtaaggccgtatggggataacctaattgtggtaaaagaaaacaagccttccttcaactccctgcacctggtgaattgcccacccaaccattcctcttgggttgatgaggatccatgccgagcttgggaatgtcctccccctgaaagggttgaaaattgaaagcctcccccctgtatcctgaatccttgaaagacctgccaaagtgatccctgagggatttacagcctgtggaatttttttgtcccaagccttcaaaataatttttggaaaagaaatttttcccataatgaaaaaaagcagagaacagctggcctcctgttgaaattttggaaagttctggaaattatagtaatttttaaaaaatttgcccctgaagtggtatacacaataaaagcaggctctttttatccaagtgaacaggatgttttgcctttagcagtcagtgacataaaattcccatgttagataagccatatgttacttaccctggtaattaaataattccttgaaaagccaatttttaatggtttaattttatgtgggacgtatgttcaaattatccaactacccctattgtttaagccatttggttttaaaatttttatgctaatattaaatgctcaagtaatttaaaattattgaaagccatccctggttgggtataaatttcctgagttaaatgccattgggatcagttgggactttggaacgcctttgaaaatgggcctttgctaaaaaatccccccgccacaaaagttgtcaggaaatggggaagaggagtccaacttaggaggccaagggaagttgaagaggagctgccaactgtaaaggggccaaggaacaggcagaggtaaaaaagatgatggaaggtggtggtgacctaagggcccacggttattgggtgaaatttgagattgtaggcccaactgtattttcaagcttctgaacttaggcaaaatattccatcgcaaagtctctagccgtcatatttttctcacccaaatttacgtttccacgagattatttatatatagttggtctatctctgccagtccttgaaggtgaaagttgtgtgttactaggctgtgttttgggatgtcagcagtggcctgaagtgagttgtgcaataaatgttaagttgaaaagaaaaaagataagagtcgccgagctaatccgtgagagggtatttatcggccggcggcggttcacgg

SEQ ID NO: 133557 - DNA, 618 bp, Homo sapiens
cgaggggcccgtcatggcgcccccgaaccctggtcctgctactctcgggggccctggccctgacccagacctgggcaggctcccactccatgaggtatttctccacatccgtgtcccggcccggccgcggggagccccgcttcatcgccgtgggctacgtggacgacacgcagttcgtgcggttcgacagcgacgccgcgagccagaggatggagccgcgggcgccgtggatagagcaggaggggccggagtattgggacgaggagacagggaaagtgaaggcccactcacagactgaccgagagaacctgcggatcgcgctccgctactacaaccagagcgaggccggttctcacaccctcttcccacgctgacctgtgctccctccccaatcatctttcctgttgcagagaggtggggctgaggtgtctccatctctgtctcaacttcatggtgcactgagctgtaacttcttccttccctattaaaattagaacctgagtataaatttactttctcaaattcttgccatgagaggttgatgagttaattaaaggagaagattcctaaaatttgagagacaaaataaatggaacacatgagaaccttccagagtcc

SEQ ID NO: 133558 - DNA, 178 bp, Homo sapiens; identical to SEQ ID NO: 122013

SEQ ID NO: 133559 - DNA, 153 bp, Homo sapiens
gctcccactccatgaggtatttcttcacatccgtgtcccggcccggccgcggggagccccgcttcatcgccgtgggctacgtggacgacacgcagttcactgaccgagcgaacctggggaccctgcgcggctactacaaccagagcgaggacg

SEQ ID NO: 133560 - DNA, 460 bp, Homo sapiens
ccgaggatggccgtcatggcgccccgaaccctcctcctgctactctcgggggccctggccctgacccagacctgggcgggctcccactccatgaggtatttcttcacatccgtgtcccggcccggccgcggggagccccgcttcatcgccgtgggctacgtggacgacacgcagttcgtgcggttcgacagcgacgccgcgagccaaaaaatggagccgcgggcgccgtggatagagcaggaggggccggagtattgggaccaggagacacggaatatgaaggcccactcacagactgaccgagcgaacctggggaccctgcgcggctactacaaccagagcgaggacggtgagtgaccccggcccggggcgcaggtcacgacccctcatcccccacggacgggccaggtcgcccacagtctccgggtccgagatccaccccgaagccgcgggaccccga

SEQ ID NO: 133561 - DNA, 1682 bp, Homo sapiens
ccgggtcgacccacgcgtccgcgaggatggccgtcatggcgccccgaacccttcctcctgctactctcgggggccctggccctgacccagacctgggcgggctcccactccatgagggatttgcttcacatccgtgtcccggcccggccgcggggagccccgcttcatcgccgtgggctacgtggacgacacgcagttcgtgcggtttcgacagcgacgccgcgagccagaggatggagccgcgggcgcccgtggataagaagcaaggaagggtccggagtaattgggacgggggatacacggaaagtgaaggccccactcacagacttgacccgagcgaacctggggaccctgcgcggctactacaacccagagtgaggccggtttttcacaccattccagataatgtatggctgcgaacgtggggtcggacggggcgttttcttccgcgggttacccgcaagaacggcttacgaacggcaaggattacatcgccctgaacgaggaacttgcgctcttggaccgcggcggacatggcagctcagatcaccaagcgcaagtgggagactccgcccatgaggcggagaagtttgagagcctacctggatggcacgtgcgtggagtgggctccgcagatacctggagaacgggaaggagacgctgcagcgcaacggaccccccccaagacacatatgacccaccaccccatctcttgaccatgaaggccactctgaagatgctggggccctgggctttctacccctgcggagatcacacctgaccctggcagcgggatgggggaggaccagacccaaggacacggaagcttgttggagaccaggcctgcaggggctgggaaccttccagaagtgggcgtctatggtggtgccttctggacaggagcagagataacacctgaccatgtgcagcaatgaagggtcttgcccaagcccctcaccctgaagatggggagccatcttcccaagcccacccgtccccaatccgtggggcatcatttgctgggccctggttctcccttggaagcttgtgaatcactggaagctgtgggtcgctgctggtgatgttgaaggaaggaacagctcaggtggagaaggggtgaaagatagaaaaaggagggagcttactctcaaggctgcaaagccagtgaccagtgcccaggggcttctgatgtgtctcttcacagctttgtaaaagtgttgagacagcttgccttgtgtggggactgagaggcaagagtttgttccctgccctttcccttttgtgactttgaaggaaccctgacttttgtttcttgcaaagggcacctgcatgtgtcctgtgttcatggtaggcataaatgtgaggaaggtgggggagagcaccccccaaccccatgtccaccatggaccctctttcccacgctggacctgttgttccctccccaatcatcttttcctgttccaggagaaggtggggctgaggtgtctccatctctgtctcaacttcatgggtgcactggagctgtaaattcttcccttccctaattaaaaattagaacctgagtataaaatttaacttttctccaaatcctttgccatgaagagggttgatgaggtaaattaaaggagaagattcctaaaatttgagagacaaaattaatggaacgcatgagaaccttccag

SEQ ID NO: 133562 - DNA, 428 bp, Homo sapiens
ggggcacaagtgctattgcgcgcccgccgctcgccggccctgctgcggacgcaagccttgcggagtacggcaaccttcgctcaggcgctccagttcgtgccggagacgcaggttagcctgctggacaacggcctgcgtgtggcctccgagcagtcctctcagcccacttgcacggtgggagtgtggattgatgttggcagccgttttgagactgagaagaataatggggcaggctactttttggagcatctggctttcaagggaacaaagaatcggcctggctgcgcttctaggcgggaagcctatgtaagcaaaagggcagggccggggtttgtggtcccccccccaccacaaacacagcacttcggctcctttaacctgtgccacaggtgaccaccaataaaatcctctgctgagaaaaaaaaaaa

SEQ ID NO: 133563 - DNA, 355 bp, Homo sapiens
ctgcgggagatgcaggagaatgatgcatctatgcgagatgtggtctttaactacctggctgaatgggaaagccggattgcggaggtggatgccagtgtggtacgtgagatctgctccaagtacatctatgaccagtgcccagcagtggctggatatggccccattgagcagctcccagactacaaccggatccgtagcggcatgttctggctgcgcttctaggcgggaagcctatgtaagcaagagggcagggccggggtttgtggtcccccctccaccacaaacacagcacttcggctcctctaacctgtgccacaggtgaccaccaataaaatcctctgctgagaaaaaaaaa

SEQ ID NO: 133564 - DNA, 500 bp, Homo sapiens
ccttcagcatctgctatgcagagacgggcttgctgggtgcacactttgtctgtgaccgaatgaaaatcgatgacatgatgttcgtcctgcaagggcagtggatgcgcctgtgtaccagtgccacggagagtgaggtggcccggggcaaaaacatcctcagaaatgccctggtatctcatctagatggcactactcctgtgtgtgaggacatcggacgcagcctcctgacctatggccgccgcatccccctggctgaatgggaaagccggattgcggaggtggatgccagtgtggtacgtgagatctgctccaagtacatctatgaccagtgcccagcagtggctggatgggaaagccggattgcggaggtggatgccagtgtggtacgtgagatctgctccaagtacatctatgaccagtgcccagcagtggctggatatggccccattgagcagctcccagactacaaccggatccgtagcggcatgttctggctgcgc

SEQ ID NO: 133565 - DNA, 444 bp, Homo sapiens
tttttttttctcagcagaggattttattggtggtcacctgtggcacaggttagaggagccgaagtgctgtgtttgtggtggtggggggaccacaaaccccggccctgccctcttgcttacataggcttcccgcctagaagcgcaccaggaacatgccgctacggatccggttgtagtctgggagctgctcaatgctctccacctccttctccagggcactgccaggccagattctttgttcccttgaaagccagatgctccaaaaagtagcctgccccattattcttctcagtctcagaacgggtgccaacatcaatccacactcccaccgtgcaagtgggctgagaggactgctcggaggccacacgcaggccgttgtccagcaggctaacctgcgttctccggcacgaactggagcgcctgagcaaaggtttgccgtactcg

SEQ ID NO: 133566 - DNA, 1665 bp, Homo sapiens
atggcggcgtccgtggtctgtcgggccgctaccgccggggcacaagtgctattgcgcgcccgccgctcgccggccctgctgcggacgccagccttgcggagtacggcaaccttcgctcaggcgctccagttcgtgccggagacgcaggttagcctgcttggacaacggcctgcgtgtggcctccgagcagtcctctcagcccacttgcacggtgggagtgtggattgatgttggcagccgttttgagacttgagaagaataatgggggcaggctactttttggaagcatctggctttcaagggaacaaagaatcggcctggcagtgccttggaagaaaggaggtggagagcatggggggcccatcttaatgcctacagcacccgggagcacacagcttactacatcaaggcgcttgccaaggaattgccgaaagcttgtggagctcctgggtgacattgtgcagaactgtagtctggaagacttcacagattgaggaaggaacgttgatgtgatcctgcgggaagatgcaggagaattgatgcatcctatgcgagatgtagtctgtaactacctgcatgccacagcattccaggggcacacctctagcccaggctttggaggggcccagtgagaatgtcaggaagctgtctcgtgcagacttgaccgagtacctcagcacacattaacaaggcccctcgaaatggtgctgggcagcagctgggagggagtgggagcaccagcaattgtttaggaccttcgcccaggaaggcacctcggtgggcatcccaatggacatatgcagaggacgctgtgcccactcttactccatgccgcttcactggcagtgagatcacgccaccgtgatgatgctctaccttttgcccacgtggccattgcagtagagggtcctggctgggccagcccggacaatgtggccttgcaagtggccaatgccatcagtcggccactgatgactgcactgtatggtggtggcgtgcacctgtccagcccactggcttcaggtgctgtggccaacaagctatgccagagtttccagaccttcagcatctgctatgcagagacgggcttgctgggtgcacactttgtctgtgaccgaatgaaaatcgatgacatgatgttcgtcctgcaagggcagtggatgcgcctgtgtaccagtgccacggagagtgacgcttgaccggggcaaaaacatcctcagaaatgccctggtatctcatctagatggcactactcctgtgtgtgaggacatcggacgcagcctcctgacctatggccgccgcatccccctggctgaatgggaaagccggattgcggaggtggatgccagtgtggtacgtgagatctgctccaagtacatctatgaccagtgcccagcagtggctggatatggccgttctcttggcctccccttccacctctgctcccgcactgctgctcagcttacagagcagccagttaaggccccaagcagctctccccagtcccctggctgccagggagttcttgctcagaaaacctgtcccagcagttccttgactgcctgccaaggtgccttcatcaataccctgcacccgtcaggccccattgagcagctcccagactacaaccggatccgtagcggcatgttctggctgcgcttctag

SEQ ID NO: 133567 - DNA, 1727 bp, Homo sapiens
  misc_feature (1)...(1727): n = a,t,c or g
cgcccagtctacgcttgcgcggcgcaacagggccgactgcagctggaagatggcggcgtccgtggtctgtcgggccgctaccgccggggcacaagtgctattgcgcgcccgccgctgcgccggccctgctgcggacgccagccttgcggagtacggcaaccttcgctcaggcgctccagttccgtgccggagacgcaggttagccatnctggacaacggccctgcgtgtggccctccgagcagtcctctcagcccacttgcacggtggggagtgtggattgatgttggcagccgttttgagactgagaagaatgatngggggcaggctactttttggagcatctggctttcaagggaacaaagaatccggccttggcagtgccctgggagaaggaggtggagagcatgggggcccatctttaatgccttacagcacccgggagcacacagcttactacatccaaggcgctgtccaaggatctgccgaaagctgtgggagctctgggtgacattgtgcagaactgtagtctggaagactcacagattgagaaggaacgtgatgtgatcctgcgggagatgcaggagaatgatgcatctatgcgagatgtggtctttaactacctgcatgccacagcattccaggggcacacctctagcccaggctgtggaggggcccagtgagaatgtcaggaagctgtctactgcagactttacccgatacctgcagcacacattacaaggcccctgaaagtgtcctgccacagacggagggagtgcgcacagagcaactgttagacctcgtcccgcaaccaccgcgtgcacatcccttgcaacatatgcagagggagctttgctccactattactccatgccgcttcactggcagtgagatccgccacccgtaagattgctctaccttttgcccacggtggccatttgcagtagagggtcctggtttggccagccccggacaattgtggccttgcaagtgggcaatgcccatcatcggccactatgactgcacttttggggggtggcgtgcacctgtcccagcccactgggtttcaggtgcctgtgggccaacaaagctatgccagagttttcagaccctcagccatctgctatgcagaggacgggctttgctgggtgcacactttgttctgtgaccgaatgaaaaatcgatgacatgatgttcgtccttgcaagggccattggatgcgccttgtgtaccagtgcccacgagaagtgaggttggcccgggggcaaaaaaacatccctcagaaaatgcccctgggtatctcatcctaagatggcaactactccctgtgtgttgaggacattacccccgcagccctcctgaccctatgggcccgccgcaatccccctgggctgaaatgggaaagcccggattgccggaggtggattccaagttgtggtacggtgagatcttgctccaaggtacatttatggaccaagttgcccagcagtggcgtggatattggccccattgaagcatgctcccagactacaaccggattccgtagccggcatgtttctgggttgcgttttttagggcgggtaagcctatggttaagcaaaagggcaggggcgggggtttgtggtccccccccccaccacaaacacagcactttcggctcctcttaacctgttgccacaggttgaccaccgaataaaatcctctgctgagaaaaaaaaaaaaaaaaaaa

SEQ ID NO: 133568 - DNA, 422 bp, Homo sapiens
agagaacccatgctctcttctgcttttcagaaggaggcggtgtgatgcaaggaaagttacaaactcctgctcttaaaggaaccccctcatttgacaagagagggagccggagcccagagcaggccaaagacttgctcaaaatctcccaaaaagtcaatgttagagtcagagcctgaatccctctttcctgtgactcccggccggtgcttcttcccagcacatgcgcacggctctgcagtccaggatcggtgtgccctttcctggtgctcacacatacctctccggggccccagggcgccggcccagcatgggcagttgctcattgttggagataaggtcgcgctggtcatccataactggcttctgatcttcccgacagctcctgcacgaaatcgtcgacccgggaattgcggtcccgaaca

SEQ ID NO: 133569 - DNA, 2166 bp, Homo sapiens
  misc_feature (1)...(2166): n = a,t,c or g
cggatcagacttgactgttcccatacattcaccttcccacatttccagccctttggaaccctgaagatatcctcttctctgtcctgtcactctatgggacttacggctctttgttaaaatactatttaagcaaggcccctaagccactgccttgagagagaaatacttctcaactgaggcctctactgcataatgggtacagcatgggttaatcaactttggctgatttttcttttgttaagttgacttttgtttctaagggagcgtgtcaactaagaacctaaacagggaaggaaaggaaatgttttcacccctgcacgtcgtccaaacttcctcctgcgtgtttgagacgacataacggaggccagagaagaggacttgtctgagctcaccaagggtgcacagcccctttctgcacccactcatctgtggatgagaaaggggagacaaacaaaggtgtcttctgtttcaaagtgctttcctgtcttgggagtggacatttgcctttttcttgaaacattcaaagagccttatgaatccaaaggcctgcccagaaacaagtgatgagggccttgggccgccaatggggtcgtgctggcctttccaccttgcttggggagcccccccgccccacaccttgccccgcaaaaggcagttccaccaaagtggggtatttccagcctttgtagctttcacttccacatctaccaagtgggcggagtggccttctgtggacgaatcagattcctctccagcaccgactttaagaggcgagccggggggtcagggtcccttatgtctcaggaggagaagcatgagctgtccgggaagatcagaagccagatcatggatgaccatgcgcgaccttatctttatacaatgagcaactgcccatgctgggccggcgccctggggccccaggagagcaagtgcagccgcggacgcctgctacacagagcttttccatccctggttgactctgctcctcgctggccaggccaccaccggcntactttcctgttaccagcagcaaggggccggctgggacaaacttgacagtcaccgtcccaggaaccttgcagcttgggaggaaccttgcggcatggaagctttccccaagccttcccaaagccttgttgaagcaaagattgcgcaattggccacccccggcttgcttgattgcaaggccgcttgcccatggggagccccttgccccagggggcccattgcagaatgccaccaaagttattggcaacatgaacagaggaccatgttgatgcacctggctccagaaatgctgaacccccctgaaaggtgtacccgcccactgaaggggagctttcccggaagaacctgagacaccttaagaacaccatggagaccatagaatggaaggcttttgaaaactgggatgcaccattgggctcctgttttgaattgagcaagcaatccctttgggagcaaaaagcccacttgacgctccaccgaaaagaattcactggaactggaagacccctcttctgggctgggtgtgaccaagcaggatctgggcccagtccccatgtgagagcagcagaggcggtcttcaacatcctgccagccccacacagctacagctttcttgctcccttcagcccccagcccctcccccatctcccaccctgtacctcatcccatgagaccctggtgcctggctctttcgtcacccttggacaagacaaaccaagtcggaacagcagataacaatgcagcaaggccctgctgcccaatctccatctgtcaacaggggcgtgaggtcccaggaagtggccaaaagctagacagatccccgttcctgacatcacagcagcctccaacacaaggctccaagacctaggctcatggacgagatgggaaggcacagggagaagggataaccctacacccagaccccaggctggacatgctgactgtcctctcccctccagcctttggccttggcttttctagcctatttacctgcaggctgagccactctcttccctttccccagcatcactccccaaggaagagccaatgttttccacccataatcctttctgccgacccctagttccctctgctcagccaagcttgttatcagctttcagggccatggttcacattagaataaaaggtagtaattag

SEQ ID NO: 133570 - DNA, 1428 bp, Homo sapiens
atggggtcccgggtccgccttagtaagcgccgggccaaggctggggttcagtcaggcaccaacgccctgcttgtggtcaaacatcgggacatgaatgagaaggaactggaagctcaggaggcacggaaggcccagctagaaaaccacgaaccggaggaggaagaggaagaggagattagacagccgagaaagaagctgggggctcagccggtggtgcactgggtggcacctgatgggcggctgctggggaactccagccggacccgggtccggggggacgggacgctggatgtgaccatcaccaccttgagggacagtggcaccttcacttgtatcgcctccaatgctgctggggaagcgacggcgcccgtggagcccagaggcctgtgcccggactacgcatgtaccaggttcagtacaacagttccgttgatgactccctcgtctacaggggttgatatagaagcagctcgaaaggaagaagaacggatcatgcttagagatgccaggcagtggctaaatagtggtcatataaatgatgtccggcatgcaaaatctggaggtacagcacttcacgttgcagctgctaaaggctatacggaagttttaaagatcatctctttacgttttggtgtcccccgaacccaggtcaggacatgggttgccctctatgaaaaacatggagaaaaaggtttaattcccaaacctaaaggcgttagtgctgatccagagttgcgtattaaggtcgtgaaagctgtgatcgagcagcacatgtcccttaatcaggctgctgctcactttatgcttgctggtagtggttctgtagccaggtggctgaaggtctatgaagagcgcggagaagctggtttacgcgcgctcaagattggcaccaaaagaaacattgcaatatcagttgatccagaaaaagcggcatcagcattggagctgtcaaaagaccgacgcattgaggatcttgaaaggcaagttcgatttcttgaaacgcggcttatgtatctaaaaaagctgaaagccttagctcatcccacgaaaaaggctgcggagataccgcgcagtacgttttattatcatctaaaggctctcagcaagcctgacaagtatgcggacgttaaaaagcgtattagtgagatttatcacgagaatagaggccgatacggataccgtagggtaacgctgtctcttcatcgagaagggaaacagattaaccataaagctgttcagcgcctgatgggaaccctctcacataaagcagcgattaaggtcaagcgataccgctcttacagaggagagatgaagaaactgagaatcagagaggttcagatacttgctggaggtcacacagctaagttgaatatggagcaagtgaaatctgcagatgctttcacgtatattaagcagccaattgcttaa

SEQ ID NO: 133571 - DNA, 2294 bp, Homo sapiens
atggcgcggagcgaggcagcggcggcggggccgggcccgggcccccccgggctggcggcccgggagcggcggggggggcgcgggtgtgtgcgcgggtgtgagcgtgcgagcgtgcgagtgtggtccgtggcgctgcggcgggcccggcgtgcgcccgcgcggccctatgtggcccggtgccggcgtgtgcggcgccctgcccgtgtggccatcgggtgtggcggggtgtcgagcccggccggcgtgtccggctgtgcacgcgtgtcccccgagcggccgcccctccggctgtgtgtctgggcgctgtcgcgcgcccatggaggggctgtgtgcagggctggcccaggccctgactccctgaagagaggtctcacctcccaccctcctgccttcccactgcaccatggctccaggacccttctcctcggccctctctcgccgccgcccgctgccctgccctttctgctgctgctctgggcggggcatctcgtggccagccctgccccggccgctgcatctgccagaacgtgcgcccacactgacaatgctgtgcgccaagaccggcttgctctttgtgcccccgccatcgaccggcgcgtggtggagctgcggctcaccgacaacttcacgccgccacttcgccaacatgaccagcctggtgcactcactctctcccggaacaccatcggccaggtggcagctggcgccttcgcgacctgcgtgccctccgggccctgcacctggacagcaaccgcctggcggggtgcgcggcgaccagctccgcggcctgggcaacctccgccacctgatcttggaaacaaccagatccgccgggtggagtcggcggcctttgacgccttctgtccaccgtggaggacctggatctgtcctacaacaacctggaggcccgccgtgggaggcggtgggccagatggtgaacctaaacaccctcacgctgaccacaacctcatcgaccacatcgcggaggggaccttcgtgcagcttcaaagctgggcaccgggcccaagccgcccacccgctgaccgtcagcttcggcggcaaccccctgcactgcaactgcgagctctctggctgcggcggctgacccgcgaggacgacttagagacctgcgccagcccgaacacctcaccgaccgctacttctggtccatccccgaggaggagtcctgtaccaggtgccaacgattctgcggctgagcgtcgctcgtggcagccgagctcacctcgaactccgtgctcatccgctggccacccagaggcctgtgcccggaatacgcatgtaccaggttcagtacaacagtccgttgatgactccctcgtctacagaaaatattcgctgagcacctacatgaacccgaccagggatgatcccgtccaccagtcagacctttctggtgaatgacctggcggcgggccgtgcctacgacttgtgcgtgctgggcggtctacgacgacggggccacagcgctgccggcaacgcgagtggtgggctgtgtacagttcaccaccgctggggatccggcgccctgccgcccgctgagggcccatttcttgggcggcaccatgatcatcgccatcgggggcgtcatcgtcgcctcggtcctcgtcttcatcgttctgctcatgatccgctataaggtgtatggcgacggggacagccgccgcgtcaagggctccaggtcgctcccgcgggtcagccacgtgtgctcgcagaccaacggcgcaggcacaggcgcggcacaggccccggccctgccggcccaggaccactacgaggcgctgcgcgaggtggagtcccaggctgcccccgccgtcgccgtcgaggccaaggccatggaggccgagacggcatccgcggagccggaggtggtccttggacgttctctgggcggctcggccacctcgctgtgcctgctgccatccgaggaaacttccggggaggagtctcgggccgcggtgggccctcgaaggagccgatccggcgccctggagccaccaacctcggcgccccctactctagctctagttcctgggggagccgcggcccggccgaggccgcagcagcgctattcgttcgacggggactacggggcactattccagagccacagttacccgcgccgcgcccggcggacaaagcgccaccggtccacgccgcacctggacggggctggagggggcgcggccggggaggatggagacctggggctgggctccgccagggcgtgcctggctttcaccagcaccgagtggatgctggagagtaccgtgtga

SEQ ID NO: 133572 - DNA, 408 bp, Homo sapiens
taagacttatcaaacatttgtattcaagcaaacaaacacaaaacctcttaaaacggcacgttacaatcaaaggtatttatcgcccctcccctccagggcagggggggagcaggagaagagtgggagcgcacccggacacaaggcgatcagtgccgctgggtctctcccctgcccgccctctccacctgcccccagagcttggcccacctgcgggtggagaagggccttcgcaccgtcggtctccccgcattccaagtaagtagcagcttccaaagttgtgcgccctaatcgccctcttcttgccactttctgctgagttcagagtctgggcgctctcctccgactgccaggcatgaggactttcagagggcgagggagaaaccggtcgcttctttccgaaaggccgaa

SEQ ID NO: 133573 - DNA, 2323 bp, Homo sapiens
  misc_feature (1)...(2323): n = a,t,c or g
gcacgaggtgaaatataaaatattcacgataagaggaaacaaaggatgctgcctccaggacggctactgtgcctgaggctgggctccttctcagtcatcccagggcctctccgtctggccccaccctcgcccctccaggggatccacaagttgaatcgcagctctccagggttaattgccctggccgggagccagactcctcaccgccgccccgttcccccctgctggggagcgcagaatgaccaccaggaggccaggaacaaaacgcttaaatgttgcatttattaaggaaatgttaaataagaaaaaaacaaaaagtcaaaacggtgtcacggatgtcaagagcacttttgtggcgtaaaccgtgcagtcacgagctacgagttctattctgggtctttgtcccagggccagcaggaacgctagacgcctcccaaaagacccagtgggaaatgcactaaaagaaacaactcaccccgttcaaattcgcagggtcccccctccccccaccccctttctttcccacaaatgaaaaaaactgtaactcctcagggcagggcaaacaggccactgggggcaggaaaaagacttnattcaaacatttgtatttcaaggcaaacaaacacaaaaccttttttaaaacgggcacgtttacaattcaaaggtattttattcgcccctcccttccgggggcagggggggagcagggagaagagtggggagcgcacccggacacggatttgtgagaccccatgagtctgctgcgtggcttttaacaggtcactcttccggtcacaaggcgatcagtgccgctgggtctctcccctgcccgccctctccacctgcccccagagcttggcccacctgcgggtggagaagggccttcgcaccgtcggtctccccgcattccaagtaagtagcagcttccaaagttctgcgccctaatcgccctcttcttgccactttctgctgagttcagagtctgggcgctctcctccgactgccaggcatgaggactttcagagggcgagggagaaaccggtcgcttctttccgaaaggccgaagtcgagagaaataattgactccgacaggtttgcttcgcccagtctctgatagtgaggggcacaaccgggctagcaaagtgggcaggcgtgggagcggttgccgcgggggcatagggcgggtcagtagggccccacgaccaccgcctccacctccttagacggcctccggtccttcacgaggaagttgatcatgccctcggacttgatgagcagattgcagccgaggaagaagatgccgaagaccacggtgagtgagagcacgcacatgaccgcgatctgcaccacgcgcattatgtacaggctacgctcgtccgggcctccctccgcgaagccgtcgtcggttcacccacggacgcctggttgcagcagcgcacggctcgctccagcgcctcgctgctgttggccaggaacaggcccgccacgtccgtctggttgcctagggccggattcatcgcaggaacgggcgggcgccgcgagcggcgcgggtccgaggggtgggaaggcggcggcgctggaggaacaggtgccgggctgagcgctcactcgcagactagcgcgtgcgagggctccattgctctgctttcgaaagtccctgggccgtgggagtttcccaggagcctctccgacgcgcgcagcagctaggctcttctaaagccgtccgctccagccctggtggtgctcgttcccggcgctcgctcgagggggggctgttggaacttggcggggctggaccagcccggccgtgggaggtgcgggccgcggcggctgcagcggcggggtggctgcgctgagcaaacagcggccccttccggccgagccgccgcgctgccgtgctcttctgctgaatatatcttgtgcccactgggcttgttccgcccttgaaggctggcaggctgtgcttggctaacgctattggcccagatcccatacttgccaagggcgagccaggcgcagagcagctaggggtatgtaggcgagtgagcacggggtccagccactttgcacagccaggcatgctggctgctgtggtggggcgggcagctacaggtgctggtacaggtgccacttctgtgtgaggctgtggctggaccagatgtaccatgtgtggcttcctctgcgggcacccacatctggaactgacagcctgctccccatgcttcaggccgtcactggcttgaaggtgggatttcactggggacctgcccctttccacccaggagcctgtctgcctcctgccaccatcagtcatgtcgtccat

SEQ ID NO: 133574 - DNA, 447 bp, Homo sapiens
tcgacccacgcgtccgcaattcggctggcgtctccgagaccgcggactcccgtatggtccccgtggccccgagttgtagtcgggacaccccggccgcgggtgatcgtcgggtctccacgcgcccgggtcgctgacgcggatccggcctcggcgccttctcagggcgccctgcaaggccgcaggcaggatgaacattctggcacccgtgcggagggatcgcgtcctggcggagctgccccagatttaagatctccaaggtcattgtggtgggggacctgtcggtggggaagacttgcctcattaataggttctgcaaagacacctttgataagaattacaaggccaccattggagtggacttcgagatggaacgatttgaggtgctgggcattcccttcagtttgcagctatgggataccgctgggcatgagaggttcaaatgcattg

SEQ ID NO: 133575 - DNA, 594 bp, Homo sapiens
atgaacattctggcacccgtgcggagggatcgcgtcctggcggagctgccccagtgcctgaggaaggaggccgctttgcacgggcacaaagacttccacccccgcgtcacctgcgcctgccaggagcaccggacaggcaccgtggggttctgcaaagacacctttgataagaattacaaggccaccattggagtggacttcgagatggaacgatttgaggtgctgggcattcccttcagtttgcagctttgggataccgctgggcaggagaggttcaaatgcattgcatcaacctactatagaggagctcaagccatcatcattgtcttcaacctgaatgatgtggcatctctggaacataccaagcagtggctggccgatgccctgaaggagaatgacccttccagtgtgcttctcttccttgtaggttccaagaaggatctgagttatgcgctgatggagaaagacgccctccaggtggcccaggagatgaaggctgagtactgggcagtctcatctctcactggcatcaacagtgatgacagcaacctctacctaactgccagcaagaagaagcccacatgttgcccatga

SEQ ID NO: 133576 - DNA, 421 bp, Homo sapiens
cccacgcgtccgccagatgctgcgcagcagactccgattccccatcaccaattcgggtggcgtctccgagaccgcggactcccgtaagggccccgtggccccgagttgtagtcgggacaccccggccgcgggtgatcgtcgggtctccacacgcccgggtcgctgacgcggatccggcctcggtgccttgtcaaggcgccctgcaaggccgcaggcaggatgaacattctggcacccgtgcggagggatcgagtcctggcggatctgccccagtgcctgaggaaggaggccgctttgcacgggacaaagacttccaccccgcgtcacctgcgcctgccaggagcaccggacaggcaccgtgggatttaagatctccaaggtcattgtggtgggggacctgtcggtggggaagacttgcctc

SEQ ID NO: 133577 - DNA, 512 bp, Homo sapiens
ggaattcgggctgtttctgccactcttccagccatcatcattgtcttcaacctgaatgatgtggtatctctggaacataccaagtaagtgagcatcctgcaatataatgggaggctccgggaagagagggttcagaacagaggggtggtcaggaagaagaagaatgcatgtaggaccagagagggggtaattgggcctatgaatgtcagtgggaggggccctgcagactcactcatcccttactttccacctcccatggcaggcagtggctggccgatgccctgaaggagaatgacccttccagtgtgcttctcttccttgtaggttccaagaaggatctgagtgtgagtgtgccagtggggggacttcccagcttggtgagggaatgcccccctctgactctggccttccctcagacccctgctcagtatgcgctgatggagaaagacgccctccacgtggcccaggagatgaatgctgagaactgggcagtctcatctctcactggggag

SEQ ID NO: 133578 - DNA, 1817 bp, Homo sapiens
cccacgcgtacgggagtgggactcgaggtcctgtaactggactgggcccctcgccccctcctccagcggtctgcgggccttggcagcgccgcccctgcccacactgaccccgtgtggcggggccgttccgcgcccccgggccgctatgtaatggtaggagagcctaagccccgagatgacgtctggtcttcgcggccccgggatattgtaggaaccatgcggccccgcgtaatgcgatgaactatccggccccgcgtaatcgtagggtctgcgcgggcccggcccccaccagacgggactccccgcccccaattggcggccgaagaagtctcctcgccccagaagtcatcttcgggacgcccagggcccgggtgattttgggctcgccgcggccccgggtgattgtttcatctccgtggcccgcggtggtcgtaacgtctccgaagaccgcggactccccgtaaggtccccgtggccccgaagttgtaagtcgggacaccccggcccgcgggtgactcgtcgggtctccactgcgcccgggtcgctgacgcggatccggcctcggcgccttctcagggcgccctgcaagggcgcaggcaggatgaacattctggcacccgtgcggagggatcgcgtcctggcggagctgccccagtgcctgaggaaggaaggccgctttgcacgggcacaaagacttccacccccgcgtcacctgcgcctgccaggagcaccggacaggcaccgtgggcagatttaagatctccaaggtcattgtggtgggggacctgtcggtggggaagacttgcctcaataataggtttttgcaagaacacctttgataaaaattatttaggccaccattggagtggacttcgagatggaacgatttgaggtgctgggcattcccttccagtttgcagctttgggataccgctgggcaaggagaggttcaaatgcattgcatcaacctactatagaggagctcaagccatcatcattgtcttcaacctgaatgatgtggcatctctggaacataccaagcagtggctggccgatgccctgaaggagaatgacccttccaggtgtgcttctcttcccttgtaggttcccagaaggatctgagtaccctggctcagtatgcgctgatggagaaagacgccctccaggtgggcccaggagatgaaggctgagtactgggcagtctcatctctcactggtgagaatgtccgagaattcttcttcccgtgtggcagcactgaacctttgaggccaatgtgctggctgaagctggagaaaatcggggggctcgaacgcattggggaatgttgtccgcattcaacaagtgattgaccagcaacctctaccttaaattgccagcaagaaagaagccccacatgtttccccatggagggctggaggaagactgttcaagagaactgccccaagcccttagggcaacttgtggccacccttcatttccttccagagcttgaacccctgggacatttgcactgacttttattccagaccaaaagagctggcctcttgggtgggcagttatttcccacagaggggttagctggggatcatgttagtcacttccttgcccccaaggcacccgtgccaaagacttgatgccccctaatttcttagggggactgttccaggggcgcccagtggtagtgagggagagtgtctctgttcttttgctcagcctgctgggccctttgtgtttgaggatgcttaatgattccagcctctcactgtgccttatgcattaaaatttctttgttacgagcaaaaaaaaaaaaaaaaaa

SEQ ID NO: 133579 - DNA, 1623 bp, Homo sapiens
atgggggcaaaggatggccgtctactcagtgagtcctcacaaggtctttcctcatgtggagcatccctggtgcccttctgtgtgtccaaatctcgtcttcttatgaagacgccagtcagattagacaaagaaacagtatccacagtggactccggggctcctacagacttggcacagcttcctacagtcttgaaacagccctgttgttctgtcatggccagtgggcagtttgtgaacaaactgcaagaggaagtgatctgccccatctgcctggacattctgcagaaacctgtcaccattgactgtgggcacaatttctgcctcaaatgcatcactcagattggggaaacatcatgtggatttttcaaatgtcccctctgcaaaacttccgtaaggaagaacgcaatcaggttcaactcgctgttgcggaatctggtggagaaaatccaagctctacaagcctctgaggtgcagtccaaaaggaaagaggctacatgcccgaggcaccaggagatgttccattatttctgcgaggatgatgggaagttcctctgttttgtgtgtcgtgaatccaaggaccacaaatcccataatgtcagcttgatcgaagaagctgcccagaattatcaggggcagattcaagagcagatccaagtcttgcagcaaaaggagaaggagacagtacaagtgaaggcacaaggtgtacacagggtcgatgtcttcacggaccaggtagaacatgagaagcaaaggatcctcacagaatttgaactcctgcatcaagtcctagaggaggagaagaatttcctgctatcacggatttactggctgggtcatgagggaacggaagcagggaaacactatgttgcctccactgagccacagttgaacgatctcaagaagctcattgattccctgaagaccaagcagaacatgccacccaggcagctgctggaggatatcaaagtcgtcttgtgcagaagtgaagagtttcagtttctcaacccaacccctgttcctctggaactggagaaaaaactcagtgaagcaaaatcaagacatgactccatcacagggagcctgaaaaaattcaaagaccaactccaggctgataggaaaaaagatgaaaacagattcttcaaaagcatgaataaaaatgacatgaagagctgcggcagaactacatcggggccaccaaatcaccactcttcagccccatcccactccctgtttcgggcctcgtctgctgggaaagtcacttttccagtatgtctcctggcctcttatgatgagatttctggtcaaggagcgagctctcaggatacgaagacatttgacgttgcgctgtccgaggagctccatgcggcactgacctcggcccacccggatctcatcctttcccaggatgagatagtgacgctgaacctcgcatcccagggcggttcgcagaagcggggcaacccccgacgcttctacaggcggggcttcctggaggtggagcccttgaccggcttcgtggagctgcacagcagcggctcccagtgccaggcgctcatcgagagcggttcccgcgaggatctcccggtctgtccgaacaaagtgggcgtccgcgtggattactag

SEQ ID NO: 133580 - DNA, 583 bp, Homo sapiens
atgtctgcacttaatgagcgtctaaagaatcctgaaaattcagaacccaagtcttcccagtactatcttagtttccgcaccgcagttcctcggtgtccacttcaggcttccggactggaaggacagccgggaataaaacgtgccggcgaggctcaggagtcattggccacagagacccagcccgagtttcccatcgcactgagcactgagatcctgctggaagctctgccgcagcatgagctccgcagccgggttctgcgcctcacgccccgggctgctgttcctggggttgctgctcctgccacttgtggtcgccttcgccagcgggaaaccttgcataccctggaggcccaccccatagcttctgcactggcagactcatgcctgactggtgaagagatccagcagagcagcccctacagccacacaccagcctgcattctccctccccatactgaagcttcccccacatccattgctactccccacattgctttgctggtgtctgcctgcaggtggcagattttgctttccttgtcctgccagcgcacaggaatacatgcggtcctcacccctcccaatg

SEQ ID NO: 133581 - DNA, 625 bp, Homo sapiens
  misc_feature (1)...(625): n = a,t,c or g
gcaccgcagttcctcggtgtccacttcaggcttccggactggaaggacagccgggaataaaacgtgccggcgagnttcaggagtcattggccacagagacccagcccgagtttcccatcgcgactgagcactgagatcctgctggaagctctgccgccagcatgagctccgcagccgggttatgcgccctcacgccccccggctgttgtccctggggttgctgctcctgccacttgtggtcgcctttcgccagcgctgaagctgcaagaagatggggacctgcagtgcctgtgtgtgaagaccaccctcccagggtccgtcccagggcacattcaccagctgggaggttgattcaagggccgggacccccactgccccacttgcccaacttgataagccacggtggaaggaatgggaagaaaaattttgcttgggacctggcaagccccgctgttacaaggaaaataatttaaggaaactttttgggagagtttagctaattagctggcctacgtgttgtgcatttgctatatagcatacttcttttttccagtttcaatctaactgtgaaagaaacttctgatatttgtgttatccttatgattttaaataaacaaaataaatc

SEQ ID NO: 133582 - DNA, 468 bp, Homo sapiens; identical to SEQ ID NO: 132960
  misc_feature (1)...(468): n = a,t,c or g

SEQ ID NO: 133583 - DNA, 628 bp, Homo sapiens
tttttttttttttccaacaagaagccataactttatttatgatagaaacagtacaaatttcaaaccaagctgcagttactcctttgagacaccaaaaaaagttgcttccatatggttacattgttaattccataatcgcatttacaatatcattactgttgttcttcagggctcggactgcctttgctctcgacacatttgcttgtgacatgaccaattctatgtccttaacttctacacctgtttcatcgacctcttcctcttcactctcctcttgtacagttggagtctgtgtgttttcttgaatgtttgagacagcttcaccttgaactttgaatttctcagcagctgctagttgtgcttgctgggataaatcttcgatcttggcttccccaaaaactatgtaagtatctgaagcaggatgtcctcacagcgctggacctgagtgtcgaggtgcctgagttctgccccttcgtggaccacttggtagtagcgctggaggaagagggaccagccctcgggggtgaggtacagcggggcctccaggtccttgtcgatgtccatgtgggccaagttgctaaggtactcctagcacgcacacagagcttcatccacaaactctggggac

SEQ ID NO: 133584 - DNA, 1359 bp, Homo sapiens
ggcacagtaagtactttctgtgccgctactgtctatccgcaggcatccgcctttctttcgggctaagccgccccggggactgaaagttaaggagagttgttggctttactgggccacagggttcctactcgcccctgggcctccggacaaaaaggggtctgcggttggtgtcctggcaaaagcacgttacaagggctgaggtgcgggcccacaatccgagcctgcagagatgggagcagttgcagtgttgagggcggaagaggagtgcgtcttgttttgggaactgcttcacaggatccagaaaaggaaatgcccggcgaagccacagaacccgtccctgcttacagagcagggagttgccgccagccccagggctgagacaggttctgggacagaatctgaccagtgatgaatcagtaccagagccttgaagaacaggattcccacccagggcaaccacacaacaaagcccaagctggccggcagcagtctgaaattgatgaggacccagtcagttaaggcaaaacagagtcggaattgaaaagaaggccccggaagggctatgtcccaaactggggtcttcggccaggttacaggagttaccaaggaattcactatcccggaaatctaagaatatcctcctttgtcatccaccaaaaccagatgtctaccaaggagcccctgcttccagatactttaccatagtttttgggggaagcccaagatcggaagatttatcccccagcaagcacaacctagccagctgcctgagaaattcaaagttccaaggtgaagctgtctcaaacattcaagaaaacacacaggactccaactgtacaagaggagagttgaagaggaagaggtccgatgaaaccaggtgtagaagttaaggacatagaatttggtcatgtcacaagcaaatgtgtccgagagcaaaggcagtcccgagccctgaagaacgaacgagtaatgatattgtaaatgcgattatggtaagtgttcaagcctttgttccttgactccctctgccctgaccaattatgagtgactttattttgtcttgctaaatatcagccaattaaggaacctcattccagagcctcttttgagttgccgtataggttttagtggcctaaattctcctgatttgcctgtaagagttttagtgacctgaattctcctgatttgcctataagaaccgctaattatcttttctctgttacaggaattaacaatgtaaccatatggaagcaactttttttggtgtctcaaaggagtaactgcagcttggtttgaaatttgtactgtttctatcataaataaagttatggcttcttgttggatgaaaaaaaaaaaaaa

SEQ ID NO: 133585 - DNA, 528 bp, Homo sapiens
atgtggggccacttccattcccacccgggcacaggtcaggcacgggcatacaccgacactagtgggtctccgatccctctgatcatgcatgtcaaccggggcaggcactctgaaattcccgttttggagaggaatttgttacatttcaggatggatgcctccacgtaaaatcttggaatgagttccctgatggaggcaatcttgaaaaaccaatttaggcatgtttccttggccgtgtcatttgcattctctggagaaaagtgatctggtaagacgctgcggctatccacacacatggaaaagatgcgctcgtacacgagctcttcctggatgactatttttagagccttcactttctggtctgaggcccaggcatccttcagcgattggttgagctcctctatgcggttcacgtaatcctgctgagtcaagttcaacagctccttttgggaaccctcctcaaagtcatccagctcctccagccgggtccgcaccttctctgacattgccaatgtggcagtcccagct

SEQ ID NO: 133586 - DNA, 442 bp, Homo sapiens
ctctcccactccctgtattccacaaatgacttgctcacctcctcaaagtcatccagctcctccagccgggtccgcaccttctctgacattgccaatgtggcagtcccagctttgcctaaacagaatgaatttacgtcacacaggtggcttttctcgtgcaccaatacccccagtggaggcatctttcactctacacttcatcgtgaataaagacacaagggaatgattccattatagaaaactatcccagattttcaaagcaacttccttatgtaaccagaattccatcgaaacatttcccacttagaagctgcccctggtgacccagtgggccagcctcaaagaggttaaccgctgcatttgagatttacaaactttgctctgtatcatctgtttattcctaaagaaaggcagtccagataaggatgccaaaaatcaaaaa

SEQ ID NO: 133587 - DNA, 2185 bp, Homo sapiens
tcactctccaattggcccagaatgcccttgggagaggcactggttggccaaggccacctgaccagaatgcaggtagagattgagacgtgtgaagatgcccgccagggaggggatggtgatgaagcagtaggcaacacaggcatgaatcaactgcacaagaacaggctccagattgcaaaacatcgacctggactcaacataaaaactcagctgttgttcaaaatcacggccaaaggaaaccatttttataaatccattaatcaaatatgacagcattcttttctcatcctcaagagtgagtgcattcacagagtcatgcatggtcttgcaaacatgcaaaagggcattcaagatgaccgggtccttggtgggctcttgttgatgcttgataaaggcgtccatgatgcatttgcaaacctccacccgcacactctctttttggaacatgtccagaaacggcagaaatttttcctgggggtaggaatcttcaaatgcacgatctggagtcatgtgcttgatgacatctgccaaaacggtattcacctctcgtttcgtgaaatgcttgcaggtgtattccacccacacttcggcacaattaatgtagtcctgtgggttcttcagcttagtgatgactttccaagcttcgttgagaatctgaagtcggtcactctcaggaggatcagccaaggccaagtttaatcccagtgatcgaaaaagaagatgcttggggaaaccagattcatcacactctttaatcatgccaatgaaatccatagaccttgtggcgatgaactcagcccggaaggcagacatcacagaattcaacagcaaggcattgtttcctagtttcttacacctttccatcatctcggtcagcagagcctcgggggcatggtaggagatgcactggaagatccagtccatggcaggcgggtacaaggggaggtaagatgggagctccactccttggaccaccagctggttctggaccgtatccccatgaatctgtttgaacgtaaggaggaagtcaaaaaagttcttatttagggtttctttgagatgtggggccacttccattcccacccggcacaggtaggcacgggcatacaccgacactagtgggtctccgatccctctgatcatgcatgtcaaccggggcaggcactctgaaattccccgtcttttacttgtactgactctttgaaatccggtgtcttttttaatagttacgtcacatctcaatttggactggccacatctcaagtgctcaagagcaacacgtggccagtggctgctgtactggacaatgtagatgcagcacccaggaacagctgcgacattacctggtaagacgctgcggctatccacacacatggaaaagatgcgctcgtacacgagctttccaaatgtatcaagtatgtcggtgataaggacaaatttgcttgggtagaactgaataacactggtgtctgaaagaagctttgaacactggatgactatttttagagccttcactttctggtctgaggcccaggcatccttcagcgattggttgagctcctctatgcggttcacgtaatcctgctgagtcaagttcaacagctccttttgggaaccctcctcaaagtcatacagctcctccagccgggtcagcactttctctgacattgccaatgtggcagtcccagctttgcctttttcagatcccataaacagattaatagacagcttttcggtagtggtgtaccgggcaaggatttctccccgtttgttggtccaaggctcaaaatccgatcctacaacggagttatcatctctatcacgtttccttctggagctgtccatggcagctgccaaggctgcggggtcagcagtggctgcaaacatggagagggggtcagtcccatcgaggacgatgctcagcgggtccacctcggagctggagcaggaggaggacgtggaagaagtgcttcctttaaaggaacactttctttgtctttgactctgtgaccctacgtagctcttcatctggctgttcatctgtattctttgtaatatccttaataataaaagttatgggtttcagagggtgatagtccccaaactccaatggtacagcctccagtcggcatgatgcaaattcagctttgtagttcctattcctggagtgcctccgtttcctcat

SEQ ID NO: 133588 - DNA, 1752 bp, Homo sapiens
atgacggctcggagccagctcattaaaggcaatggtgtgaataatataactatgttgcttttgaaagaaccgaatatgtattatccacctatcagtgcaccaaagcagcgtcataaacatagatctctaactgcagcccatttaaatgatgaaaggggttcattcagagccggtgtgattgaccgtctacctgaatgcgggaattcacggttcagaccccgtgcccgggcggtcggatacccgttacaggtaatgtccagacagagtacaggcgcgacacggggcccccaggccagaaaaagccaagacaacctccgaaacacggatccgactgacaaactacacccctacgatgtgacctttgcaccacctcgacgccccagcgacgacacgacgcccacccacgcacaacaaacaccactcaccctcccgcccatgcaccaccccccgcgcccagccacccagacgaagcgaatggctcaaatggtactgacagagcgcagctcggtccgccgccgccttctcctcctcctccccgccatattacggatctcaggctgcaacgcgggctcctggcaaccgccgccgctgccaccccgactccacctctcagggccggcacttccggtggttgattcccgggctgttaaaaccgttgggccaccagaacactaccatccccgaggtgcattgcgcgcccgcgatggaggacgtaatgcttacggccagcacgctgcacgccgggaaacaatggggatccccggagagagggacacatcgtacgtactcttgcagatacacacgcataatgcgcggcctcctacaagaggacacccaccgcggtttagggagagtccaggggatgggagcggcgcaaatgtgttcgtcctctctcctcctacgccactcacttgtctgtgtgcgactgccacattggcaatgtcagagaaggtgcggacccggctggaggagctggatgactttgaggagcacgacaacaacaaacacacacccacaaaccagccaaagccacacagagaggagaagatagagaagagaagaagagagagacaaagcgagaggagcggctcggccaacaggagaatgagcgagacgaaagaggaagacgagagaaggagccgagaaacagaggaacaaaaaggagggaagcagaaaaagggagaagaagaggagcgaagggaaaagagaagaaaagggggaggaagagaggcaggagaggcagcagaaaagagcacgggagaagaggcgagggagaggggcacgacggagaggacgggagaagaagaagacgcagaggccgcggacgcaggcccaaagaccaccactcaaaaaaataaaagactacacacaccacacgacacagacacccacacaacaacaccatacacatacaacaaaacacaaacaaccccacacaaacaacacaacggtattcctgtttttctttctcctcgccaaagaacaccggcgagcggcacggaagcaacacgaaccagagcgaggaagaggaggaggaagcaaggcgggggcgaagataaaacatacgtctatagccgcagcagccgacagaagacacgaccgacccacacagcgagataccaggagaaaagaagggagaagagcccaaagcgggaagcacggccgaacggcacacaagacagaggcgggcggcggaatcccagtgcactctacctcccgggttcaagtgattctcctgcttcagcctcctga

SEQ ID NO: 133589 - DNA, 470 bp, Homo sapiens
  misc_feature (1)...(470): n = a,t,c or g
nattatcgacatcactaggccagngcggnggaattcgctggtgaacaggtaggtcatccttgcggccttgcggcatgggcagtatccgccgccatcctcttccgtgaggcgcgctgagacccggaccggccctcctgagaggatgccggacccgtcgccatgggccgtgtgatccgtggacagaggaagggcgccgggtctgtgttccgcgcgcacgtgaagcaccgtaaaggcgctgcgcgcctgcgcgccgtggatttcgctgagcggcacggctacatcaagggcatcgtcaaggacatcatccacgacccgggccgcggcgcgcccctcgccaaggtggtcttccgggatccgtatcggtttaagaagcggacggagctgttcattgccgccgagggcattcacacgggccagtttgtgtattgcggcaagaaggcccagctcaacattggcaatgtgctccctgt

SEQ ID NO: 133590 - DNA, 328 bp, Homo sapiens
tgagggtacaatcgtgtgctgcctggaggagaagcctggagaccgtggcaagctggcccgggcatcagggaggtggccgaattgacaaacccatcttgaaggctggccgggcgtaccacaaatataaggcaaagaggaactgctggccacgagtacggggtgtggccatgaatcctgtggagcatccttttggaggtggcaaccaccagcacatcggcaagccctccaccatccgcagagatgcccctctggccgcaaagtgggtctcattgctgcccgccggactggacgtctccggggaaccaagactgtgcaggagaaagagaac

SEQ ID NO: 133591 - DNA, 434 bp, Homo sapiens
  misc_feature (1)...(434): n = a,t,c or g
ccgtccgcccatgggcccgtgtgatcccgtnaacagaagaaagggcgcccggtcntgtgttccagcgcgcaacgtgaaagcacctgtttaaagggctggcttgcgcgccgtggattttgcttgagcggcacggctacatcaagggcatcgtcaaggacatcatccacganccccgccgcgcgcgcccctcgccaaggtggtcttccgggatccgtatcggtttaagaagcggacggagctgttcattgccgccgagggcattcacacgggccagtttgtgtattgcggcaagaaggcccagctcaacattggcaatgtgctcctgtggcaccatgcctgagggtacaatcgtgtgctgcctggaggaaccaagactgtgcaggagaaagagaactagtgctgagggcctcaataaagtttgtgtttatgccacc

SEQ ID NO: 133592 - DNA, 464 bp, Homo sapiens
cgctggtgaacaggacccgtcgccatgggccgtgtgatccgtggacagaggaagggcgccgggtctgtgttccgcgcgcacgtgaagcaccgtaaaggcgctgcgcgcctgcgcgccgtggatttcgctgagcggcacggctacatcaagggcatcgtcaaggacatcatccacgacccgggccgcggcgcgcccctcgccaaggtggtcttccgggatccgtatcggtttaagaagcggacggagctgttcattgccgccgagggcattcacacgggccagtttgtgtattgcggcaagaaggcccagctcaacattggcaatgtgctccctgtgggcaccatgcctgagggtacaatcgtgtgccaccgttatctccaagaaggttatctcctcagccaacagagctgtggttggtgtggtggctggaggtggccgaattgacaaacccatcttgaaggctg

SEQ ID NO: 133593 - DNA, 376 bp, Homo sapiens
gctggaggtggccgaattgacaaacccatcttgaaggctggccgggcgtaccacaaatataaggcaaagaggaactgctggccacgagtacggggtgtggccatgaatcctgtggagcatccttttggaggtggcaaccaccagcacatcggcaagccctccaccatccgcagagatgcccctgctggccgcaaagtgggtctcattgcggcaagaaggcccagctcaacattggcaatgtgctccctgtgggcaccatgcctgagggtacaatcgtgtgctgcctggaggagaagcctggagaccgtggcaagcttggcccggcatcagggaactatgccacccgtatcttccacgtcgacgccggcgggaattc

SEQ ID NO: 133594 - DNA, 505 bp, Homo sapiens
  misc_feature (1)...(505): n = a,t,c or g
gcgcgagcctacgggtccaagaaggttatctcctcaaccaacatagctgtggttggtgtggtggctgtaggtggccgaattgacaaacccatcttgaaggctggtcgggcgtaccacttatataacgtgaacaggaactgctgtccaccagaacggggtgtggccatgaatcctgtggagcatccttttggaggtggcaaccaccaacacatcgccgagccctgcaccatccgcagagatgcccctgctggccgcaaagtgggtctcattgctgcccgccggactggacgtctccggggaaccaagactgtgcaggagaaagagaactagtgctgagggcctcaataaagtttgtgtttatgccacctgnnnnnnnnnnnnnnnnnnnnnnnnnnngggggggagatttaaaaaaatccttaggggggcaaaatttatcggttgtagaaacaaaaanggggggggcgggggattattatttttttggggggggtttttttggggg

SEQ ID NO: 133595 - DNA, 427 bp, Homo sapiens
cggacgcgtgggtgaggagttaacgtcctaagccgatatgggatttctcgcaggcagaagcttcaggtggggacatccgcgtgaccagaccagtggccaccggtgggtgccgagagagttgtaccgggaggctggatgttgaatgctgtgctcgcaacttcgcgggttgcctagagcgagggggttcgcattgtttcttactgtgctgacggcctgatgctgcttccccttgcagcccagctcaacattggcaatgtgctccctgtgggcaccatgcctgagggtacaatcgtgtgctgcctggaggagaagcctggagaccgtggcaagctggcccgggcatcagggaactatgccaccgttatctcccacaaccctgagaccaagaagacccgtgtgaagctgccctccggctccaagaaagtta

SEQ ID NO: 133596 - DNA, 2262 bp, Homo sapiens
tcaggctttcttccggcacttcctgaggccacgcacgcgtcctttgggcccttcaccaccttcctgcacccagttccttgtggcccctgcttctctgggtcgagggccgccgctgctcacctcttcctggaacagtcctaaagccgctgaggcagaaaaggcccagctccctccaccccgacgggagggatccgcgctgaggtccgatccgaacatgttccagacccccctgcaggactggacccggtcaccccgcggcctctgcacgacgctcacccgggctggcctcctcttcttcccagtcctcactggccgagcctgcgcctcccaataagccaagaatacaggaagcctcacctcagggtctgcttctggggaccccaccccgacgcgaatggccggcattgcaagttcgctccgggactgcgagcgcttctgggcacggccccgccacacgccgccaccattgcgcccactgccacttctaggggctcctccgacggtcagggatgtgctgaggcaacgccgggcgggcagcaggggcgagtccgcgcttccctggagccgaaaggagcactgcggccggtgaccccgggcggaaacctgttgggagcgcaccggaagtagccgtccacagaggtctgcgcacctgctctcggtctgctctgagacacccggatgaccgcccactcggtggttcaacggtccccgacaggagctccgggtccgggcaaggaaggggccagttgggctcttagtgtgaagcgactgtgggacatcctggtgaagacaggacctaaagccggcagatgctgctgtgatgtagatgcaaattggggcgtcttgatggtcagtgatgccactgagctcgcgaggtcgcccagagacagtgttgagtgagaagcggccctggtgcccctggggctgttgaagagggaagaggcgccctgggcatggagaccgctggggcggcctgtgaaggttggtggctccatttttgaagtcagtgagaccacgaaccaagtgtgatggctgactgaagctttttccacactcttgacattcaaaaagtttctctcctgtatgaattctctgatattgcatgggatttgctttcggattaaaggctttcccgcactcaatacatttatagggcttctctccagtatgtatcagttggtgtttaataaggtttgaattcccactaaaggctttgtcacattcatcccacctatagggcttttctccagtatgaattctctgatgtttaacaagctttgatgtctccctaaagcccttaccacattcactgtgcagggaggccctggcaaagcaatgacccatggcattttcccctgctcctgctgggagataaccctgagtgtggacactgaaaaacctgtctatcaagaagataatggtcagtgctagaatatctgagctgcccctggctgagggccacagaggcatgtgatgcttatccagagctggtagggtgcagtggttctcgagcatcacatcctggtagagtgctctctgagggggtcccaggtgctgcccctcctcctgtgtgaggtacatggccacctcctcaaacatcactgtgccccaagccagcagcggcaacacgctggggtccccttccatgctgtggaagctttgttcttttgctcttcgcactaaatcttgctggtgctcactctttgggtccgcgccgcctttatgagctgtgacactcaccgagaaggtctgcagcttcactccgcgaaggtctgcagcttcactcctgaagccaggaagaccacgaacccaccggagggaacgaacaactccagatgcactgcctttaagaactgtaatactaaccacgaaggtctgcagcttcactccgtctttaagagctgtaacactaaccacgaaggtctgcagtttcactccgcgagggtccgcggcttcgttcttgaagtcagcaagaccaagaacccaccaatttgggccggcggcggcggcggaagaccccgacagcacgggctgccgcggcagcagcggcggagcagcagagaggccggggagcggcggctggctcacgcgcgtcgcgcgggccgggatgagggactgtggcggcgcggcccgcgcgcagccggccggtgaaagcgcgggcaacgggcggtgggcggcgcgggccaagaagatggcggaggggccggcgctgcggtccccgtggtcctggcccagcctcggcggaggctccaggcccggcat

SEQ ID NO: 133597 - DNA, 814 bp, Homo sapiens
  misc_feature (1)...(814): n = a,t,c or g
atcgagaccactagtccagngncgnggaattcgngaacaggtaggtcatccttgcggccttgcggcatgggcagtatccgccgccatcctcttccgtgaggcgcgctgagacccggaccggccctcctgagaggatgccggtgcgggcgcccgcggagagggacccgtcgccatgggccgtgtgatccgtggacagaggaagggcgccgggtctgtgttccgcgcgcacgtgaagcaccgtaaaggcgctgcgcgcctgcgcgccgtggatttcgctgagcggcacggctacatcaagggcatcgtcaaggacatcatccacgacccgggccgcggcgcgcccctcgccaaggtggtcttccgggatccgtatcggtttaagaagcggacggagctgttcattgccgccgagggcattcacacgggccagtttgtgtattgcggcaagaaggcccagctcaacattggcaatgtgctccctgtgggcaccatgcctgagggtacaatcgtgtgctgcctggaggagaagcctggagaccgtggcaagctggcccgggcatcagggaactatgccacccgttatctcccacaaccctgagaccaagaagacccgtgtgaagctgccctccggctccaagaaggttatctcctcagccaacagagctgtggttggtgagtatcaggcagcagttgaatgctgagggctgtgggtgaacatgctgtgagtgccggtggacagccagtggctagacttggtccctggaattcgattacctgttgttctaaaacttgggttctgtaagtttgagctcat

SEQ ID NO: 133598 - DNA, 1950 bp, Homo sapiens
  misc_feature (1)...(1950): n = a,t,c or g
atggtgcgtctggagttgttcattccttccggtgggtttgtggtctcgctggcctcaggagtgaagctgcagacctttgtggttagtgttacagctcttaaaggcagtgcatctggagttgttcgttcctgccggtgggttcgtggtcttcctggcttcaggagtgaaactgcagaccttcgtggagtgaagctgcagaccttcgtggttagtattacagttcttaaaggcagtgcatctggagttgttcgttccctccggtgggttcgtggtcttcctggcttcaggagtgaagctgcagaccttcgcggagtgaagctgcagaccttctcggtgagtgtcacagctcataaaggcggcgcggacccaaagagtgagcaccagcaagatttagtgcgaagagcaaaagaacaaagcttccacagcatggaaggggaccccagcgtgttgccgctgctggcttggagctgccgtgtgactgagaggagcctcttcaggactggagatagtcccatggtaccccggcagtggcattcaaagagacaacagacccctcttgctgtctgccatcacttagcaggagcctcatctctgcgcaaccgtccggctcggcggagcgggtctcgggggcccggccgcacgcccccgaccacagccagcatggaccggggcgcagggcccttcgccccgataagggttcggaacccaaggcgagcggaggcgacagtgccggctgcgggtcactcaaccacttggcgcctcctcggccactcagaaaacacctgccctcccggagaccccggtgaaagccgagcaatcctgcaccctccttccgagcccacgcacaccaggacaccttcagccgcgtctcctggacccgtcgccatgggccgtgttgatccgtggacatgaggaagggcgccgggtctgttgtccggcgcgccacgttaaggcacggtaaagggcagtgcggcgcctgctgcgcagatggatttcgcctgagcggcacggctacatcaagggtcatcgtcaaggacatcatccaccgcccccggggncggcgggcgccgccccttcgccaaaggtggttcttccgggattcgtaatcggttttaggaacgggacggagctgtttcattgccgcccgaggggcatttcacaccgggcccagttttgtgtattgccggcaagaaaggcccagcttcaacattgggcaatggtgctcccctgtggggcaccattgcctggagggttacaattcgtgttgcttgccttggaaggaagaaaccttggagacctgtggcaaagctgggcccggggcattcaagggaaactaatgccaaccggttaatcttcccacaacccctgagacccaaagaaagaccccgtgtgaaagctgcccttccggcttcccaagaaaggtttatctcccttcagcccaacaagagctgttggtttgggtgtggtggcttggaggttggccgaatttgacaaaacccccatctgaaggcctgcccggggcgtacccacaaatataaaggcaaagagggaacttgctggcccacgagtaacgggggttgttggccatgaaaccagtcgtgtggaccatcctttttggaggggggcaaccaccaagcacaatcggcaaagccctccaaccatcaagcagagatgccccctgctggcccgcaaaagtgggtctcatttgcttgccccgcccggacttggacggtttccgggggaaccaaagacttgttgcaggaagaaaagagaactagtgctgaaggggcctcaataaaagtttgggttttatgccnnnnnnnnnnnnnnnnncttgggggggggcccgggcccccatttggccttataggggggcgtgttacaacttaggggccgtagtttacaaacgcgggaactgggagacaggccnnctgttgcgagtctacattt

SEQ ID NO: 133599 - DNA, 816 bp, Homo sapiens
atgggttccgtgacctgtgaagtggagatgctatggacgtacatttcctggtacacagtgatggatgaatgtgttgatgatttagcatatgtggaatgccagaggctcagtggagcagctaaaaaccagaaatcaatacaggagtttttcaacaaagaacataatgtcttttccttcaggttagagcctccacctggaaaacgtgaatgccgagttgggcagtatgtggtcgacctgacttcttttgagcagttggcactacccgtcttgaggaatgccagtcccaagtgctcagagcatgaggaggacgaggagtactgggctctccgtctcactggactgactgtcagccaggaggtgttgtttcagtcccaagatagcttggaaaaccccatggctaccattcaagcgctcttcagtcgggtgaccatgtggaacttgctgctgtttggcgaagggctgcagttttgctgcctaacttctgagagacactccttattcactttcatgactttccatacttgctgtcccaggtgggccgactgcagcagtggcccagggcaaagagtgtgcgtcatcgatgagattgggaagatggagctcttcagtcagcttttcattcaagctgttcgtcagacgctgtctaccccagggactataatccttggcacaatcccagttcctaaaggaaagccactggctcttgtagaagaaatcagaaacagaaaggatgtgaaggtgtttaatgtcaccaaggaaaacagaaaccaccttctgccagatatcgtgacgtgcgtgcagagcagcaggaagtga

SEQ ID NO: 133600 - DNA, 569 bp, Homo sapiens
ttcgaggaaatctgtctgggctccaaacccactttgactttttgagctgtcacttggcagaaactgatgctgggactcggtgattcctgtcctgtttctgagtgctcctgaagagctgggcctcctgcctgggtaacaaaacatacctcaccctctcccagccttccaggcttttcttttagagagttacctagcacaagattgaagaagaggaaaggagctctgaagcctgttctctcacttcttcccacaggtcaccaaggaaaacagaaaccaccttctgccagatatcgtgacgtgcgtgcagagcagcaggaatgtgaatgacacggtgcattccctgccttcccgtgaaggagtgcccagttcaagaggagcctgatggagccctgcctgtcgaggctgtatgcctatggggttatggaaccttgtgggcttttctagagaaaactcaacagctgtttcccataaaatgtttaaaagatcaaattagccttaatgctggattgtctgtacaagattaactatccattgtggcttatctatgcttaaagatttcttgtttattt

SEQ ID NO: 133601 - DNA, 1584 bp, Homo sapiens
  misc_feature (1)...(1584): n = a,t,c or g
cgaaaggagcccgggggatttatccgaacgctganttagaaccatcggaaaaccccggncgacccacgcgtccggtcgcgaccctggtccggacctgacctgaattgcgaccccaacctggactgctcccctgaccgcaacccctacccccgcccaccagtatggcccggcacgtgttcctaacggggcccccaggagttggaaaaacaacattgatccataaagccagtgaggttttaaaatcctctggtgtgcctgttgatggattttataccgaagaagtcagacagggagggagaagaataggattcgatgtcgtcacggttgtccggcacccggggggccttttatcgagagttgggttagagcctccacctgggaaaacgtgaatgccgagttgggcagttatgtggtcgacctgacttctttttggagcagttgggcactaacccgtcttgaaggaatgtgagccgactgccagcagtgggcccagggccaaagagtgtgcgtcatcgatgaagaattgggaaagatggaagctctttcagtcaagcttttcattcaaagctgttcgtcagacgctgtcttaccccagggacatataatccttgggcacaaatcccaagttcctaaaggaaagccactggctcttgtagaagaaatcagaaacagaaaggatgtgaaggtgtttaatgtcacccaaggaaaacagaaaccaccttcttgccagatattcgtgacggtgcggtgcagagcagcaaggaagtgaagaccacgtgcattcctgcccttccgtgaaggagtgcccagttcaaagaggagcctgatggagccctgcctgtcgaggctgtatgcctatggggttatggaaccttgtgggcttttctagagaaaactcaacagctgtttcccataaaatgtttaaaagatcaaattagccttaatgctggattgtctgtacaagattaactatccattgtggcttatctatgcttaaagatttcttgtttatttccttttgcgagtcatgccacatgatttggggtaaactgtgagatgagaaatgggttttccagagtattagatggaattcactcccgttgaagtttataaatgtgttcaggggaagcgggaggaaagagttcactgcctaatcagttttgcatgtcatgaaaattaaattcctctccaggtgccagcttcagcctcatgcaacttaaagtgataacagttatttgattttttaaaaaatattattccaaaagaaaaccattttaggtcatctaccccaacatctgtttgcctactgcctaataaattttaaaattaaatctgatggttacagacaggaaaaaaaaaaaaaaaaaaaaaccaggatttgaaggagctattttttttwaatgttgcaactagcaactcatcttcggaagacacagccaggggaatmaagtagaagtgaaaggtttataaatccatttgtaagcatttatcccatatattttaaattcaaggaaaattgtmtttatctttgaattttgtattcaatactttatgtactatgtgactcatgcttctggataaata

SEQ ID NO: 133602 - DNA, 596 bp, Homo sapiens
  misc_feature (1)...(596): n = a,t,c or g
ccgctggnctnaggntcntctgtcgagcagcggacncggtctctgttccgcagatggggtttgttaaagttgttaagaataaggcctactttaagagataccaagtgaaatttagaagacgacgagagggtaaaactgattattatgctcggaaacgcttggtgatacaagataaaaataaatacaacacacccaaatacaggatgatagttccgtgtgacaaacagagatatcatttgtcagattgcttatgccccgtatagagggggatatgatagtctgcgcacgtaatgcacaccgaactgccaaaatatggtgtgaaggttggcctgacaaattatgctgcagcatattgtactggcctgctgctggccccgcagaatggaggagatgtataagaaagctcatgctgccatacgagagaatccagtctatgaaaagaagccccaagaaagaagttnaaaagaagangtggaccgtccccaaatgtcccttgctcagaagaaggatcggggtagctccaaaagaaaggcaagcntcctcagagctcaggagcgggctgctgagagcctaacccagccantttctatgatttt

SEQ ID NO: 133603 - DNA, 497 bp, Homo sapiens
  misc_feature (1)...(497): n = a,t,c or g
ccggtctctgttccgcaggatggggtttgttaaagttgttaagaataaggcctactttaagagataccaagtgaaatttagaagacgacgagagggtaaaactgattattatgctcggaaacgcttggtgatccaagataaaaataaatataccacccccaaatacaggatgatagttcgtgtgacaaacagagatatcatttgtcagattgcttatgcccgtatagagggggatatgatagtctgcgcagcgtatgcactcgaactgccaaaatatggtgtgaaggttggcctgacaaattatgctgcagcatattgtactggcctgctgctggcccgcaggcttctcaataggttcggcatggccaagatctataagggccaagtggaggtgtctgctaatgaatgcaataacgaaatcgttcatggtcagccacgtgccatctcatgatgtttgcatcagagccanttgnnagctagtcantacgagagcagtc

SEQ ID NO: 133604 - DNA, 3048 bp, Homo sapiens
tgcaggcccagcggcgctagggggtgcaggtctctgtcgagcagcggacgccggtctctgttccgcaggatggggtttgttaaagttgttaagaataaggcctactttaagagataccaagtgaaatttagaagaccgacgagagggtaaaacgtgattattatgctcggaaacgcgttggtgatacaagataaaaataaatacaacacacccaaataccaggatgatagttctgtgtgacaaacagagattatcatttgtcagattgccttatgcccccgtatagagggggtatatgatagtcttgcgcagcgtattgcacaccgaacttgccaaaaatatgggtgtgaagggttggccttgacaaatttatgctgcagcatatttgtacttggccctgcttgcctggcccgcaggctttctcaataggtttgggcatgggacaagatctatgaaaggccaagttggagttgactggtgattgaataccatgttgaaaagcattgatggtcagccagggtgccttccacctgcctattttggatgcaggcccttgccagaacctacccactgggcaataaagttttttggtgcccctgaaagggagctgatggatgggaggcttgtctatcccttcacaggtacccaaccgattcccctggttatgattcttgaaagccaaggaatttaaatgcagaaagtacatccggaaagcacatcatggggccaaaatgtttgcaaaattacatggcgctactttattggaagaagatgaagatgcttacaaagaaacagttctctcaatacataaagaacagggggacaagactggagggcagagtggaggagattcaggtgtccaggcacctgctgccaggtgggaagtgtgatgaggcctctccccacactccctgctttgtggaggaggctgagcgcagcggccctggcccgagagagcccttggggtgcacgtgccccagcagaggctgcactctggtgctagaggccaccgaaggtcccagggctctgccggtccctatcatggatgcagggcctatgaaccccgaggaggccgaccctctctgcgggcagtgggccttcttccgaaatgtctcagccctacccggcctttgcactggagcccacacctgctcccggggctggggctgcgtctgcctgtgcctgctatcccgggagcagcgtgcgggctcggcaaagactgtgctccctgccctcaaccacggagaggccctcgctgtctggagcaggacgggagaaaggggcgctacagaccatggcttgggggatctagaggaggaaacagatgttacagggggccaccacttcgtctatggctggccagggaaggtgcctcatcttcctgcccacagcagggccaactggggagtctgcatgaagctggctgcggggaacagcgtcttcctcatggctgatggtgctctggggataaaaccagacgacccacctgacacgcggagttgcagggggtcaggtgacacggcggctgagctccgagcccagatgacaccctcacagccgagctctgccgtgcccgtccttcgtgcacccagcccatcccttcggctgcgtgtgaccccaggacccgggttccggttttcaggtgttatttctgacagcgccgagtgccgctgtgcagggagacgctcggctgcgcgcggtccgggcacagttctcggggagtccagaggagggagcacgagctccagggatgagcatcggggccggactcagccgtccgtggctatggctggagcggctggtgtgaggctgtgggaccggccagggccccatgagtactggggagcacaggtgtggggcactgtgtccggctgtggtgacagatggagcccccgacacaggtttgtaactcaaggcactgacatccaacctgaagggcaagagcagggcagcgaaagtgctgcagacggaggccgcttcaagcctggacacctgcgggagagaaacccccaggagccaggatcaccgaacacccaaagacgtcccgctctgaaaagaggctgccgcctcaataaacaggaggagtcacagctgagaaaccagagaatttacactggactcggtgtcacggggggcctggagatgattgacagcatccaggaggatgtgcctgggtttcaagcaaatgctgcactgttttcgacaaaggacgtgagcacctgcggatgcccctgccatcgtcctagatctggccacttggggctgctgggccccacctgcctgggcttcctcttccctgggccggatgctcctctgaacctgcccagaacaagggttctgtgctggggctggtctggcgctggggagaaagagccggggggcagggcttggcaatgggaagcatcacaaagcagcgtggccccacccctggagcgctcccctcccctctcctgtcctgagatgctgctgcagactcacgtcttcctccccaaaggtcctgggagcccagcgagggagcccagagtgtctaccattcacagagagcctttccagagcagcaggtgcgccgaggacggggactcaggcatgcaccaggtttgcagcaccagcagcagcgagggaggaaatcagaggcttctgggaggaggaagaaacgaaaacattttcatgggtccccaaagcatcctggacgctgctgatgccctgtgcccagtggggagtcgagtctggctttatcgatgtgtagccgacatgcaggagctgctcaggactgagcagtgcgcactttgccttcaaatgcgggagcggcaagcagggtatctgcctctcggtgtccccgattcccaccagcccttgatatggcccgtgtcggagttctgggcattcgaaaagggcgtcctgtccaccatgccccgaaaatctcaggctgcctctccatcttctcccatccagcaggagctcagcgatgcctgcccgtcttctcccatccagcaggagctcagcgatgcctgcccgtctcctcccatccagcagaagttcagcgattga

SEQ ID NO: 133605 - DNA, 396 bp, Homo sapiens
  misc_feature (1)...(396): n = a,t,c or g
gcaggatggggtttgttaaagttgttaagaataaggcctactttaagagataccaagtgaaatttagaagacgacgagagggtaaaactgattatnatgctcggaaacgcttggtgatacaagataaaaataaatacaacacacccaaatacaggatgatngttcgtgtgacaacagcgtatgcacacgaactgccaaaatatggtgtgaaggttggcctgacaaattatgctgcagcatattgtactggcctgctgctggcccgcaggcttctcaataggtttggcatggacaagatctatgaaggccaagtggaggtgactggtgatgaatacaatgtggaaagcattgatggtcagccaggtgccttcacctgctatttggatgcaggccttg

SEQ ID NO: 133606 - DNA, 497 bp, Homo sapiens; identical to SEQ ID NO: 133603
  misc_feature (1)...(497): n = a,t,c or g

SEQ ID NO: 133607 - DNA, 1240 bp, Homo sapiens
cgggccccctttgcattgcactcgcgctgcaggaattcggcacgaggcgccgctgggccttgcaggtctctgtcgagcagcggacgccggtctctgttccgcaggatgggggtttgttaaagttgttaagaataaggcctacctttaagagatcaccaggtgaaattttagaagacgcccgaaagggtaaaacgtgattattatgctcggaaacgcgttggtgatacaagataaaaataaatacaacacacccaaataccaggatgatagttccgtgtgacaaacagagatatcaatttgtccagattgctttatgcccccgtatagaggggggatatggatagtcttgcgcagcggtaattgcacaccgaacttgccaaaatattggttgttgaaggtttggccttgacaaatttattgcctgcagcattatttgtacctgggcctgcctgcctggccccgcaggctttcctccaataggttttggcaatggacaaagatctattggaagggccaagttggagttgactgggtgatgaatacaatgtgggaaagcattgacggtcagcccaggtgcctttacctgctatttgggatgcagaccttgccagaactaccactggcaataaagtgtttgggtgccccggagggagctgtggatggaggtttgtctaaccctcacagtagcaaacgattccttggtttgtctatccccttcacagtacccaaaccgattcccctgggtttatggattctgaaaagcaaaggaattttaatgccagaagtacatccggaaagcacatcatggggcagaaattgtttgcaagattacattgcgctactttaatgggaaagaaagatgaaagatgcttacaagaaaccagttctctcaatacataaagaaacagcgtaacttccagacatgatgggaggagatgtataaggaaagctcatgctgctatacgagaggaatccagttctatggaaaagaaggcccaaggaaagaagtttaaaaagaagaggttggaaccgttcccaaaatgtccccttgctcaggaagaaggatcgggtagctccaaaggaaggcaagcttcctccagagctccaggagcgggctgctggagagcttaaccccagccattttcccatgattttttcagatatcgctaactaaacttatgaacagcaactaaaaaaaaaaaaaaaaagtcgacgcggccgcaatttagtagtagtaggc

SEQ ID NO: 133608 - DNA, 1244 bp, Homo sapiens
  misc_feature (1)...(1244): n = a,t,c or g
ccttgacctcccgcggcgtgggaagctgcgcggtgatgctgttgctcgtccgggccggggcgcgggcctggctgcggcctaccggcagccagggcctgagcttccctggcggaagaggcagcgcgtgcgaccgagaacccggagcaggtggcgagcgagggtctcccggagcccgtgctgcgcaaagtcgagctcccggtacccactcatcgactgcccagtgcacgcctggatcgagtccttgcggggcttcgagcacgagcgcgtgtgcctggtcgacctgcaccccgatgttttcgccaacgcgcccaggctggacatactgcaccaggatgctatgttgcagaagaacttctagagaattagctatgccaagaccaagacgagagccgaggtgcggcggcggtggcggaaagcctttggccgcagaaaggcatttgggcgggcccggcatggcagcatccgctctccgctctggcgaggaggaggtgttgcccatggcccccggggccccacaagttactactacatgctgcccatgaaggtgcgggcgctgggtctcaaagtggcactgaccgtcaagctggcccaggacgacctgcacatcatggactccctatagcttgcccacccggagacccacagttaccttgaccagagctggcgcacttaccgccgctggggggactccgtactcctcgtggacttaacacacgaggagatgccacagagcattcggggaagccacctctaggcttaagaccttcaacttgatccacggctgttggcctaaatgtgcacagcatgctcaagcaccagacgctggtcctgacgctgcccaccgtctgccttccttggaggacaagctgctctggcaggactcacgtttacagacccccctctaccccttcagccttgccctacagcgactttcccccgacccctaccccacgctacccaggggcccagcggccaccccgtaccactgttgaagtgaagcacctcttctgagccagggncgagcccctggcccaacttgggagcctcaggcccacgcccaccccttcgaggaaggtgtcacctggaccccttcattccacggaggaagctgaggccacagggagcggccatcgccattgggaaggggcgactcctacggaaacgccagacgggcttctgcatccattccctctttttgtttttaaaataaattgtatttttgaatcaaggaggaaaaaaaaaaa

SEQ ID NO: 133609 - DNA, 458 bp, Homo sapiens
  misc_feature (1)...(458): n = a,t,c or g
tttgactgcctacatcaggcgngcaannngacgacctacgcacacgagaacatgcctctcgcaaaggatctccttcatccctcttcagaagaggagaagaggaaacacaagaagaaacgcctggtgcagagccccaattcctacttcatggatgtgaaangnnnaggatgctataaaatcaccacggtctttagccatgcacaaacggtagttttgtgtgttggctgctccactgtcctctgccagcctacaggaggaaaagcaaggcttacagaaggatgttccttcaggaggaagcagcactaaaagcactctgagtcaagatgagtgggaaaccatctcaataaacacattttggatgnnnaaaannganntnattanantataaaaaanngggcttttaatgtgtagggcgtgaaaacccctgggtcatccggtccggccctcttgtgggcccc

SEQ ID NO: 133610 - DNA, 802 bp, Homo sapiens
tttcgtgacgacctacgcacacgagaacatgcctttgattgctttggtccaggtttcggcggaaatcgggctgttctgtccgaactctcccctcacgctgatttcggatcgaagagggtcctcatttaccctctgcactttttaggacattaactccagggaccgcagcggcccacgggccaccctcatagacgggagcggagaggagataagatggcggcccagctgcgcatacaccaggggcggcgaggggcgagctctccccggtgggtgacagtgggggctattttcgaccatcccatttacgctgttggattctaaatctctgcatttctgtccctcttagctccgcaaaggatctccttcatccctcttcagaagaggaggagaaggaaccccatgaagaaccgcctggtgcagagccccaattcctacttcatggatgtgaaatgcccaggtgaggagacggtttgctgtattggggaaagcactggacctcaacagttggaaaatgttgtagtgttagctgtctcgtatccttgaagctgtgcagcagcttcagtttcttcgcctgtggaaaatattttccctgatactcttaaaatttgaatgtatgagactggcaaagttttgcatcttaggaggagtgattcatttcaccgtgatctctcatcacatttcacatacaacccctacgtttttttgtgttgggaaacaatgtaatggatgatgagttgggcataagtgcaggaaagacgggtgtaatagaggaaaaaaatgttatctgcttttctttcaggag

SEQ ID NO: 133611 - DNA, 801 bp, Homo sapiens
tctagtccccgtggtgtaattcgtgacgacctacgcacacgagaacatgcctgtgagttctttgggccatgtttcggcggagatctcgctggtctgtccgaactctcccctcacgctgatttcggatcgtagagggtcctcatttaccctctgcacttcttaggacattaactccagggaccgcagcggcccacgggccacccgcatagacgggagcggagagggagataagatggcggcccagctgcgcagacaccaggggcggcgaggggcgagctctccccgcttcgcaaaggatcatgcttcatccctctccagaagagggagaagaggaaacacaagaagaaacgcctgggtgcagagccccaattccttatttcatgggtgttgaaatgcccagggttgttttaaattcaccacggtcttttaggccatggcacaaacggtagttttgtgtgttggttggctgctccactgttcctctgccagcctacaggagaaaaagcaaggcttacagaaggatgttccttcaggaggaagcacgcactaaaagcaactctgagtcaagatgagtgggaaaccattcttcaataaacacattttggataccccaagcaaacaaagcaaaaaaattttttttaaaaaaaatttggcgggggggttttatattaaaggggggttaaaaaacctttaggagaatcgccgggggttttttttaacacccaggggtgtggcccacccccgcgggtatatttgttttgggggggggcctctctccctcttaaaataaagggggggagg

SEQ ID NO: 133612 - DNA, 1355 bp, Homo sapiens
  misc_feature (1)...(1355): n = a,t,c or g
ttttcttttgacttgtttgtggatggaatgtttacagacatttctaattactgctttaattaaataaattggatcaaaggccgttcgaggtatttttgttttgccgtttgtcgctcagaattggcattttgagaggtgattgatactgctaacaattttctagtactctagtttgtttcaagaagagattttgggtagacgtaatcttcaccctttcaaattagataacaatacgaacattattttttatactgatcataagttccagatttgccgagggggtgatcgtggcaggaaaagttgtatgtttggtagttgcatatggcgacctgtgagcttatcaatgctggtaggtaagtaaggaggtcgctgtaccatggctcgtacaaaagcagactggcccgcaaatcggaccggtggtaaagcacccaaggaagccaactggcttacaaaaagcccgcttcgcaagagtgcggccctctacttggaggggtngaagaaacctcatcgttacagggcctggtactgtggcgcccccgtgaaatttagacggttatcagaagtccactcgaacttctgattcgcaaacttcccttccaagccgtctggtgcgagaaattgctcaaggacttttaaaacaggattctcgcttccaggagcgcagctatcgggtgctttgcaggaaggcaagtgagggcctatctggtttggccttttttgaaagacaccaacctgtgtgcttatccatgccaaaccgtgtaacaatttatgccaaaaagacattccagctcagcacgcccgcataccgtggagaaccgtgctttaaggatccactcatggatggggaaacatttcattctcaaaaaaaaaaaaaaaaaatttctcttcttcctgttattggtagttctgaacgttagatatttttttttccatggggtcaaaaggtacctaagtatatgattgcgagtggaaaaataggggacagaaatacaggtattggcagtttttccattttcatttgtgtgtgaatttttaatataaatgcggagacgtaaagcattaatgcaagttaaaatgtttcagtgaacaagtttcagcggttcaactttataataattataaataaacctgttaaacttttctggacaatgccagcatttgggatttttttaaaacaagtaaatttcttattgatggcaactaaatggtgtttgtagcatttttatcatacagtagattccatccattcactatacttttctaactgagttgtcctacatgcaagtacatgtttttaatgttgtctgtcttctgtgctgttcctgtaagtttgctattaaaatacattaaactat

SEQ ID NO: 133613 - DNA, 1609 bp, Homo sapiens
atgatgacagggctgcagacagcacctgccatcaagaaaagtcccaaaagcagctttagagatgagaagaacacaggccttaacaagccaggacctggaagccggcgagagagacccctgtctgcaacccgcaaaactctttgcgaggctgagtacccagaggaagatgcctctgctgtgctccaagccatccaggtggagaacgcagccctgcagagggcgctcctcagcagaaaggccgagcagccagccagcccactgcagcatggagtgaatggctttgttccaacatcacatcatgtgatcacatccttccaggatgcagaaggaccaccagcaaaaccatggaccagtctgctggaggagaaggaagagacccttgagctgcttcccatcaccacggcgactactactcaggagccggccggggcagcaggaggagccagggccatcaaccaggccatggacagaattgggcttctgggaagcagacaacagcagaagcttctgaaagtcctccaggccgtcgaaagtgactctgcccatctcggcagggtggtttcaccaaccaaggagcaagtatcagacacagaggacaaacagagaatgagggcagacgagatcaaagatgccatctacgtgaccatggagatcctgtccaactggggcaactcgtggtgggtgggtctcacagaagtcgagttctttgacttgaatgacacaaagctttatgtgtcgccccacgatgtggatatccggaacacagccacgcctggggagctgggccgcctcgtcaacaggaacttagctctgcctgactctactgaggtggccatgtgccccactaagacggtcacattgctgggggcccttgcagctagggatggccacgagatccagcccccaaaagccagccaaccatgtcctctggtagtgaaccagagaaactgccacctgctccaaggccacagcactactgctcacctcgcagaggtgtcaggacccaggtttgcagtcggcattaaggcactgaatcagcaagcttttactgagcgccgactgcatacaagcctgtgcccagtgcccgctgctctcactgtcccctcacctgaaagcctcccccagccacagatctttccggggctggctccagccacccacactctgtattctaaagcgtgggctggggccacagtctccagacctggtgccatcctcggcgctggactttactgggggcttgtccgtgaaactgcgtcttaaggcttcttcagctttctacgaaacagagttcttcgtccataatctgcaccagagacgagggaaggagacttgccagttcctctcttcatccatgcgtgtccacatcagcccctccccgtcctggggaatcttcaagcccaaggagtcttctctatcatcccctgtgaaaattcatctctccttcacctactccaaaatgaccaatgatctcttagaaggtgccttagaggaaggtgccttatttggaattctcatagccccttacattccagggcgcactctcaattactttcgaatagcagcagttttaaaggccaacctaacattaggcaagagcctgggttga

SEQ ID NO: 133614 - DNA, 1853 bp, Homo sapiens
agactgagctgcagcagctgggccaaaaaactgcagacggttcaccaggtctaaagagagccttaatatttgcccttaactttcacagttccccgccagggaaggacatggcagctgtgcagaggaccctgatggctttaggcagcgttgcagtcaccaaggatgatggctgctatcggggagagccatcctggtttcacaggaaagcccagcagaatcggagaggcttttccgaggagcagcttcgccagggacagaacgtaataggcctgcagatgggcagcaacaagggagcctcccaggcgggcatgacagggctgtcagatcccacaccatggactgcacacctcgggatgtatgttcaggggaatgccaagtttgtctccccggtgagaagaattgtggtccacgagtactataacagtcagacttttgattatgatattgctttgctacagctcagtattgcctggcctgagaccctgaaacagctcattcagccaatatgcattcctcccactggtcagagagttcgcagtggggagaagtgctgggtaactggctgggggcgaagacacgaagcagataataaaggctccctcgttctgcagcaagcggaggtagagctcattgatcaaacgctctgtgtttccacctacgggatcatcacttctcggatgctctgtgcaggcataatgtcaggcaagagagatgcctgcaaaaagaggaaactgggcacagagaggcccggcacccaggcagcccctaaacggagatggtctgcatctgcaggcgcggggaaaggcatagcaggcagcgccctgaacaaatcagaaaaacagccttcggctctggagcccactccggcacggcctcaggtgctctaccccgcgggatccagggagtggccgccactcacagttgcccctcctgtccgctccggtccgctcccgccgcccgaggtccgcgacgccccgcccagtgggtggagtgtgaggcggggaggtcgctcgactcgccggcgctgtggcctcccgcggagccgctcagactttccctgccggcacatggacctggcccaaccctcacagccagtagacgagctggagctctcggtgctcgagcggcagccagaagagaacacgcctctcaatggtgccgacaaggtcttcccttctttggacgaggaggtccccccggccgaggatgctgacctgttggatgttgaaagcaaacactttgaagacctggagttccagcagcttgaacatgagagccgtctagatgaagaaaaggagaacttgactcaacagctcctgcgtgaagttgctgaatatcaacggaacatcgtttctagaaaggaaaaaatttctgcattgaaaaagcaagccaatcacattgttcagcaggctcagagagagcaagatcattttgtgaaagaaaagaataatttaataatgatgttgcaaagagaaaaggagaatctttgtaatttggaaaagaaatactccagcctctctggggggaaagggtttcccgttaaccccaatactttaaaagaggctaacaaggaaagcccctggagctcctgtaataagaatgtggttggaagatgcaaactgtggatgatcatcacctccattttcctaggtgtcattacagtgatcatcataggcttatgtcttgctgcagcctggcttagaggtagatcaaatcgaatggtgggggggaggaggatgacttcagtgaataattggcttagtcttcgtaacctggctgcctgcctctccgtgctctaccagctcatgcttacgcgatcccacctaaaagaagacagtgcacctctgcactaa

SEQ ID NO: 133615 - DNA, 1655 bp, Homo sapiens
tttcgtgttggtagaacggaccctcccacaggccctcatccccttgtgcagctgctggcctcgtagacaatcggctgtctccccagaagagggaaagaattgtgcagatgagaaagaggctctcagcgggagggaggcaggcgggcttgattgacacaggagagggctggctttttggagggctcttagcaacggccctggttgagccccttcagccatgagaaaatcaaatcaatgtgccattcttccaggcgcgaggcagcagcggctgcagttcaacatgaaaggaggcttcctccctgcctgctaattacctgctcttcccgatctcatcgtttctgcctttgcaaagagctactgacaagggggaagaaacgtccgccacccatcccccttgctggcctggggttcagacttgattgtgaaaccccattggcttcattggctccttgatttaaaccacgcccggctttctgccctctttgctgctgctggggccaggttgcccagccatatcccagccccgtctgcagggagccggaggctgctgctgctgctattgggtggatgccgcgcgtgtcttctcttctttccagagatggctaacaggggcccgagctatggcttaagccgagaggtgcaggaggaagatcgagcagaagtatgatgcggacctggagaacaagctggtggacttggatcatcctgcagtgcgccgaggacatagagcacccgccccccggcagggcccattttcagaaatggttaatgggacgggcgggtcctgtgccaagctgagtaaatagattatacccaccagggacaagaagcccatacccaaggttctcagagtcaaaagatggctttttaggcagatgggagcaaatctcccagttccctaaaagcttgcggagacctatggtgttcagaaccaccgacatcttttccagacggtggttcttatgggaagggaaggacatggcagcttgtgcagaaggaccctgattggctttaggcagcgttgcagtcaccaaggatgatggctgctatcggggagagccatcctggtttcacaggaaagcccagcagaatcggagaggcttttccgaggagcagcttcgccagggacagaacgtaataggcctgcagatgggcagcaacaagggagcctccccaggcgggccatgaacagggtaccgggaatgccccaggcagattcatgttaggacgcggcatcctgccccctggttagagaggacgaatgtttccacaccatggtcttttacgaaaaagaaatagttagtcaccttctgaccttctcctctttctccaagcctttctgtccctggtttttgcaagtgctgcatttcccgccgagaatcacgcgttgcctactgctgccacctcctgttcatttagaactatgcaaagactccgcttccgttttcccgagctatggcttaagccgagaggtgcaggagaagatcgagcagaagtatgatgcggacctggagaacaagctggtggactggatcatcctgcagtgcgccgaggacatagagcacccgccccccggcagggcccattttcagaaatggttaatggacgggacggtcctgtgcaagctgataaatagtttatcccaccagtgtatt

SEQ ID NO: 133616 - DNA, 2519 bp, Homo sapiens
atgccgccggcgagtggccccagcgtcctcgcgcggctgttgccgctgctggggctgctgctcggcagcgcctcccgggctcccggcaagtcgccgccggagccccccagcccgcaggtggaggagacccttcccagcgactcaccgggcgcagagatcctgatcaaggtgcaggtgtatgtgagcggggagctggtgcccctggcccgggcctcagtggatgtgtttgggaaccggactctgctggcagctggcaccacagactcagagggtgtggccaccctgcccctcagttatcgcttgggcacctgggtgctggtcactgctgcccgccctggcttcctcaccaactctgtgccctggcgtgttgacaagctgcccttgtatgcgtctgtcagcctctacctgctccctgagcggccggccacgctcatcctctatgaggacctggtgcacattctcctaggctctcccggtgcccgctcccagcccttggtgcagttccagcgccgggctgcccgcctgcctgtcagctccacctacagccagctctgggcgtcacttacgcctgccagcacccagcaggaaatgcgggcctttccctgccttcctgggcactgaggcctccagctcaggcaatggctcctggctggagctgatgcccctgactgctgtgagcgtgcacctgctgacaggtaatgggacagaggtgccgctctcaggccccattcacctgtccctgcccgtgccctccgagactcgtgccctcaccgtgggcaccagcattccagcctggagatttgaccccaagagtgggctgtgggtgcgcaatggcactggtgtaatccggaaggaaggccggcagctctactggaccttcgtctccccccagctggggtactgggtggccgccatggcctcccccacggctgggctggtcaccatcacgtcgggcatccaggacatcggcacctaccacaccatcttcttgctcaccatcctggcagccctggccctgctggtgcttatcctgctgtgtctgctcatctactactgccggaggcgctgcctgaagccgaggcaacagcaccgcaagctgcagctctcggggccctctgacggtaacaaacgagaccaggccacctcgatgtcccagctccacctcatctgtgggggacccctggaacccgccccgtcgggggaccccgaggctccgcctccaggccccctccactcggccttctccagctcccgggacttggcctcctcccgggatgacttcttccgcaccaagccgcgctctgccagccgcccgcgccgccgagccttcgggtgcccgcgggggcgagagcgccgggctcaagggcgctcgctcggccgagggccccggcgggctggagcccggcctagaggagcaccggcgggggccctcgggggctgcggccttcctgcacgagccgccctcgccgccgccgcccttcgaccactacctgggccacaagggggcggccgagggcaagacccccgacttcctgctgtcgcagtcggtggaccagctggcgcggccgccgtcgctgggccaggcggggcagctcatcttctgcggctccatcgaccacctcaaggacaacgtctaccgcaacgtcatgcccaccctggtgatccccgcgcactacgtgcgcctcggcggcgaggcgggcgccgccggcgtgggcgacgagccggccccgccggagggcacggcacccggcccggcgcgcgcttttccccagcccgacccccagcgcccgcagatgccgggccactcgggcccggggggcgagggcggcgggggcggcggcgagggctggggggccgggcgcgcggcgcccgtcagtggctcagtcaccatccctgtgctattcaacgagtccaccatggcgcagctcaacggggagctgcaggccctgaccgagaagaagctgctggaactgggcgtgaagccgcacccgcgcgcctggttcgtgtccctcgacgggcgctccaactcgcaagtgcgccactcttacatcgacctgcaggcgggcggcggggcacgcagcaccgacgccagcctggactcgggcgtagatgtccacgaggcgcggcccgcgcgccgccggcccgcgagggaggagcgggagcgcgccccgcctgccgcgccgccgccgccgcccgcgcccccgcgcctggcgctcagcgaggacacggagcccagcagcagcgagagccgcacgggcctctgctctccggaggacaactcgctgacgccgctgctggacgaggtggcggcgcccgagggccgggcggccacggtaccccgggggcggggccgcagccgcggggacagctcccgcagcagcgccagcgagctgcggcgcgactcgctcaccagcccggaggacgagctgggggcggaggtgggcgacgaggcgggagacaagaagagcccgtggcagcggcgggaggagcggccgctgatggtgttcaacgtcaagtag

SEQ ID NO: 133617 - DNA, 1127 bp, Homo sapiens
aacgagcctctgactccaggttatcatggattcccagcgcgggacagccagatttgggaggcatttatcagcgtgaaacactggtcgctgaacagtctgagctggcggaaatggaacttgtgatctttacgtctcctcagcatggttttggctcagcaaatcgaggaactggggaatggggtgaagggtggtttacatcccctaactggaaagtggcagccatatctacgccttctcccatgagtcgctactgctgcatgtggccagtgcctctgtctagaccagcttctcagatttcgccacatccgtgtgtcacagcccactccattgccagcttcatcatgccctcatacctcatgggaaaggtgaatgttcctcaagtcagtgggattgtggccactgggtttggagcaacaggattcctgggccgatgtgttgtcaaccaccttggacgcgtggggtcacagattccccaagcaattgctcaggtgtccaaggaagctgaagttggaaaattcattcatgttgcacatctgaatgtgaatattaaaagctcttctagatatttgagaaagaaggctgttggagagaaagcagtgagagacacatttccagaagccattatcgtaaagctgttggacatctttggaagagaggatagattccttaattattttgcaaatatgtgttggtttggtgctataccccttgtttccttgggctggaaggcagttaaacaaccagtatacgtcgtagatgtatccaaaggaattgttaatgcagttaaggatcctgatgccaatgggaaaacctttgctttcgttgggccaaatcgatatctcctctttgacctggtgaagtacatctttgctgtggctcacagcaaagggtgggtagcaagagactttgaaataagcccatttgagtcctggacaacaagggataaagtggagcgtattcacatcacagacatgaccttgtctcacctgcccagcttagaagaccttggtattcaggcaacaccactggaactcaaggccattgaggtgctgcggcttcatcacacttactgctggctgtctgctgaaattgaggatgtgaagctggccaagaccgtcaacatttag

SEQ ID NO: 133618 - DNA, 553 bp, Homo sapiens
  misc_feature (1)...(553): n = a,t,c or g
ttcaattatttcatgtacaaactcaggtgggtttccttcttcacaagtggcttcanagtcaataatacaaatgtagtcataataactgtcagcaaaattgctctctttcagcatcagcttctgcttcttataatagtttttcagtctcttctttagaacatcctttactcctctagtttcaagcttgaattctgaaagcttagctctgagttcttccttactcattctattaatacagccattcgtaatggcaatctctttgtaaaccgggtcactgaagtcactcgctctggaggtaatgaacttggatccttttgtctcctggccatcaaatttacactgttgagtttcctcgggactgggacgcggcggctcctccccgccctccggccgcggcgactccagcagcgcgggagccacggcctcgccggcaggctctttactctgtggatcctccatgccggctgtcacgccagaggagagttgctggagccggacacttgctaactctcactctgcagagcccgaaagcctcgcctttctacgttgaaaa

SEQ ID NO: 133619 - DNA, 566 bp, Homo sapiens; identical to SEQ ID NO: 126278

SEQ ID NO: 133620 - DNA, 2640 bp, Homo sapiens
atggtggaaggcaaggaggagcaagtcacatcttacgtggatgtccagagagcttgtgcaggtattcgaggtgcctttgaaaagccccagggtgctgtggccagggttcacattggccaagtcatcatgtccatctgcaccaagctgcagaacaaggagcatgtgattgaggccctatgcaaggccaactttaagttccctggccgccagaatatccacttctcagagaagtgggactttaccaagttcagtgtggatgaatttgaagacatgatggctgagaagcagcttatcccaataactgtggggtcaagtatacccccaatcgtgaccctccggacaagcgggatggagtcgccctgcaacacgggctgctcctatggcaactgctacaaaacaagatcaggcttcaccagggtcgggagaagaaacctcccaagaaagccaggcgctagagtcatgggtgtggatgtccttttagggcctaggaaagtagggtctgatgaggaggcattgaagaaaagccagtatgacgacgatgctttcatgtactcccccatctgccaccaaccacctatccgtggtttcgccaccacccacctatccgtggtttctccaccaccctgcttcctgggatgcagcaacccccaaacagatgcagttttgggccagcgttatggaagagaaagcaaatcccccaaatgtctgaatcacaaacacagagacctcacccccgtgacagtggaaacaaatgccctggcctctgacccctacagatccgcgttcctgcccctaaacggtgcagtgaggggagagctgggctgcagaacaggtggagagaagaacgtgaagagcaaaagagagaagaggggtgttacccagagggtagaagctgcagcagtccccgggctggagctgctgaatgtctggagacgtccccactgctggggagcggaagccaatcctgtgtctccgctggagcctcagatgcttctcgggccccctgttgtatacagtcactggtaccgctgccgctggagccagaatttcgacatgacagctcgccagtttcacaatgcataccttccttatcagagaccgttgatgatggagatgctctggccagtctatagagaatgcacagaggattttcggtcctctgcttcaccttctgatgtcagaaggctgaaaactccacactcagattatgctaatgctgccatttgtgtacatgtgacccatgaagagcaactctcctctggcgtgacagccggcatggaggatccacagagtaaagagcctgccggcgaggccgtggctctcgcgctgctggagtcgccgcggccggagggcggggaggagccgccgcgtcccagtcccgaggtgaggagtcgacccgcgcctggctgttggcgccagctgccccgtccccaaagcgccctcggcacccctttcttctcaggtgtcccgcagaaggtgcagctgtgcgcccttggaccccagcctcttcctcggtgcccagctccctggctttatcctcgggaaactcaacagtgtaaatttgatggccaggagacaaaaggatccaagttcattacctccagtgcgagtgacttcagtgacccggtttacaaagagattgccattacgaatggctgtattaatagaatgagtaaggaagaactcagagctaagctttcagaattcaagcttgaaactagaggagtaaaggatgttctaaagaagagactgaaaaactattataagaagcagaagctgatgctgaaagagagcaattttgctgacagttattatgactacatttgtattattgactttgaagccacttgtgaagaaggaaacccacctgagtttgtacatgaaataattgaatttccggttgttttactgaatacgcatactttagaaatagaagacacgtttcagcagtatgtaagaccagagattaacacacagctgtctgatttctgcatcagtctaactggaattactcaggatcaggtagacagagctgataccttccctcaggtactaaaaaaagtaattgactggatgaaattgaaggaattaggaacaaagtataaatactcacttttaacagatggttcttgggatatgagtaagttcttgaacattcagtgtcaactcagcaggctcaaataccctccttttgcgaaaaagtggatcaatattcggaagtcatatggaaatttttacaagggggaacatccgcatccaagagacgcctgcagtccagggggctccagagggagggagtcctgtggatgtggaagatacgcttttgtctgagagtcatgagattggactgtgggtccctgttgttgttaacccctgtgtgatcttgggcaattcactgttcctgtctttacctctacttgctcctcagtaagtcagagtgaactgagatctcttcctgaaattacttagcctaattctatggttggtttctggtggccaggaaccagaaataaatctctcagcaaaattttgcttatggaccatgaatcttagagtatccatggtatcactgatatctttaattcccagatattttccagtaatgaaattcatataataaagccaggatcaatggttctt

SEQ ID NO: 133621 - DNA, 904 bp, Homo sapiens
agtaagcgcagttgtcgtctcttgcggtgccgttgctggttctcacaccttttaggtctgttctcgtcttccgttccgactctctctttttcgttgcagccactgaagatcctggtgtcgccatgggccgccgccccgctccgttgttaccggtattgtaagaccaagccggtacccaaagtctcgcttcttgccgagggtgtcccttgatgccaaggattcgcatttttgaccctggggcggaaaaaaggcaaaaagtggaatgagttcccgcttttgtgcccaacatggtgtcagatgaatatgagcagctgtcctctgaaagccctggaaggctgccccgaatttgtcccaataaagtacatggtaaaaagttgtggcaaagatggcttcccatatcccgggtgcggctccacccccttccacgtcatccgcatccacaagatgttgtcctgtgctggggctgacaaggctcccaaacaggcatgccgaggtgccttttggaaaagccccaagggcaacttgttggccaggggttcacaattggcccaagttatcatgtccatccgcaaccaagcctgcagaacaaggagcatgtgatttaaggccctgcggcaaggccaagtttcaagtttcctggccgccagaagaatccacatcttcaaagaagtggggctttcaccaagtttcaatgctgatggaatttgaaagacatggtggctgaaaagcgggttcatccccacatggcttgtgggggtcaaagtacatcccccagtcgtggccctctggaacaagttggcgggccctgccactccatgaagggcttcccaatgttgctgcccaccctcttaatactcccccaataaaattcctacttccctggtccaaaaaaaaaaaaaaaaaa

SEQ ID NO: 133622 - DNA, 515 bp, Homo sapiens
gcggccgctccgggagaaggcggcggtggcggcgtggtctggtccgcagcgggacggccgcggcgaggcggagcagccgggcggcagcggcggcacaggggcccccgccggcgcctcagctcacagagacgctgggcttctacgagagcgaccggcggcgggagaggcgccggggccgcacagagctttcattgttgaggttcctcagtgctgaactaacaagagggtacttccttgaacattatgaggccaagtttacagaaagaggagaaagagtatgcacttgtttgcgaataccaagagaattggaaaagctgatggtttttggaatctttctgtgcctggatgcgtttttgtatgttgttcaccctgcttcctttaagagttttcctgggcactattcaggctcctcactttgccttgctatggcttaagggacagacgtttgcttcagcctgcccaggtgtgtgacattttgaagggtgtcattttggtaatctgctattttatgatgc

SEQ ID NO: 133623 - DNA, 3492 bp, Homo sapiens
  misc_feature (1)...(3492): n = a,t,c or g
cttttggttgttttcccaacaagccataacaagatgcttccccacaccaacagccacccatacgcctcaaacaccccatttactttcacacaaaatcctctccagacccaggcttgccccatccccagcacaggcccaccctgatagtcacatccccacagacaccctcccacagaacacacaccttgccccagcacaggcacactcgctgtcgacccaaacacaaagactaatgcatttggtaagcccaagcaagatgatgctgtctaacacacttggagcatttactttacagttaaagttgacagtttggaattttgtacattgacaatttttcagcctgttcaacatcgaatccttttagctgtaataatttatgaagtaattagttttaaagcaaaatcagttaagtataccttaaagttaacactgctctgcttccttggtgtaaaaagtgcccttttgtaaggaaatttgttttatccaccaattaaatgacatacagctcacattttgctttaaagagtaaactgaaaaattatgaaggatttttcccagtaatgcatagccttcattaattatttttttaataaataaaactagttagccttttttttttaacccctacaaaatggctctattcatcatgtcttatttaaggtagcgcttttatttctgattaattaagatacatctttaagtggttattctggtggtaagaacatttatcttgacttatgtttaatttttttaatgctttggcagatgaagtaacgtttgaaaactgtttgtgaaaatagtatgagactggaaagaaattanccgctcgtggtaaaagtttcacagttttccagggtatttccttatactgaagaggccttgaggcaaattcaacattctgggaagcccagactgacaaaggcaaaacaggattttgatgttgcctttgttgggtcctgggaaatgatgctgactgcttggccagggcaggagggaagttttaataatccatcaagcttccccagacagtcaaaggccggaaggtcgctccctgtccctgtgggtctgacccctnaagcccaggcccatattactgggaagaaagaataactaaagatttgcttgcccaataaataatttaaagtttttaaaataaatatttaaagtgcccatgtttagcatcctatttgtccctggcaacacagcacttgttgcccccaggacccagcttcttcagcgcattgaaagccacagattcagtcaattcggtttccacaaattgtgaacctgtctatctctaacaaatctttctttgaggatctgtgttttaattcagaattgtcctgcggttatgtccttctcgtcaccatctggagttgtcaaaacctgatcagcacctgcttgtcacaagtaatggtatgatattttccttttgatgaagtaggttgtttggtgatggaggcagacaggttttcttctgtggaaaggccttgagagggtttacatttgttctgtgatttactggacggcttgcctggagtgcaggttgcgggaggattcgacagcttctcttccattttggcttccttcacatactggcacgatttccccaacagcacgatgctattaagtactttcagggatatcaaccttggcatgaatataattaagaaatcagccgtgtgcttctcacgtttgggctccgagacgtgggagatgcccgctaacctaagaccttccgagggcggtgcaaggacccggacagaactttcccggccgcagaccccttctagggcacacctggcctggcgcggccgcgggggcctcggggctgtgcggccccggcgcctctcccgccgccggtcgctctcgtagaagcccagcgtctctgtgagctgaggcgccggcgggggcccctgtccgccgctgccgcccggctgctccgcctcgccgcggccgtcccgctgcgggccgtccacgccgccaccgccgccttctcccggagcggccgcgtcgccgacgcccgccatgttccgagcacaacaaactgtccccgccgcctccctccagcctctgcctccggccggccccctccccgcctcgccccgcccctcgccggagcccgagccgccgccgccgccgccgccgccatccgcggcccgccgaccggcgcgagccattggcgtcagcgacgcgtgtgaggccgctgccgccgccgccgccgccacggtagccgccatcttcttcctgccctcgccgtggcgggcgacggtttctcgcgccgtggctggctcggccggccggggcaccgcgccgggctccatgcagccgggctgcgcggtcccgcagagcgggcgcctccggggctcgagtcggggacccggcaggagcgggccggggatggcggcggcgggcggcgggtcggccgtggagccccggagaggcggccgccaccaccgctgcccgcagtctgcgaggtgtccggcggtccgctcagggcctcttttgcagactcggtgcccggagtgcgccggcgccgcccgccaggtcttggcactcccctttccagctctggcgtgtgaccccgcaacgagcgtggtgtcgagaccaccaccagctggggcggtgggagcgaaggtgccccaggctcgggggaaggtggaaaccttttccccgctccccaagtgattgttgcgcgctccggtgaggggacagtggtacctcgatttcccgtgtgccagcttcgggactcagctgtgcttttgtgtctctttgattagcaaaagcaaaacgaattcctccccgaacactaagcttcctggaaacttccctagacctaaacaacatgatactcacaatagttattacgcgaagtgcaacctcaaccggatcagaaaaacctccctttccttggatctttccattcacccgtgtttttcctctgttcctctgaacctcaaaccccctgagggaacagggtaccatgatgcagtcacagccagtgagtgccctgggtttgggaataaggagatcctcattgtccacactaagtgcaaggaaagaaattacgcagcccacaagaatgccatctgtgctcccactgcagcttgggctgacttctgtgaagctacactctttactagttgctcccttacaagaccatgaactttctaagagcaggccccatgtatccctatattctcgaagtccagccctagtccagcgtgctctctcccctacatcaaaatgatcaaccatctctctgacattataatttggctgtgattcatggtgaaggagtaagaaggtacagtgcctcactgccagagccatcgagttagcctcgctgcttctgctctgcccagaccattccaccttatagactttctggggcatgaattttttaattcggatgattaaaatgattttattgtagggatgaccttgaatctgggcctttatttccccaaagtccttgggcctcgtaggcat

SEQ ID NO: 133624 - DNA, 256 bp, Homo sapiens
ggcataaggaaagggagatgctggcctctgtgctcctgctgtcttttcctgtttctgtttgcgtttgacttagtagcaaccgacagagtggcaagggatttggttttcagcagtagacatccttccaccttttcctcccactacagcctcaacagtatgtaccatctcccactgtaaatagtcccagttagaacggaatgccgttgttttataactttgaacaaatgtatttactgcccttttcaaaaaaaaaaaa

SEQ ID NO: 133625 - DNA, 2309 bp, Homo sapiens
  misc_feature (1)...(2309): n = a,t,c or g
tgccccatcctccgcaagcagacgtcagattccaaccctcccatcaagctcatctgtggccatgttatctcccgagatgcactcaataagctcattaatggaggaaagctgaagtgtccctactgtcccatggagcagaacccggcagatgggaaacgcatcatattctgattcctacctggaaggaattttgttgaaaggggttttcacctgtgagccttggtctgtctcggtagggtggtcaacttcagtggactgtggttggtttcagagcgcctggctgaggagttccactgaggggagcactggagcagccctttggcagaggcttaggagggagttgctcggactcaaacgtccagtcctcgtgcgaccgcgctgggtcggaagtgagcaggctgaggccaccatggagcagtgtgcgtgcgtggagagagagctggacaaggtcctgcagaagttcctgacctacgggcagcactgtgagcggagcctggaggagctgctgcactacgtgggccagctgcgggctgagctggccagcgcaggtgggtggccacccttgcaagtgccctgcgacagcctccctgaggacatgggagacccgaagctactgagtgacagggttccggaaggacgatgatgaggatgttggtacctgcatctgtaggcctccttgaaaccggccctccaggggacccctctctcagccaccctctctctggtgatgtcacagtgctgccggaagatcaaagatacggtgcagaaactggcttcggaccataaggacattcacagcagtgtatcccgagtgggcaaagccattgacaggaacttcgactctgagatctgtggtgttgtgtcagatgcggtgtgggacgcgcgggaacagcagcagcagatcctgcagatggccatcgtggnaacacctgtatcagcagggcatgctcagcgtggccgaggagctgtgccaggaatcaacgctgaatgtggacttggatttcaagcagcctttcctagagttgaatcgaatcctggaagccctgcacgaacaagacctgggtcctgcgttggaatgggccgtctcccacaggcagcgcctgctggaactcaacagctccctggagttcaagctgcaccgactgcacttcatccgcctcttggcaggaggccccgcgaagcagctggaggccctcagctatgcttcggcacttccagccctttgctcggctgcaccagcgggagatccaggtgatgatgggcagcctggtgttacctgcggctgggcttggagaagtcaccctactgccacctgctggacagcagccactgggcagagatctgtgagacctttacccgggacgcctgttccctgctggggctttctgtggagtccccccttagcgtcagctttgcctctggctgtgtggcgctgcctgtgttgatgaacatcaaggctgtgattgagcagcggcagtgcactggggtctggaatcacaaggacgagttaccgattgagattgaactatgcatgaagtgcttggtaccactccgtgttcgcttgccccatcctccgccagcagacgtcagattccaaccctcccatcaagctcatctgtggccatgttatctcccgagatgcactcaataagctcattaatggaggaaagctgaagtgtcggtactgtcccatggagcagaacccggcagatgggaaaacgcacntcatattctgaatccttacctggaaagaaattttgtttgaaaagggggttttcaacctgtgagccttgggtcctgtctcggtagggtggtcaacttcagtggactgtggttggtttcagagcgcctggctgaaggagttcccactgaggggagcactggagcaagccctttggcagaggctgaaggagggaagatggaccagcccacgccctggcaccctggctcccatggccataaggaaaggggagatgctggcctctgtgctcctgctgtcttttcctgtttctgttggcgttttgactttagtagcaaccgacagagtgggcaagggatttggtcttcagcaagtagacatccttccaccccttgccctcaagccaagtctcttgcttgccatgccaatgctatgtccaccccttgcccctcggcccaagagtgttccagcggtgggcccacctcttcctcccactacagcctcaacagtatgtaccatctcccactgtaaatagtcccagttagaacggaatgccgttgttttataactttgaacaaatgtatttactgcccttctcatttctcctggc

SEQ ID NO: 133626 - DNA, 1762 bp, Homo sapiens
  misc_feature (1)...(1762): n = a,t,c or g
cggacgcgtgggtttttttttcgccggaaatcccggaagtgacagctttgggggtttgctgctgggtctgactcccgtcctgcgatgggttgctgacgggggaacaatccccaagaggcatgaacctggtgaaggggccgaagaaggttgagaaggtcgacaaagatgactgaattagtggcccaatggaactattgtactctaagttcaggaaatattaagacgaccaatagttgcctgtgaacttggcagactttataacaaagatgcccgtcattgaatttctcttggacaaatctgcagaaaaggctcttgggaagggcagcatctcacattaaaacgcattaacgaattgttgacagagctgaaagctttctgataatccctgccctgggaaggggataaagggaaacactaaaggtgacaaagcacgatgacctccaagcgggcgcgtntttcatcttcccccgttggtgggcctgggagatggaacggccgacacaggttcttgcttccttcgggtggttgcggcttgtgttgtttttcttgagcggagccttggaaagagataaaagcggaattttgccacacgtgtggggctggcctttccagggaggatgatgataatcgtgctcaatggcaccaaggaggatgtggacgtgctgaagacaaggatggaggagagaaggctgtagagcgaagttttaaaagaatatcaaagaaacccaaggcagcagagtctgtttccaaaacccagatgtcagtggaaggaagccccagggcccatcaaaagttaagaccagggaagccctgaagaagcccagcccttgattctagagagaagaaaaccaacttggctcccaaaagcacagcaatgaatgagagctcttctggaaaagctgggaaagcctccgtgtggagccacaaagaggtccatcgctgaccagtgaagaatcggaggcctacaagtccctctttaccactcacagcttccgccaagcgcttccaaggaggagtctggcccactggggttcaccccacacgtcctacttgcttctgaagcccgcactgccaccggctcctgccccagaaggttgtttaagtttccacgtagggcaggttcgtttgtgcctctgagttgcgctgcttgtgtgttcttttctattagtttttgttgttcataaaaggtgttcctgggccagccttcaagctgggtgtggcccactctttgatgtgagggcgtgttcggttcccaggggggggacatggggaggggcttgcacagtggccccgaaggtccatgccttgccttcccaccctgccaggtgccatttggtccctttccccatggccccagggaacgcctttggggctgcacctttttatgccttgccagtaacaagagactcccagagtccctcaccggtgcaagagttggcacatattaattaactaaaattcctaatgatccttgctaccagcaataaaatcaagtaggcccaagtgaaactgggctttaaaaaggatggatttccaatacccctgtgcccactagaagcttcggaagggcctcgtccctctgctacagccctgggaggagccaggatccttgttggtctagctaaatactgttaggggagtgtgccccatctcatcattctcgaagatagcagagtcatagttgggcacccggtgattgaggtcaaaaaataaagctggtctgtctcttcccaatattttgtgaaaaggtaaaacgggaaag

SEQ ID NO: 133627 - DNA, 455 bp, Homo sapiens
gtgcttctcctaggaatttataattgagactcagctcttccagttggcttggaatgagattctatggacttggagcagagaatctgactgaacagtctttccagattctgctccatccatttcacttcctgaaggaacaggaagctcggaagcaggagctccgtgtctggggaactctgtttgagagaggatgatcccagctgtggcatgctgggactccctggaagggctcgctgcaggcctgcgccccacttgctttctgttttgtaggactcacccgcaaaaaggactgcttctctccacaagctttgcatgtccacttgacactcttttttacctggtgcgcctggaagaggcgacagctgcagcagcgtagcacccgagaacgctgaagcaacgccaaccctgcttgtgcagtcgccaggcagccaagcgacgaaatcgtcgacccgggg

SEQ ID NO: 133628 - DNA, 726 bp, Homo sapiens
  misc_feature (1)...(726): n = a,t,c or g
ttagtacccctgcggtaccgctccggaatttccgggtcgacgatttcgtcgcttcagcgttctcgggtgctacgctgctgcagctgtcgcctcttccaggcgcaccaggtaaaaaagagtgtcaagtggacatgcaaagcttgtggagagaagcagtcctttttgcgggcttatggtgaaggctctggtgctgattgtagacgccatgtccaaaagttaaatctactaccgggacaacgtttcagagctgccactcaagtctccagaagaaactgtcagtgccagtgaagaataaaacgtgggacaccagcaggctgggaggtgtgaaacagcaagtaaatatcgcagccctcagagaggttgttggctaaagtatctagaaaaggactcccaagaactggagctggaaggaacaggagtgtgtttcagcaaacagccttcatccaaaatggaggagccaggcccccgcttcagtcaagacctgcctagaaaaaggaagtggagcaggagcaccgtccagcctccgtgcagccgtggcgtgcaggactcgggtggctctgaggtcgcctggggaccccagaagggacaggctggcctgacatggaaggtgaaacaaggcagcagcccctgccttcaggagaactctgcagaactgcagtgccgggagctgaggggtcctgggaagggagctatgagtcccatccagcangttacagccacatcctc

SEQ ID NO: 133629 - DNA, 1283 bp, Homo sapiens
  misc_feature (1)...(1283): n = a,t,c or g
aattcccgggtcgaggcccttctgctaaaattcttttgtaggcaccggtaacctgattctaaggtccccaggagatggatcacctgatgacatgagaatgtcttgtttttggaaagcctggtcatgcaatttagcagaaggtttgcggtgaggtggaaggcatttatttgctttgtcttgctaaccctcaaaatcaaagcctgtcccagcctgacagcttccagcagaaagtgtcagaaccagaggcccagccaaggcccaggcaagggcaggcggtcctcctgggccctggcattgttcttacaaatggagggcatggccatcttctctttcagggacaggctggcctgacatggaaggtgaaacaacggcagcagcccctgcctccagggagaactctgcagactgcagttgccggggagctgaggggtcctggggaaggagctatgggagtcccatccaggcaggttacagccacatcctcttaaatggggcgcgattttgtcctggccacctaggaaaaagtttcacatgtggacagttgaggcagccaaggtctcttcagaggggaccccaggccatgctggtccagcacaggctaagcaagggacccccagagcacaggcctcaagagaaagcctacagcaggcccactgccgctgtcccaacttccctcgggccnacaacaccccgtccacatctgggtcctgaaaaggccttgcgggaaaaacctccatgggacgcaaaggactcccctgggccagagggtgggccccctggtccctggaggcacagaatccctcgacccacacgactatgtgacctctttataactggggaagacttcgatgatgatgtgtgatctgggactggcaggttattaatcgagatacacttgttaggagggcacagggttcccataaggcacttttaaagatactctgtaagaaccattaacaataaacttactgtcaatcatttctctctatgcaaacgtcattggttaaagtgctgatgccatttaattagattgtttgcaaatttaacaggatggctacaaagagatcttattttaaaagcagctgatggtttggaaatgagagagctacagtggtgaagagaccaggaggcagctctcagtgaaaccaacattgcggatgcccttcgtgagccttctcagtcccagcaggaagccctcaacactggcctccccagcctgcctgctgacaacacctaggcttgctttatctaaaatgaattcctccgcagtgtactgctattct

SEQ ID NO: 133630 - DNA, 837 bp, Homo sapiens
  misc_feature (1)...(837): n = a,t,c or g
ggaattcggcggcagccatcaggtaggctgcgttgaggatctttgctcttccatccgcctttgatcgtcttcctcttcagccatccagcgtaagccaagatgggttctatacaagtacatccaggagctatggagaaagaagcagtctgatgtcatgcgctttcttctgagggtccgctgctggcaggtaccgccagctcgtctgctctccacagggctccccgccccacccgggcctgataaatgcgcgccgactgggctacaaggccaagcagggttacgttatatataggattcgtgttcgccgtggtggcccgaaaacggcccagtttcctaaagggtgcaantttacgggcaaagccctgtccattcatgggtgtttaaccagcttaaaagttttgcttcggaagcctttcagttccgtttgccagagggaggcgaagcttgggacggcacttgtggggggcttcttgaggagttcctgaatttttttaattgggtttgggttgaaagattcccacattaccaaatttttttgaaggttattcctcatttgattcctttcccttaaaagctattcagaagaaattcctggacacccagttgattcaccaaaaccaggtccacaagcacaggggagatgcgtggggctgacatctgcaaggcccgaaaagagccgtggccttggaaagggccacaagttccaccacactattggtgggctctccgccgggcaacttggagaaggcgcaatactctccaagctccaccgttaccgctaatataagtaaagtttgtaaaattcatacttaataaacaatttaggacagtcaaaaa

SEQ ID NO: 133631 - DNA, 506 bp, Homo sapiens
caggaagattacctaagagagctgctgacaaccatgggggatcgggtttacagatgaggaagtggatgagctgtacagagaagcacctattgaccaaaaagggggaatttcaattacatcgagttcacacgcatcctgaaacatggagccaaagacaaagatggactgaaagaactttagctaaaatcttccagttacattgtcttactctcttttacttctcagacacttcccccacccgtcatagaaccgtgttgcatgcaacttagtttcacagctttgccgtcttctttttgatgtatttattccagacctttctgccacttagcacttgtataatcagactggaaatggggatgagggtgtaaattgtattgaaaaagatcgcgaataaaaatcaacaaatgtgaaagcccagaaaaatatattcgtatttctggttttgctggatttttacatttttatataataaaaatgttattttgaaataaagattatgctgactc

SEQ ID NO: 133632 - DNA, 1076 bp, Homo sapiens
  misc_feature (1)...(1076): n = a,t,c or g
acagtctgctggaattcgcggcagcgaggggctcggagaggtgctcggattctcgtagctgtgccggcccacaatgattctgagctaaaacacaaaataaaaaccagattcattgccaccagcgctcacctcgcctgacttaaaaaaaaggacttaaccaccaccatgtcgagcaaaacaacaccagaccaagaccaagaagcggccctcagcgtgcaacatccaattgtgtttgctatgtttgacccagtcacagattcaggagttcaaagaggccttcaacatgattgatccagaccaagatgggtttcatcgaccagggaagatttgcaatgatatgcttgcttcattgggggaagaatccaacttgatggagtatcttagatgccatgatgaatgagggctccaggccccccatccaatttcaccccatggttccctcaccatggttttggtgaggaagtttaaatggccaccagatcctgaaagatggtcatcagaaaatgccctttggcntgctttgaatgaaagaagccactgggcaccatacggggaagattacttgaagagagctgctgacaacccatggggggatcggttttacagatgaggaagtggatgagctgtacagagaagcacctatttgataaaaaaggggaatttcaattacatccgagttcacacgcatcctgaaaccatggagccaaagacaaagatgactgaaaatactttcaaattcccagccaaacgttccttggttggccacttttggggtattcctgagatttttctcttgcatggcccttaggctttagcagctttttgcatttcctgttggtatttattctcagccattttgggcatatgtatctttataatcagactggaaacgggactttctattaatatcattttcgagaataaaaaataggataatttaacctaccagcccttctcccccaataactggtgggtctatacagagtcaatatattttttcagagaaagttagttcggctcgatttttttctgaatcataattaaactttatgataaattaaaaaaaaaaaaaaaaa

SEQ ID NO: 133633 - DNA, 429 bp, Homo sapiens
aggtggcctgcctgcgggagcacaagcagcgctgtgagcgcgccacgcggagcctgctgcgggagctgctccaggtgcgggcccgcgtgcagctgcagggctcagagctgaggcagttgcagcaggaggcgcggccggcagcccaggcccccgaaaaggaggcgccggagttctctggtctccagaaccagatgcaggccctggacaaaaggctggtggaggtccgggaagccttgacccggctcaggaggaggcaggtgcaacaggaggcggagagaaggggcgccgagcaagaggccggcctcagactggccaagctgaccgacttgctgcagcaggaggagcagggccgggaggtggcctgcggcgccctgcagaagaaccaagaggacagcagccggagggtggacctggaggtggccagaatgc

SEQ ID NO: 133634 - DNA, 2628 bp, Homo sapiens
cgcttcccggccggtgtcgctccgcggcgggccatggccaacgtctctaagaaggtgtcctggtccggccgggaccgggacgacgaggaggcggcgccgctgctgcggaggacggcgcggcccggcggggggacgccgctgctgaacggggctgggcctggggctgcgcgccagtcaccacgttctgcgcttttccgagtcggacatattgagcagcgtgaagctggatgatgaacttttggaaccggaatatggaccctccacatcccttccccaaggagatcccacacaacgagaagctcctgtccctcaagtatgagagcttggactatgacaacagtgagaaccagctgttcctggaggaggagcggcggatcaatcacacggccttccggacggtggagatcaagcgctgggtcatctgcgccctcattgggatcctcacgggcctcgtggcctgcttcattgacatcgtggtggaaaacctggctggcctcaagtacagggtcatcaagggcaatatcgacaagttcacagagaagggcggactgtccttctccctgttgctgtgggccacgctgaacgccgccttcgtgctcgtgggctctgtgattgtggctttcatagagccggtggctgctggcagcggaatcccccagatcaagtgcttcctcaacggggtgaagatcccccacgtggtgcggctcaagacgttggtgatcaaagtgtccggtgtgatcctgtccgtggtcgggggcctggccgtgggaaaggaagggccgatgatccactcaggttcagtgattgccgccgggatctctcagggaaggtcaagctcactgaaacgagatttcaagatcttcgagtacctccgcagagacacagagaagcgggacttcgtctccgcaggggctgcggccggagtgtcagcggcgtttggagcccccgtgggtggggtcctgttcagcttggaggagggtgcgtccttctggaaccagttcctgacctggaggatcttctttgcttccatgatctccacgttcaccctgaattttgttctgagcatttaccacgggaacatgtgggacctgtccagcccaggcctcatcaacttcggaaggtttgactcggagaaaatggcctacacgatccacgagatcccggtcttcatcgccatgggcgtggtgggcggtgtgcttggagcagtgttcaatgccttgaactactggctgaccatgtttcgaatcaggtacatccaccggccctgcctgcaggtgattgaggccgtgctggtggccgccgtcacggccacagttgccttcgtgctgatctactcgtcgcgggattgccagcccctgcaggggggctccatgtcctacccgctgcagctcttttgtgcagatggcgagtacaactccatggctgcggccttcttcaacaccccggagaagagcgtggtgagcctcttccacgacccgccaggctcctacaaccccctgaccctcggcctgttcacgctggtctacttcttcctggcctgctggacctacgggctcacggtgtctgccggggtcttcatcccgtccctgctcatcggggctgcctggggccggctctttgggatctccctgtcctacctcacgggggcggcgatctgggcggaccccggcaaatacgccctgatgggagctgctgcccagctgggcgggattgtgcggatgacactgagcctgaccgtcatcatgatggaggccaccagcaacgtgacctacggcttccccatcatgctggtgctcatgaccgccaagatcgtgggcgacgtcttcattgagggcctgtacgacatgcacattcagctgcagagtgtgcccttcctgcactgggaggccccggtcacctcacactcactcactgccagggaggtgatgagcacaccagtgacctgcctgaggcggcgtgagaaggtcggcgtcattgtggacgtgctgagcgacacggcgtccaatcacaacggcttccccgtggtggagcatgccgatgacacccagcctgcccggctccagggcctgatcctgcgctcccagctcatcgttctcctaaagcacaaggtgtttgtggagcggtccaacctgggcctggtacagcggcgcctgaggctgaaggacttccgagacgcctacccgcgcttcccacccatccagtccatccacgtgtcccaggacgagcgggagtgcaccatgggacctctccgagttcatgaacccctccccctacacggtgccccagggaggcgttcgctcccacgggtgttcaagctgttccggggccctgggcctgcggcacctggtggtggtggacaaccgcaatcaggttgtcgggttggtgaccaggaaggacctcgccaggtaccgcctgggaaagagaggcttggaggagctctcgctggcccagacgtgaggcccagccctgcccataatgggcactggcgctggcaccccggcccttctgcatttcctcccggagtcactggtttctcggcccaaaccatgctccccagcagtggcaatggcgagcaccctgcagctgggcgggcaagcggcaggcgcggaactgaccctctcgcgggac

SEQ ID NO: 133635 - DNA, 4413 bp, Homo sapiens
ctgttgcccagttttcccgtctgcgaaaaagttaacgcatgcatagcgctgagcacggtgcctgtcacaaactacgccctgttctcaggccggtcttgctttgtgtggtgtagtggtgaattgaccaagccagtcactgctcatctggtggtgttgggacagggcgagggtgaggtcagcatctgcctcaggggacctgacggctccagggccctcttgcgagtggacctgcgggagctgtctttttctgactggcttatttcacggggcacagtgtcctccggcccgtcgtgctgcagcacgggtcggtggtcattcctctttatggctgaattattccattgcggggagaggctgcatttccttgactcactcatccatcggcacagcaggtgcttccgcattttggtcattgtgaacggtgctgctgtgaacatggcgtgcaagtgggactttcagacgctctgcttttagtcaccacgttctgcgcttttccgagtcggacatatgagcagcgtggagctggatgatgaacctctgccgcagtcgctcccgaggccggcgccgtgctcagatgccgtcctgtacagccagcagcgcctcttccggggctgcccttctgatacgtttgtgctgcctctggagccacaaggccttcggaagatctgtttcgtggccgtgggcgccttcggcactgcctttttggacttcaaagttctgccacaggatatggaccctccacatcccttccccaaggagatcccacacaacgagaagctcctgtcccccccctgccagcccactcccggtcccctgtgcccgcacccagagcgtgggttcggtgctgagtgctgcccttgctgtcccggcctgcagagcttggactatgacaacagtgagaaccagctgttcctggaggaggagcggcggagcgccctgcaggccttccggacggtggagatcaagcgctgggtcatctgcgccctcattgggatcctcacgggcctcgtggcctgcttcattgacatcgtggtggaaaacctggctggcctcaagtacagggtcatcaagggcagatgagccccagatatcgacaagttcacagagaagggcggactgtccttctccctgttgctgtgggccacgctgaacgccgccttcgtgctcgtgggctctgtgattgtgggctctcctcagctcctggggctcctggggctgaggggctgcatctgtctcagcctggccgtgacccactcagccgtgcttcccctctttcagccggtggctgctggcagcggaatcccccagatcaagtgcttcctcaacggggtgaagatcccccacgtggctgtgtttcagacgttggtgatcaaagtgtccggtgtgatcctgtccgtggtcgggggcctggccgtgggaaaggtaacaaagtgcacatggccactccagctggagcctgaggccgccgggcccgcgagggccctggtctccaggaagggccgcgtcacgcgtgtctctgagcaccggtccttctggtctccaggaagggccgatgatccactcaggttcagtgattgccgccgggatctctcagggaaggtcaacgtcactgaaacgtggtctgcagcacggtgctcttcaggaatcagagctgctgactcggttgtcctgaaagccccttcccctgcacagcccctgtcctggcagttgctctccctttctgagagccgtgccctcaaggaacctgccctgttgcagatcttcgagtacttccgcagagacacagagaagcgggacttcgtctccgcaggggctgcggccggagtgtcagcggcgtttggagcccccgtgggtgaggagggccgcaccgggtccaatgctttctgccttccaggtggggtcctgttcagcttggaggagggtgcgtccttctggaaccagttcctgactctgccgcagttctttgcttccatgatctccacgttcaccctgaattttgttctgagcatttaccacgggaacatgtgggacctgtccagcccaggcctcatcaacttcggaaggttctctgcacagaaaatggcctacacgatccacgagatcccggtcttcatcgccatcctgttcgcaggcggtgtgcttggagcagtgttcaatgccttgaactactggctgaccatgcttggttccaggtacatccaccggccctgcctgcaggtgattgaggccgtgctggtggccgccgtcacggccacagttgccttcgtgctgatctactcgtcgcgggattgccagcccctgcaggggggctccatgtcctcgaccccacagctcttttgtgcagatggcgagtacaactccatggctgcggccttcttcaacaccccggagaagagcgtggtgagcctcttccattctctcctaggctcctacaaccccctgaccctcggcctgttcacgctggtctacttcttcctggcctgctggacctacgggctcacggtgtctgccggggtcttcatcccgtccctgctcatcggggctgcctggggccggctctttgggatctccctgtcctacctcagggccctgcagctgagccaggtcttgcggcatcgcgggccggagcagaagtcccagggcaggacaaaagtgtcgcacctcacgtggttcacgggccgtgggcgttgtcctcgcgtggttcacgggccgtgggcgttgtcctgctgtggtggcagcgtgtactgtggcagcgcagcccatgtgtggagtctggacctcccacagatctgggcggaccccggcaaatacgccctgatgggagctgcggctcccgcaggcgggattgtgcggatgacactgagcctgaccgtcatcatgatggaggccaccagcaacgtgacctacggcttccccatcatgctggtgctcatgaccgccaagatcgtgggcgacgcccgcccgcagggcctgtacgacatgcacattcagctgcagagtgtgcccttcctgcactgggaggccccggtcacctcacactcatcctccggcagggaggtgatgagcacaccagtgacctgcctgaggcggcgtgagaaggtcggcgtcattgtggacgtgctgagcgacacggcgtccaatcacaacggcttccccgtggtggagcatgccgctgtcttgcagcctgcccggctccagggcctgatcctgcgctcccagctcatcgttctccgccgcccgcaggtgtttgtggagcggtccaacctgggcctggtacagcggcgcctgaggctgaaggacttccgagacgcctacccgcgcttcccacccatccagtccatccacgtgtcccaggacgagcgggagtgcaccatggacctctccgagttcatgaacccctccctgctgcaggaggcgtcgctcccacgggtgttcaagctgttccgggccctgggcctgcggcacctggtggtggtggacattgtcctgcaggttgtcgggttggtgaccaggaaggacctcgccaggtaccgcctgggaaagagaggcttggaggagctctcgggcaacctcagaggccccaaggcccaagctacagccgagggcagggtggccggtgcagcccagcccccttcccagctgagagccgtcaccctggaagacctggggctcctcctggcaggaggcctggccagccccgagcccttgagcctggaggagctctcggagaggtatgagtccagccatccgacatccacggcctctgtccccgagcaggacaccgccaagcactggaaccaggccccggccagggtggtggagctgcaggccgaggtggcctgcctgcgggagcacaagcagcgctgtgagcgcgccacgcggagcctgctgcgggagctgctccaggtgcgggcccgcgtgcagctgcagggctcagagctgaggcagttgcagcaggaggcgcggccggcagcccaggcccccgaaaaggcctcctcgcagttctctggtctccagaaccagatgcaggccttgtgtcccaggctggtggaggtccgggaagccttgacccggctcaggaggaggcaggtgcaacaggaggcggagagaaggggcgccgagcaagagcctccggccagctgggctggtgtgaccacagccgacttctctagactggccaagctgaccgacttgctgcagcaggaggagcagggccgggaggtggcctgcggcgccctgcagaagaaccaagaggacagcagccggagggtggacctggaggtggccagaatgcaggtaccaccaggcccaggcttcaggggggccgcccagagggccgaggaggagaccctaaccctctcggcctgtgccatccgatacagcggccgttcaccatgtatctgtgtccactga

SEQ ID NO: 133636 - DNA, 579 bp, Homo sapiens
ctattgagaggtgacagcgtgctggcagtcctcacagccctcgctcactctcagcgcctcctctgcctgggcttccactttggcggcacttgaggagcccttcagcccgccgctgcacagtgagagccccttcctgggctggccaaggccggagctgggtccctcagctgctccgtgcgcccctgtgccgccggagcctccccaacgagtgccaccccctgctccatagcgcccagtcccatcgaccacccaagggctgaggagtgtgggcgcatggtgcaggactggcaggcagctccacctgcaccccggtgtgggatccactgggtgaagccagctgggctcctgagtctgcttatgagcatggtcataagaattaatatgattgtcaaactcctggtgtttgtgatactgcttgtcacataattcacagtaaaagtttgcctttacatcttccagggcctttgctgtggacttcttttctgcaaaatccttcatggcagcccctctcatcacaggcccaaagacctttggcatcactgtgacctggatgtgagacatgaggtcaaaggagatcat

SEQ ID NO: 133637 - DNA, 1449 bp, Homo sapiens; identical to SEQ ID NO: 120331

SEQ ID NO: 133638 - DNA, 1524 bp, Homo sapiens; identical to SEQ ID NO: 125569

SEQ ID NO: 133639 - DNA, 903 bp, Homo sapiens
atggcaaagaagattcaactgacatataagtgtgtccagaattggtgggttcttggtctcactgacttcaagaacgaagccgcagaccctcgcagagtgaagctgcagaccttcgtggtgagtgttacagctcttaaggcggcacgtctggagttgttcattcctcctggtgggttcgtggtctcgctggcttcaggagtgaagctgcagacctttgcggtgagtgttacagctcataaaggcagtgtggacccaaagactagacataaaggttctccaagtccccaccagactcaggagcccagctggctgcacccagtggatcccgcaccggggctgcaggtggagctgcctgccagtcccgcgccgtgcgcccgcactcctcagcccttgggtggtcaatgggactgggtgccatggagcagggggcggtgctcgtcggggaggcttgggccacgcagcagcccacggtggggggcaggctcaggcatggcgggctgcaggtcccgagccctgccccacggggaggcagctaaggcccagcgaaaagtcacagcagctgctggcccaggtgctaagcacctcactgcctggggctggcagggccagctggccactccgagtgtggggcctgccgagcccacacacacccagaactcgcactggcccgcaagcgccgtgtgcagccccagttcccgcctgcgcctctccctccacacctacccgcaagctgagggagccggctccggccttggccagcccaggaaggggctcccacagtgcagcagcaggctgaagggctcctcaagtgctgccaaagtgggagcccaggcagaggaggtgccgagagcgagcgaggcctgcgagggctgccagcacgctgtcacctctcataagtattaa

SEQ ID NO: 133640 - DNA, 642 bp, Homo sapiens; identical to SEQ ID NO: 122684

SEQ ID NO: 133641 - DNA, 790 bp, Homo sapiens
tttcgtccagtcagccaaccgacacacttttccagtgttcattatgtataagggactgtcagagacaaagagaagaattatacatgagctggctcccgacctgcagcctgccatgcctgagcctccccctcgcctccgtgggctcctgtgcagcccggagcctccccgacacgccgccccctgctccactgcgcccagtcccatcgaccacccaagggctaaggagtgcaggcgcagggcgcgggattggcaggcagctccacctgcagccccggtgcgggatccactgggtaaagcccgctgggctcctgagtctgcttcactcctgagccagcgagaccacgaatccgccagactcggccagacagaagaaactctgaacacatccgaacgccagaaggaagaaactccgaacacatctgaacatcagaaggaacaaactctggacacgccacctttaagaactgtaacactcactgcgagggtccgcggcttcattcttgaagtggagacaggtacctgctatagtccctgttctcccctgaatgacactaaccagccatttttcatggccattctaagatctgctttgacaaatgctgaaaaggggaccaatgctgagctaacttgctctgcccagcaaggagaggcaggggaagtcccctccaaaaagacaattccacagcccattactattcagggagcagggctaatgtttttcctcactctttctgtccccaagcttcatgtgcatgcacatgagaaaaagacatccaacacaagagagtga

SEQ ID NO: 133642 - DNA, 705 bp, Homo sapiens
atgctgcccgatcgcctcagaagccctgtagcccatcacagatgccgagcttcgggtaactatcacagtggaagacattccccagcaccagcctggagagtgacactcactggatggctggatcaaaggagtagcaggattcacaggagtctggccttcaaggactcctactccaagggtaaggaggagcgcacccacatcaagggaatgtgttcggagcttcttccttctggtgggctcgtgggctcgctggcttcaggagtgaagctgcagaccttcgtggtgagtgttacagctcataaaggcagtgtggacccaaagaactcaggagcccagctggcttcacccagtggatcccgcactggggctacaggtggagctgcctgtcagtcccgcgccctgcgcccgcactcctcagcccttgggtggtcgatgggactgggcgctgtggagcaggcggtggcgctcatcggggaggctccggccgctccggagcccacggagggggtgggaggctcaggcatggcgggctgcaggtcccgagccctgccccgcgggaaggcagctaaggcccgggccagctggctgctccgagtgcggggccgccaagcccacgcccacccggaagtccagctagccctcaagggccctgcgcagcctcagttcccgctcgcgcctctccctccacacctccatgcaagctga

SEQ ID NO: 133643 - DNA, 1200 bp, Homo sapiens; identical to SEQ ID NO: 128760

SEQ ID NO: 133644 - DNA, 2679 bp, Homo sapiens
tcactgcattttgctctcagctctcctgtctgcaagctggtctacctgaaacaactgccttgcaatatcaaaagatatctgataaaacgggtaaatatagctccactggctggtgtccaccacacttgccacctcctttcgtggctttggagccccccaccctctgtctctgtactggggagcttcttccttctgttttctcccttccctcttgcctattaaaccctctgctcgtggcatgggagacttcctggggctcatgatggggagggcatcaatcatcaaatcagatgaaaattcctgaaggcattgacctttagtgaattctaggtctggtatcaatggctgcctcttcctcgagttgctggagtccagtggctgcaatccttgagctagatacagagtgccaattggtgtatttacaatccctgaactagacataaaggttctccaaggccccaccagagtagctagatacagagtgtccattggtgcattcacaaaccctgagctagacacagggtgctgattggtgtatttacaatccctgagctggacataaaggttctccacgtccccaccagactcaggagcccagctagcttcacccagtggatcccgcactggggctgcaggtggagctgcctgccagtcccgcgccgtgtgcccgcactcctcagcccttgggtggtcgatgggactgggggctgtggagcagggggcggcgctcatcggggaggctggggctgcacaggagcccacggagggggtgggaggctcaggcatggcgggctgcaggtcgcgagccctgccccgcgggaaggcagctaaggcccggcgagaaattgagcgcagagccggtgggctggcactgctgggggacccagtacaccctccgcagccgctggcccgggtgctaagcccctcattgccccgggccggcagggcaatgagccctgccattggtgcggagcccgccaagcccacgcccacccagaactccagctggccaccagtgcctcctggacccgagccttcagggagtgtgtgagtccagcctggcccagctgccttggcgctgcttgttttcattgtcttcttattggccctttcccattctccttctcctctcaacacctttctacttctcttggccaccttgtccttttgtcctggcatttgacgagcctcagtgtgtcctttcggatattgaccaggcttctcagagtcttcacgggttcttggggaggtggggcggcgtaaggaaatattgatgacagtggtgggctgtccagagcagccgctgccatcacaacggctgctgcaggggggtcgcagggagcagacagacagcccctccacagcttgccgccctggggctgccagccccacagcggcagctggcgtgtctgactgcacagtggccggaccccactctcgctcacacaccccttgctgctccatgcctgacttgcagtctcccttggaggcgtgggatataggctggtagtgtgagctgagtgcagcctctgcatcctgctctccagctgggaggccagcaaagttgctgtctggagactccgctggcagcccctctccttcttctgagggggccctgctggcaggctggggggaagagagagcctctccctcctcttcagtgccaggggcgatgtaggagccagacatggaggagacggtgtcagtgctgatctgggaggatgccatggacatgacagactgggccaagctgctgctggcagggccttctggggaggaaatagtggatgacagaggcgtccctgtgcaagacgactggtcaatagctccagatgacgacagggtgagattctcactttctggagtcacaccacattcctctccgagatgctgaaccgacggtctctgagagagctgtgtctccgactcgctgcaggaatgctcatcttcctcttcatgcagcacggaagagttttgggaagtggatttggagagactctttttgagtttgagtccctgactgctgctgtcagacaggcggtcaagaggcgagatcgtcctgacggggggcaggtggccatcactgccatatgaagggagcattcctgagaggtggccatctccaagcacgtgaagtggaggaactgctggggacggggtgaggggcccgttgagggcctccagaagagatactacttcatagcctggtggaatattctctgaggatggatgctcttcagagtcagatgtctgggatgagatgatggggttaaagctggttggggacaaggggcccaattttttcctcatggctcggatctgaagcagtgcccggaaggcagtccccctgccgctctggggcttacgcagtcggcagatggggcagttgttggcctggtagcgcagcgtgtctgcacaggtgttacagaggcagaggtggcgacagggcagaatcaaggtgtcccggacatccgagagacacaccacacactcggcactgttatcactcacttcgtcttcagccaccttagaatcttgtgtgttgtacttgttttcaattccatagatctcctgaaggaggtagctgaccccgtctacatttgatggagaccattcaagggcctgagctgctgtgaggtcatagcctctgccgtggcagcctggctgcagctctttcat

SEQ ID NO: 133645 - DNA, 1408 bp, Homo sapiens
  misc_feature (1)...(1408): n = a,t,c or g
aattctaacaacagccccttcgagaaaagccagcaagtggagaccacccagcgaaaaacgcaaacaggcgctggccatcacctacgagatacccatatgtagaaagctgaaactggatgccttccttacaccttatacaaaaatcaattcaagatggattaaagacttaaacgttagacctaaaaccataaaaactctagaagaaaacctaggcattaccattcaggacataggcataggcaaggacttcatgtctaaaacaccaaaagcaatggcaacaaaagacaaaattgacaaatgggatctaattaaactaaagagcttctgcacagcaaaagaaactaaaatcagagtgaacaggcaacctacaaaatgggagaaaattttcacaacctactcttctgacaaagggctaatatccagaatctacaatgaacgcaaagagatttacaagaaaaaaacaaacaaccccatcaaaaatgaattgtctcaggatggctgccagcactccaatcattacattcaaatttcaggaaaacaaaaatataagcataacctttatgcaagccaagaaaaaaaagcaaggcagaaaagagaagcgagcaactatgacaagcgaactctaatcaatgaaacaaaaacgcagaaacgaccactggatttggaaaacatttgtggctttgacaagngtgtgtctgacaaacagcacagcgacacttttatttccagcttgagaagcagtctcaggggtggtaactgtaatgtcaatatcactgccttctcaaaacacaagtttcttcaagaaatgcagttagagtcagctatccagcagacatatgaatgtctaaagcacaaggaagtttcagggctggatatagaaattcatttggaagtgagagatcctaccagagagaaccaacgagtgaagctgcagaccttggctgtgagtgttacagctcttaaggcggcgcgtctggagttgttcgttcctcccagtgggctcctcctctcgctggcttcaggagtgaagctgcagaccttcgctgtgagtgttagagctcataaaagcagtgtggacccaaagaaacagctggcttcacccagtggatcccgcaccgggactgcaggtgtagctgcctgccagtcccggtgccgtgcgcccgcactcctcagcccttgggtggtggatgggactgggcgccgtggagcagggggtggcactcgtcggggaggctccggcagcacaggagcccatggagtgagtgggagactcaggcatggcgggcttcaggtcccgagccatgggctggttgtctcttctaccccagatcctatatgtcatcttcttgcccactccacaccatccactctgacctctttgctgttcttcaaggacgcacaaagtcat

SEQ ID NO: 133646 - DNA, 3342 bp, Homo sapiens; identical to SEQ ID NO: 117636

SEQ ID NO: 133647 - DNA, 1043 bp, Homo sapiens
atgaacaatttgcgaatggggcagcacccagagtcacagcagattcacagagactccagcacaaccacgtggtggaagaagatttatagacaaaaaaagggaaatgacctacagaaaccggaagtgacgcacagaacagctggattgattgcagggaaggatatggacaacaatgatctggccgtggggaagattcaagggaataaaaatgaatcatcaccagccaccaggaagcaccaggagctctctaaatggaatggaggcctcccataccttgggtggtctaaaaggaatgacaactcagcagtaattaacacaataagcatccagattgtggtttttaaatcctattgtgtccagaattggtgggttcttggtctcactgacttcaagaatgaagccgcagacgctcgcggagtgaagctgcagaccttcgaggtgactgttacagctcttaagacagcgcgtctggagttgttcgctcctcccggtgggctcatggtctcgctggcttcaggaatgaagctgcagacctttgtggtgagtgttacagcttgtaaaagcagcgtggacccaaagaactcaggagcccagctggcttcacccagtggatcccgcaccagggctgcaggtggagctgcctgccagtcccggtgccctgcgcctgcactcctcagcccttgggtggtcgatgggactgggcgccctggagcagggggtggcgcttgtcagggaggctcgggcggcacaggagcccatggagggggtgggaggctcaggcatggcgggctgcaggtcccggagccctgtcctgcgggaaggcagctaagacaccgagaaatcacctaagatttcttggagctgcctccactcagctcctcaaactaaaaatgcttacatcggccaaaatctatttcttcatcccaattagttcagcaaagatagactatactattcaaggcttcagtctcaatgccaatacacaagggctctgcacagaccttgcagatacctcatctgtgcacgcagctttagaggtatga

SEQ ID NO: 133648 - DNA, 450 bp, Homo sapiens; identical to SEQ ID NO: 120538

SEQ ID NO: 133649 - DNA, 650 bp, Homo sapiens
tttcgtgtggactggaaggggcggaggtaaccacaagcggctagtggcggctgcctgcgtccccaaccccctccgcgcagcgctcgcgacacgcgtgccaggagtgggagcgagcggcggggccagctgcgttctgagcctgggcgcagctgccatctgctctgggaagcaccagggtgtccccgccgccctcagctcgaagtcagccaccatggaggcgcaggcacaaggtttgttggagactgaaccgttgcaaggaacagacgaagatgcagtagccagtgctgacttctctagcatgctctctgaggaggaaaaggaagagttaaaagcagagttagttcagctagaagacgaaattacaacactacgacaagttttgtcagccgaaagaaaggcatctagttgagataaaacaaaaactcggcatgaacctgatgaatgaattaaaaccagaacttcagcaaaagctggcatgacatgcagactgacactgcctacaagaagacacatgatacgctgagtcacgcagggcaaaaggcaactgcagctttcagcaacgttggaacggccatcagcaagaagttcggagacatgagttactccattcgccattccataagtatgcctgctatgagacgaaagtaggc

SEQ ID NO: 133650 - DNA, 2025 bp, Homo sapiens
atgagagctgatgggactgctggaaaagatccctttgcgactgacaagcaactgcctgaacttttgattcagcattgctgggatggactcttggctgtctgcggagggagcacagtgggagtgagactgcccttcattttgcatgggagctgggtgaggcctgtggctgccagctttcccccacttcccgacaacctgcatgactcagcagagccagccataatcctgctagagcctacccaaatgagaaggaaccagaaaaccaacgctggtactatgacaaaacaaatctcttcaacactcccaaaaaatcatcatactagttcaccggcaatggatccaaacaaagaagaaatccatgatttacttgaaaaagaattcagtaggttagttattgagctaatcagggagggaccagagaaaggcaaagcccaatgcgaggaaatccaaaaaaaagatacaaaagtaaagggagaaatattcaaggaagtagatagcttaaagaaaaaacaattaaacattcaggaaaatttggaaacacttttagaagtgctaaatgctctggaaagtctcagcaatagaattgaacaagtagaagaaagaaattcagaacgcgaagacaaggtctttgaattaacccaatccaacaaagacaaagcacaaagaataagaaaatatgaaccaagtctccaagaagtctgggattatgttaaactaccaaaattaagaataatcagttttcctaacgaagaagagaattccaaaagcttggaaaacatatttaggggaagaatcaaggaacactttcacagcattgctagagatctagacatccaaatacaagaagaacaaacaacacctggaaaattaatcgtaaaaagatctttgcctaggcacattgtcatcatgcgagcgcccactcccatggaccacccaagggctgaggagtgcgggcgcagggcgcgggactggcaggcagctccacctgcagccccagtgcgggatccactgggtgaagccagctgggctcctgactctgaaggaagaaaatcggaacacatccaaacatcaaaggaacaaactccggacacgccacctttaagaactgtaacactcatcgcgagggtccgtggcttcattcttgaagtcagtgagaccgagaacccaccaattccagacacaatcaggttatccaaagttaagatggaggaaagaatcttaagagctgtgagacagaagcaccaggccctcgtctatacaaagcatggcactggcatctgcatggcttctgatgagggccccagggagcttttatttatggcagaagataaacggggagcagatgtctcagatgcgccgggagtgggtgccttccgccggctgtacagagcgccggcaggtggcgcccagcggcgagcttgttccagcttggtttgggccaggtggactggaaggggcggaggtaaccagaagcggctagtggcggctgcctgcgtccccaaccccctccgcgcagcgctcgcgacacgcgtgccaggagtgggagcgagcggcggggccagctgcgttctgagcctgggcgcagctgccatctgctctgggaagcaccagggtgtccccgccgccctcagctcgaagtcagccaccatggaggcgcaggcacaagcagatccacacgtgagtcccggtttccgcgatcggggagcgacctctgcctcccgtggcgcgcggggcccccggccgcccagctccctgctcccggggctgcctgctggaggagcctgcggtggcttcaggaagggcggcctcatatcttggggtcacacttggaacagggttggggaattccgatggaatcgttcaagaatgggggtaaacggaccgtggaaaggggcagaggggcagaacgccctgaatgagagtgggttggcgattgcgtgggcctggagtcgcccaacaggtttgctgccaggattacaattgtctgaacagcacgaaccttactcgtttgttccatcctcctaa

SEQ ID NO: 133651 - DNA, 1007 bp, Homo sapiens
tcagagccctcgcttgctctcggcacctcccctgcctgggatcccactttggcggcatttgaggagcccctcagcccccactgcactgtgggagcccctttctgggctggccaaggccagagcccactccctcagcttgcagggaggtgtggagggagaggcgcgagtgggaaccggggctgcgtgcggtgcttgcgggccagctggagttccgggtgggcatggacttggtgggccccgcactcggagcagccagccagccctgctggccccgggcactggggaacttagcacccgggccagtggctgcggagggcgtactgggtaccccagcagtgctggcccaccggcgctgcgctcgatttctcgccgggccttagctgccttcccgcggggcagggctcgggacctgcagcctgccatgcctgagcctcccacccactccatgggctcctgtgcggccagagcctccccgacgagcaccaccccctgctccacggcgcccagtcccatcgaccacccaagggctgaggaatgcgagcgcacggcgcaggactggcaggcagctccacctgcagccccagtgcgggatccactaggtgaagccagctgggctcctgagtctggtggggacgtggagaacctttatgttgcccgctttccagtcgggaaacctgtcgtgccagctgcattaatgaatcggccaacgcgcggggagaggcggtttgcgtattgggcgccagggtggtttttcttttcaccagtgagacgggcaacagctgattgcccttcaccgcctggccctgagagagttgcagcaagcggtccacgctggtttgccccagcaggcgaaaatcctgtttgatgggtggttccgaaatcggcaaaatccctgttaatttacaaatcagcatactttgcaccgtagcatgacctagtagttcaatttcaaaacacaaaaaagtatctgactctaaatcttctgtgcgaagagcacaagagcacat

SEQ ID NO: 133652 - DNA, 2572 bp, Homo sapiens
atggtgttggaagttctggccagggcaattaggcaggagaaggaaataaaaggtattcaattaggaaaagaggaagtcaaattgtccctgtttgcagatgacatgattgtatatctagaaaaccccatcgtttcagcccaaaatctccttacactgataagcaacttcagcaaagtctcaggatacaaaatcagtgtacaaaaatcacaagcattcttatacaccaacaacagacaaacagagagccaagtcatgagtgaactcccattcacaattgcttcaaagggaataaaatacctaggaatccaacttacaagggatgtgaaggacctcttcaaggagaactacaaaccactgctcaaggaaataaaagaggatacaaacaaatggaagaacattccatgctcatgggtaggaagaatcaatatcgtgaaaatggccatactgcctaaggtaatttacagattcaatgccatccccatcaagctaccaatgactttcttcacagaattggaaaaaactactttaaagttcatatggaaccaaaaaagagcccgcatcgccaagtcaatcttaagccaaaagaacaaagctggaggcatcacactacctgacttcaaactatactacaaggctacagtaaccaaaacagcatggtactggtaccaaaacagagatatagatcaatggaacagaacagagccctcagaaataacgcagcatatgtacaactatctgatctttgacaaacctgagaaaaacaagcaatggggaaaggattccctatttaataaatggtgctgggaaaactggctagccatatgtagaaagctgaaactggatcccttccttacaccttatacaaaaatcaattcaagatggactaaagacttaaacgttagacctaaaaccataaaaaccctagaagaaaacctaggcattgccattcaggacataggcatgggcaaggacttcatgtctaaaacaccaaaagcaatggcaacaaaagacaaaattgacaaatgggatctaattaaactaaagagcttctgcacagcaaaagagcttctgcacagcaaaagaaactaccatcagagtgaacaggcaacttacaaaatgggagaaatattaaaccttcttaatttatctggcaattcagagatttctttttcaactgcaaccattgctgaggatctgggatttttgccctggtgtaccagaagaatcggatcacacctgggcttggagaatgagtgccaggttttactgagtggaagtagctctcagcagatgaaggagccagaagggagatggagtgggaaggtttcccctggagtcgggcctctcagcagctggactcttctccaactgccctggccaaactccgcattgttctgccggtggatggcctgcctgagtgctgggtcttcgggtttttatacgcacaggatcggggtatggtgggccaggggtgtcttggaaaatgcaacgtttgggcacaaaggcaagagtgcctgtcctcacctaagtccgtgggcctatgcccgagggacacaatatccttttttcaagcctgttctttggaagacgagttctcattatagttgcatggtaacaccaatccctggtaacaccagagtaaatggtcagtgccataaggctatgtctgggcagtttaactgcagtctcatgctgtaccaaacatcacgcactttgaccatcaatcaggtcctgcaactgattacctcaggcaatgaggggcttagtacacgggccagcggctgctcgggaaggtgtactcggtcccccagcagtgccagcccaccggcgctgcgctcgatttctcgccggggccttagccgccttcccgtggggcagggctcgggacctgcagcccgccgtgcctgagcctcccaccccctcggtgggctcctgtgcggcccgagcctccccgatgagcgccgccccctgctccatggcgcccagtcccatcgaccacccaagggctcctcagccgcactcctcagtgcgggcagatggcgcaggactggcaggcagctccacctgcctccccagtgcaggatccactggaagaagccagctgggctcctgagtctagtggggacttggagaacttttatgtctagctaagggattgtaaatacaccgatgggcactctgtatctagctcaaggtttgtaaacacaccaatcagcaccctgtgtctagctcagtgtttgtgaatgcaccaatccacactctgtatctggctactctggtggggacttggagaacctttgtgtccacactctgtatctagctaatctagtggggatgtggagaacctttgtgtctagctcagggatcgtaaacgcaccaatcagcaccctgtcaaaacagaccacttgactctctgtaaaatggaccaatcagcaggatgtgggtggggcgagacaagagaataaaagcaggctgcctgagccagcagtgacaacccccctcgggtcccctcccacgccgtggaagctttgttctttcgctctttgcaataaatcttgctactgcccaaaaa

SEQ ID NO: 133653 - DNA, 589 bp, Homo sapiens
cttaacggagaacaaatgttacttagtgctgcagaaggagaacaatgctaggttccacaaggtagtctgtccttttgctgtcttgtctacaccagagaacctttggttgacttgctttaatattggcttcagtcctgttcatcaggagttgctgagggggtcacttggagatccaggctcgccaagcagccactgtcttcagcaccagctaatgccctgctagtgggcaaagagggagctctctgaaacaagtgcaattccaaatcccttaacccaagctagagcatagaattcacaggaccgctgcctttgtcctcctccagctcagagactgatgtctatatcatgaatgcgctaagaaagggagaatcacgagtggaatccagtatcagtagctgggagcaaaagacacttgcggtaagggtcctcgggtttttcactgcaagacttttacctaatccttgaatgttaaaaggctaaaaactccactagtcggaagtgacgtgccagcttagccccgcaggtccgccacgtaattggccgccgccacagctagccaccctctccccagactggcccgaagacgaaa

SEQ ID NO: 133654 - DNA, 445 bp, Homo sapiens
  misc_feature (1)...(445): n = a,t,c or g
gtgggatttttttttttgcttctctaggtgaaggtttaaattaacttcagcatgggtaaaactattctttccttcttttttctctcccagagttctcaccacctcctcccaggctaaatccttcatgttgcaggagacagagaatcccaggtgagacccggactttttctcctccctcccttccttttttcaccgtgttcaggataaattatcttggttttgtttctggagggaaaagggcagagaaggccctgacttgaatctcaatcacatttctgcacacacgtacctgagggagacaagaatagcaagagggggtcgggaacaatttaaacattggctttatcggggctttaggaattggnggaaaaaataattccccacttcttttttcttttacccaaatccaacttcagttttctctccaactctctaaaaccaccac

SEQ ID NO: 133655 - DNA, 1849 bp, Homo sapiens
aatacaggttccctaagcaacatgaactgttaggctcagagagggatttccctagtcactgacttactgagggattgactcaagattcccaggcactagacagaagcagtcgggaaaggaatcatttcctgattgcctgtgggggaaaaagaaacttttttggatagaacagtctggatggactctaacacagtaaaaagtgaaggcagtgcattcttcagaagggcggcagatggggcaccacgcatccccacagaggggctgtcctgcggtccttgcaggagttgccaggctcccaaaatctcctcctggtgctatcccccccctgccttaaaaaaggtgaggaggatgatggggaaggagtccaacaaacttgggataagaggaatgagtgcgctggtaaaacccattacttaggtaaacccttgggtaaaactttaggaaaggaggcccaaaatgggaaagtgtgggttttttattttgcttctctaggtgaaggtttaaattaacttcagcatgggtaaaactattctttcccttctttttttctctcccagagttctcaaccacctcctcccaggctaaaatccttcatgttgcaggagacagagaatcccaggtgagacccggactttttctcctccctcccttcctttttttcaccatgttcaggataaattatcttggttttgtttctggagggaaaagggcagagaggccctgacttgaatctcaatcacatttctgcacacagtaccttggacagaagtcatgatgatgggggccatgactggcaacctgctgggagaggtggcctgcagtgtgtctggagtacactgggggaccccgggagcatcttctgtgtctgtggcccctggcaggcctgcatcacttggtgctatgccactatcagatccaccacaggagccatgtgctattcattccacaaggagccctttcaacagggagacatcaggcccaactggattctagccaccttggtctccagtctcctactctcaggcccatgagtgacaattcagcacaggaaatttggttctgtgagcagcatctattggcaggatgaccagcaattcttgtgtgtggtttgcaaagatcttaacggagaacaaatgttacttagtgctgcagaaggagaacaatgctaggttccacaaggtagtctgtccttttgctgtcttgtctacaccagagaacctttggttgacttgctttaatattggcttcagtcctgttcatcaggagttgctgagggggtcacttggagatccaggctcgccaagcagccactgtcttcagcaccagctaatgccctgctagtgggcaaagagggagctctaatccttgaaatgttaaaaggctaaaaaactccactagtcggaagtgacgtgccaagcttagccccgcaggtccgccaacgtaaatttgccgccgccacagctagccaccctctccccaggctggcccgaagagaggaaaagtgttggaagtccaacaagcccgcccccgccccgccctcttcgtcgactttcagctgcaccggggaggcggcggcgcctggccagagccgggggcctggagcctggactagacagcctcgccggccggggcgccagtccagcgccctgcgggcaatgggcttcagcgctcgatgccagccatgcgcgggccttgtatctccagaggattcctcgggtcacctggacgccagcatctcagccacctgcccctctgggtcccttcttgcccttgattccccctgctgcttctcatcgccagccctcctcctccttcttccgcaggcaccgctagacccggccgcggccgc

SEQ ID NO: 133656 - DNA, 2097 bp, Homo sapiens
atggaagagaagaccaatgtgcagctcccacctggacaaacagaacagcatgtggaaattcacatcatgaacttttgctccaagaaccaccataggatcacaccagaaaaaccaaaagaactcacagacccttttaaagaagcagcttgctgctgcaaactctatgagatagacaaaaaactatacagaatggcagaatggatcaaaatccacaaaccaagtatctgctgtcttcaagagactcacctgacacataaggattcacataagcttaaggtgtccatcaccttcaaggacttggccgtgcggttctcggaggaggagtggcggctcctggaggaggggcagagggagttctaccgagacgtgatgcgggagaactacgagacgctggtctctgtggagcctggaagagctgttgggggagggagccacgctgatgaggggcaggagcctgctggttgtggagatccccaggccctggtgcagctggtgaaggagatcccagagttcttgtttggagaagtcaagggcgctatggacagccccgagagcgagagccggggagccagcctggatggagagagagcgagtcccgaggcagctgcggcaagagagccctgccctctccgaggcctgctcagctgccttccagacggccctaccagccagccccacctggccaccacgcccaccgacagctcgtgttccagtggcccaactggtgacggggtccagggaagtcctctccccatcagaatttctcctgggaacagccccttgcaaggcctcatcaactgtctgaaggaaatccttgtgcctgggccccggcaccccgagacatccccaagcttcttgccacctctccctagcctgggcacgtccaggctaaccagagcagacctggggcctgggagcccgccctgggcagaagcgaccagagagcctgttctgcctctgggtctgcagagctgtgtgagagatggccccagcaggcccctggccccccgaggaacccccaccagcttctcctcatccagcagcaccgactgggacctggattttgggagtcctgtggggaaccaggggcagcatcctggaaaagggtctgcccccaagccctccccgctgcactgcctggagagcgccctgagggggatcttgcctgtaaggcccttgcgcttcgcctgcgtgggaggccccagccccagccccagccccggctccagctcgagcttcagcggctctgaaggagaagacccgaggccagagcctgagctctggaagccgctcccccaggagagggaccgccttcccagctgtaagcctcctgtccctctgtccccatgtcctggtgggacccctgctggcagcagtggcggcagccctggtgaagaccccaggagaacagagcccaggtactgcagcggcctcggtgcagggagtcctgcacattggccgtgctttagttccctgtaaggtacagctcaggatccctgcccggtttctcagctggagaaaaggcccagggttagtgaagcatccagaggcctggagcttggacatggaagacccagagttgcagccgccatgccactgtgggaagcccctgcagcaggagctgcacagcctcggtgctgcccttgcggagaagctggatcggctcgccacagcgctggcaggcctggctcaggaagtggccaccatgaggacccagggagcctctcctcctgcagccagtgcagatgcagacgtgccgacctcaggagtggcaccagacgggatcccagagcggcccaaggagccgagcagcctgctgggaggagtgcagagggccctccaggaagaactgtggggtgagggttcccagggaaggacaggattccagtccttccaccagcgtggaattgtggccgtgcgcccttcttcttgggggtcttgcatactccctctgactgtgaaatacaagacttgtctctggttaaaagacatttcaaggatcagaagaggagggacacagacatgcccagagtggaggagacccaggaagaaggtgatgggaggatggaggtagagattgaagtgctgtgtctataa

SEQ ID NO: 133657 - DNA, 293 bp, Homo sapiens
cgcatggcagcactgagaggtgacagcatgctggcatccctcgctcgctcgctctcggcgcctcctctgcctggacgcccactctggcggcacttgaggagcgcttcagcctgccgctgcactgtgggagccccttcctgggctggctgaggccagagccggctccctcagttttttggtccttgctacctttatgagctgtaacactcaccgtgaaggtctgcagcttcgctcctgagccagcgagaccacgaacccaccagaagaaagaaactccgaacacatctgaacat

SEQ ID NO: 133658 - DNA, 448 bp, Homo sapiens
ctagttagtggcacatctgggaatctcaactagacggcttggctccagattgtgtgctcttaatgcgtccggaattggtgggttcttagtctcactgacttcaacaatgaagccgtggaccctggcggtgagtgttacagttcttaaaggacacgtgactggagtttgttccttctgatgttcggatgtgttcggagtttcttccttctggtgggtttgtggtcttgctggctcaggagtgaagctgcagaccttcgcggtgagtgttacagctcttaaggcggtgcgtctggagttgttcgttcctcctggtgggttcgtggtctcactagcttcagaagtgaaactggcttcacccagtggatcccgcactggggctgcaggtggagctgtctgccagtcccgcgctgtgcacctgcactcctcagcccttgggtggtcaatggga

SEQ ID NO: 133659 - DNA, 439 bp, Homo sapiens
  misc_feature (1)...(439): n = a,t,c or g
gagcaaaacaacaaagccaccagggtaccgagaaggacccaaacggtttgccactgccggctcgntaccagctttttattcctttatttgaccccgcccacatcctgctgactggtccattttacagagtgctgattggtccattttacagagtgctgattggcccatttttacagagtgctgattggtacgtttacaaactttagctagacacagcactgattggtgcatttacaaatctttagctagacagaaaagttctccaagtccccactcgacccaggaagtccagctggcttcacctctcaccgggaggcaagaagattgcagtgagccgagatcggcaccattgcactccagcctgggtccgacagagcgagactccatttgtgtagcggcgtcttctgtccggtggacgaggccgggcgcacgattttcc

SEQ ID NO: 133660 - DNA, 732 bp, Homo sapiens
atccaagctccagaaactaaaacgatcactttctttcaagaccaagagtttacggagcaaaagtgctgacaacttcttccagcgaaccaacagcgaagacatgaaactgcaagcacacatggtggctgagatcagccccagctccagcccactccctgctccaggaagcctgacgtccacacccgccaggctggtctgcatccaggtggcaaggctcatgcctttcaggaatacatcttcaagaagcccacttttctgtgatgtctgcaaccacatgatagtggctttctcttcttgaggccggcaagaccacgagcccaccgggaggaaaggaacaactccagacgcgtcgccttaagagctgtaacactcaccacggaacgtctgcagcttcactcctgagccagcgagaccacgaacccaccagaaggaagaaaactccgaacacatccgaacatcagaaggaacaaactccggacacgccaccattaagaactgtaacactcaccgcgagggttccgaggcttcattcttgaagttcgtgagacccagaacccaccaattccagacacacatatatgctaatcttagaaagacatggatactatctcccctctccactccatccttaaacatctcatgactattaagaatgagaaagggaccaagtggcaagagaacatcttcatatgcatacaactttccagaaaataaaaatttgccaagttgtca

SEQ ID NO: 133661 - DNA, 1262 bp, Homo sapiens
atgcccctgtcctatgcctataaaaacgctgagaccctagcaggcagacacacaagcagctggatgtcgagaggagcatatcagcggaggaacacacgggcagctggacgtccagaggaatgcactgacagaaactggcatgctggcagaacacgtcgaatttggctggggcagttggaggagagatgttcagatgtgttcggagtttctttcttctggtgggttcgtggtctcgctggctcaggagcgaagctgcagaccttcacggtgagtgttacagctcatagaggtagcaaggaccaaaaaagtgagcagaagcaagacttattgcaaaaagcaaaagaacaaaccatccacaacgtgaaaggcgacccaagcgagttaccactgctggctccagcagcctgcttttattctcttatctgtccccgcccacccccccacatcctgctgattggtccattttacagagagctgattggtccattttacagagagctgattgggaggcagctaaggcccggcgagaagtcgagcacagcagccgctggcccaggtgctaagccgctcactgcccggagccggcggactgctccgagtgcggggcccgccgagcccacacccacctggaactcgcgctggccggcaagcgccacgcgccgtcccggttcccgccggcgtctctccctccacacttcccctcaagctgagggagccggctctggcctcagccagcccaggaaggggctcccacagtgcagcggcaggctgaagcgctcctcaagtgccgccagagtgggcgtccaggcagaggagacgccgagagcgagcgagcgagggatgccagcatgctgtcacctctcagtgctgccatgcggttttggattcctggaagcccatagttccagtcctgaacaaacggaccatgaacagaactgccccgcagatataaaggtgatgaggcttgcaggccagcccaccaatgctcgtggagctgctaacagagcccagccattgcacagtacttctgtgtctcatcttaaggctgtaatatttaaaatacagacaagacagcagaaaaactcccacttcccacccctgtttctggaaatgaccacaagcctggctacagggcgactgagaccatcatgggtggactacgcacgtccagctcttagtgtggtctccgtgtctcggttttctcttttgacttctcttttggagctcttggttgagacacttggtgagtgtggacttttaag

SEQ ID NO: 133662 - DNA, 898 bp, Homo sapiens
ccatttatttatttatttattggtggtcttgctgtggtgtccaggctggcctcaaactgctggactcaaaggatcctcctgcctcagcctcctgagtaactgtaattataggccaccactctaggctctacttcttggaacgcaaaaactaccgagagtctggaattttatcatggtccgaagaatacaggatggagtgaagccatctgtgtccatagcagagagagagatgaaatcgcgaaagtctgcagcttcactcctgagccagcgagaccacgaacccaccagaaggaagaaactccgaacacatccgaacatcagaaggaacaaactccagacgcgccaccttaagagctgtaacactcaccgcgaaggtctgcagcttcactcctgaagccagtgagaccaccagcccaccgggaggaaacaaacaactccagacacgctgccttaagagctgtaacacttgccgtgaaggtctgcagcttcactcctgagccagcgaggaccacgaacccaccagaaggaagaaactccgaacacatctgaacatcagaaggggacagactccagacggcaccacctttaaggagctgttaacattcaccgcgagttttccgcggctttcattttttggaagttcagttaaggacccaaggaacccaccaattccggacacagtagcatttgggaataataagaattgtagctgggcatggtggtacacgcctgtagacccctagcagctgccatcatcctcaccatccgcatattattgatatattaactctttgatggcaaccatggcttatcccccctatctccctatgccctacagcagggcagtggaatggttaagaggctttgaagtctaccagtgctggcttaaaaccctaaa

SEQ ID NO: 133663 - DNA, 927 bp, Homo sapiens
gtacaagaagaacttgaaggccctctacgtggtgcaccccaccagcttcatcaaggtcctgtggaacatcttgaagcccctcatcagcacaagtttgggaagaaagtcatctatttcaactacctgagtgagctccacgaacaccttaaatacgaccagctggtcatccctcccgaagttttgcggacgatgagaagctccagagcctgcacgagggccggacgccgcctcccaccaagacaccaccgccgcggcccccgctgcccacacagcagtttggcgtcagtctgcaatagtgcctgcgcaccgagggcctgttccggagatccgccagcgtgcagaccgtccgcgagatccagaggctctacaaccaaggggaagcccgtgaactttgacgactacggggacattcacatccctgccgtgatcctgaagaccttcctgcgagagctgccccagccgcttctgaccttccaggcctacgagcagattctcgggatcacctgtggagagcagcctgcgtgtcactggctgccgccagatcttacggagcctcccagagcacaactacgtcgtcctccgctacctcatgggcttcctgcatgcgggtcccgggagagcatcttcaacaaaatgaacagctctaacctggcctgtgtcttcgggctgaatttgatctggccatcccagggggtctcctccctgagtgcccttgtgcccctgaacatgttcactgaactgctgatcgagtactatgaaaagatcttcagcaccccggaggcacctggggagcacggcctggcaccatgggaacaggggagcagggcagcccctttgcaggaggctgtgccacggacacaagccacgggcctcaccaagcctaccctacctccgagtcccctgatggcagccagaagacgtctctag

SEQ ID NO: 133664 - DNA, 689 bp, Homo sapiens
aggaagtacaagaagaacttgaaggccctgtacgtggtgcaccccaccagcttcatcaaggtcctgtggaacatcttgaagcccctcatcagtcacaagtttgggaagaaagtcatctatttcaactacctgagtgagctccacgaacaccttaaatacgaccagctggtcatccctcccgaagttttgcggtacgatgagaagctccagagcctgcacgagggccggacgccgcctcccaccaagacaccaccgccgcggaccccgctgcccacacagcagtttggcgtcagtctgcaatacctcaaagacaaaaatcaaggcgaactcatcccccctgtgctgaggttcacagtgacgtacctgagagagaaaggcctgcgcaccgagggcctgttccggagatccgccagcgtgcagaccgtccgcgagatccagaggctctacaaccaagggaagcccgtgaactttgacgactacggggacattcacatccctgccgtgatcctgaagaccttcctgcgagagctgccccagccgcttctgaccttccaggcctacgagcagattcttgggatcacctgtgtggagagcagcctgcgtgtcactcgctgccgccagatcttacggagcctcccagagcacaactacgtcgtcctccgctacctcatgggcttcctgcatgcggg

SEQ ID NO: 133665 - DNA, 2648 bp, Homo sapiens
tcttgaagcccctcatcaggtatgcgtcactctgggagaggacctcgctggggttggaggtttcacccctcagggtccatgggacggaccagctggtcatccctcccgaagttttgcggtaagtgcctgttagaccccagaagccgcatcaatacatcttcgtgcttccaaagggcttggttcagttgccaactaatggtcatgtgcccccccatcctgtggccgggtccctgctgtatgcacagtgcccggcacatagtagggcttcaatacgtatttgcctgtgttaaggaaggactgttacctgagcacagagggtcttttctagcaagccctttccaggcactggggataaagtaattaacaaaagggacgaggttcctttagcattaccggccagctctcgtcttaaattcagacacttgcgagagctgagggtggtcacgcccaccttggggctgaccgcatggtaagcaggtgaggctgctctgctggccaggggcctcaggagagactggacatttgctggaggttggaggcccccgctgcccacacagcagtttggcgtcagtctgcaatagtaagtgagccggggatgtgcctgctcctatgccctggagccctgggagctgtggggcgcttctgggtctaagcacatctcccgaggggaggggtacaagcaagaattctatgctgagagtccccgatgccctccagtgggtggacgactgtcggaaagccaggtgggagtcactggccacagagaacgctgtgctgaccaacaaactgtgctctgtgctccagagtcctcgcagaactcggccaggcgagtttgcccatggggcgttggcagagggcacgtggtggtgtccagctggtggctggctaggatcatccaagacatgccttatgttcctgcacctctggcctcagtggggactgttggccagtgcacctgcccgcagtgtccccagcctgatgttcccacggtagctgtgcttcttccagggcagctcagggtttccagcaaaaaggttcccgagatcacaggtgggaagagtcaggctctttaggacaggagagaaggacctggcccagaaactgaacagttgcttctgtacgttgttgatgacctgtggactctaaggatcagggagaggaccctgcatccagaggtgggcagttggaatgtaaacccctcacgaggccagctgtggacaggcacggaagcctttctctctctagaaaggtgagacggggccggctccagctggatgacgtgagggctgctgggtgcacctctctgggtggtttgtcaagcacttcgggcagtgctggtctgtaggaagccctctcgaaatggggactcctctgatgggatcaactttgatttgcagataccattgccagtagggtgggtgcagtcaagaacttggagtggggtgagccttgtgggctctccacagctcctgaggctagaacatgctgacttccatcagggagaaggccctgccagaccggggtccctgttaggggggttgaccttgttggggggcttccctgagggaggggcagtggagctgagctctgaggacggggagaagctggccatgccgtgtgacagaaaggccccagagaggagagcaggtgaaggggctcgtggctgtgggagtgcgggagcgtgcggggcttcgaggaagttgggaggagaagggtacaaccaaggtgagggtgtcccgcagtcctgagccccgagctgcctggtcagcgagcacagcgctccggggcctcagcgagagctgccccagccgcttctgaccttccaggcctacgagcagattctcgggatcacctgtgcgtagctgccctggcgcaggggtggggggcttggtcctcagatgctgtcccccagctactggcccgtcgtcctccgctacctcatgggcttcctgcatgcggtgagtggggaaggggggagcttggggtgaagcccagtggccttccctcccatgctgggcccgcatggggtcaccaagttcgtaccgtctgtgctacagcccatccccaagattgcatctccccagaaggtgcagtggaagaggagatagtggggggttgaggctgtcacagaaggtcagagccagagggtcctccagatctggcctatcccagggggtctcctccctgagtgcccttgtgcccctgaacaatgtttcactgaactgctaatcgagtactatgaaaagatcttcagcacccccggaggcacctggggagcacggcctggcaccatgtgaacaggggagcagggcagcccctttgcaggaggctgtgccacggacacaagccacgggcctcaccaagcctaccctacctccgagtcccctgatggcggccagaagacgtctctagtgttgcgaacactctgtatatttcgagctacctcccacacctgtctgtgcacttgtatgttttataaacttggcatctgtaaaaataaccagccattagatgaattcagaaccttttaatgaaaactccatgcctctggtccttggacttttgtccatggttcctaaactgtggaccgggatagaataatgcaaaaaaaaaaaaaaaaaaaaaaaaaaaaaaaaaaaaaaaaaaaa

SEQ ID NO: 133666 - DNA, 2782 bp, Homo sapiens
atgcctgatgcctgtgttctcatgggacgcctgtgttctcatgggacgcctgtgccctcatgggacgcctgtgttctcatgggacgcctgtgccctcatgggatgcctgtgccctcatgggatgcctgtgccctcatgggacgcctgtgttctcatgggacgcctgtgcccctcatgggacgcctgtgccctcatgggacgcctgtgccctcatgggacgcctgtgttctcatgggacgcctgtgcccctcatgggacgcctgtgccctcatgggacgcctgtgccctcatgggacgcctgtgttctcatgggacgcctgtgcccctcatgggacgcctgtgttctcatgggactcctgtgccctcatgggacgcctgtgttctcatgggacgcctgtgcccctcatgggacgcctgtgttctcatgggacgcctgtgccctcatgggacgcctgtgttctcatgggacgcctgtgcccctcatgggacacctgtgttctcatgggacgcctgtgccctcatgggacgcctgtgttctcatgggacgcctgtgcctctcatgggacacctgtgttctcatgggacgcctgtgccctcatgggacgcctgtgccctcatgggacacctgtgttctcatgggacgcctgcattctcatgggacgcctgtgccctcatgggacacctgtgttctcatgggacacctgtgttctcatgggatgcctgtgccctcatgggatgcctgtacccctcatgggacgcctgtgttctcatgggatgcctgtaccctcatgggacgcctgtacccctcatgggacatctgtgccctcatgggatgcctgtgcccctcatgggatgcctgtgccctcatgggacgcctgtgttctcatgggatgcctgtaccctcatgggacgcctgtgcccctcatgggatgcctgtgttctcatgggatgcccgtgccccgcatgggacgcctgaattctcatgggacacctgtgccctcatgggacacctgtgttctcatgggacgcctgtgcccctcatgggatgcctgtgccctcatgggacgcctgtgttctcatgggatgcctgtgcccctcatgggatgcctgtgttctcatgggacgcctgtgcccctcatgggatgcctgtgtgctcatgggatgcctgtgcccctcatgggatgcctgtgccctcatgggacacctgtgttctcatgggacacctgtgccctcatgggacgcctgtgttctcatgggacgcctgcattctcatgggacgcctgtgccctcatggtacgcctgttccctcatgggacgcctgtgttctcatgggacgcctgtgccctcatgggacgcctgtgccctcatgggatgcccgtgccccgcatgggacgcctgaattctcatgggacacctgtgcccctcatgggacgcctgtgttctcatgggacgcctgtgccctcatgggacgcctgtgttctcatgggacgcctgtgcccctcatgggacgcctgtgttctcatgggacgcctgtgcccctcatgggacacctgtgccctcatgggacgcctgtgccctcatgggacgcctgtgttctcatgggacgcctgtgcccctcatgggacgcctgtgccctcatgggacgcctgtgttctcatgggacgcctgtgcccctcatgggacacctgtgttctcatgggacgcctgtgccctcatgggacgcctgtgccctcatggggaacgcctgtgcccctcatgggacacctgtgttctcatgggacgcctgtgccctcatgggacgcctgtgccctcatgggacgcctgtgttctcatgggacgcctgtgccctcatgggacgcctgtgcccctcatgggacatctgtgcccctcatgggatgcctgtgcccctcatgggatgcctgtgcccctcatgggacgcctgtgcccctcatgggacgcctgtgcctctcatgggacgcctgtgcccctcatgggacacctgtgttctcatgggacgcctgtgcccctcatgggacacctgtgttctcatgggacgcctgcattctcatgggacgcctgtgccctcatgggacacctgtgttctcatgggacacctgtgttctcatgggatgcctgtgccctcatgggatgcctgtacccctcatgggacgcctgtgttctcatgggatgcctgtaccctcatgggacgcctgtacccctcatgggacatctgtgccctcatgggatgcctgtgcccctcatgggatgcctgtgccctcatgggacgcctgtgttctcatgggatgcctgtaccctcatgggacgcctgtgcccctcatgggatgcctgtgttctcatgggatgcccgtgccccgcatggaacgcctgaattctcatgggacacctgtgcccctcatgggacgcctgcattctcatgggacacctgtgccctcatgggatgcctgtacccttcatgggacgcctgtgttctcatgggacgcctgtgccctcatgggacgcctgtgttctcatgggatgcctgtgcccctcatgggatgcctgtgccctcatgggacgcctgcattctcatgggacacctgtgccctcatgggatgcctgtaccctcatgggacgcctgtgcccctcatgggatgcctgtgttctcatgggatgcctgtgcccctcatgggacgcctgcattctcatgggacacctgtgccctcatgggatgcctgtacccttcatgggacgcctgtgtgtggttgccatgattactacctga

SEQ ID NO: 133667 - DNA, 552 bp, Homo sapiens
gtaccacaggacagcctggggcaggccctagcaggccaggccacaccagagatcccattggggctgcagctgcacactgtccttgtccaggagattcaggagctcattgaggcacagacacgtgctcctggtccatgtgcagaagtaagagcactgccagcaccagcggcggagccagagccagcatgggaagaggcccctccagagagagcactggagctggagggagctccagccaaggaccagaccaacgaggagctgcctgaaatcacggcacgtactgtagccactagccctaaccctggagctgaaagcgtggctggagagagaagtgggagggagggggtgaccagcacagccccagccagcagctcccatgctgcccctagtcctgggcacggtggcaaacatgcaggcagagagcagggcatttggcctggcctcctgtacctcgctgcagagaggcttctctcattcactagaaccacagtcctgctgctgcaggtccgtttattctcctgatcctggtttatctgtgtgcaggaggtgccg

SEQ ID NO: 133668 - DNA, 1209 bp, Homo sapiens
atgacagaagagcccctgcaggctctggtgctgtcagcagttttactctatcaggaagcctatgtgagaaggtccctcacagctcttggcctggacacatttgccaactttgcacacttttctgaaatgcaaccactttcagatgctccctgtggcctcgtcacaggggtcaccaggcccctggtggcttacagtgtggaagttggaggcttcaccataatctgtggcctgagcttggcctcagggaatatttccgggtggtgtcagctgtatctcctccttactcagtgtcgtaggggagcagcgactctctgggacagtgggatgggtggaggacgtcagtcctccaggcagacgtcagtccccaggtggaccctggactcaaagtgtataccaggccccaagttgacaaccaggccccagatggacaccaaggccctaggtggacagcaggcccatgttgaacaccagactcatgaggacatcaggccgcaggtggacacccaggccccaggtggacacaaggccttaggtgaacaacaagacccagtaggccatcaggcctcagttggatacagtccccaggtaccacaggacagcctggggcaggccctagcaggccaggccacaccagagatcccattggggctgcagctgcacactgtccttgtccaggagattcaggagctcattgaggcacagacacgtgctcctggtccatgtgcagaagtaagagcactgccagcaccagccggtggagccagagccagcatgggaagaggcccctccagagagagcactggagctggagggagctccagccaaggaccagaccaacgaggagctgcctgaaatcacggaggtgccggagagcattaaaagaaggctgggaggaagagttccgagcagctacgcctgctcccagaggcaacctcctcctccaggcatggatgcgggtccacagctgggcatccaggctgtttgcccctaatgtgctgctcgggacaggcccttaacaggcgggcagtgggtgaggggaccaggaggtggctccaaagggtaaagcaaacaaagcttttaacgacagccgttgtgccccaggctctccatgccaccacctgccctaccatttattaatagtgttagaattacaagttgatgaaacgagattacaataaagtttgatttctgaaacttcaaaaaaaaaaa

SEQ ID NO: 133669 - DNA, 450 bp, Homo sapiens; identical to SEQ ID NO: 132743
  misc_feature (1)...(450): n = a,t,c or g

SEQ ID NO: 133670 - DNA, 3250 bp, Homo sapiens
cccacgcgtccggtcaggacacagcatggacatgagggtccccgctcagctcctggggctcctgctactctggctccgaggtgccaactgtgacatccaggtgactcagtctccagactccctgtctgcatctgtcggagacaaagtcaccatcacctgccgggcaagtcagggcattagcaatgggttatcctggtatcagcagaaaccagggcaagcccctacgctcctgatctatgctgcatccagtttgcagtcgggggtcccatctcggttcagtggcagtggatctgggacagatttcactctcaccatcagcagcctgcagcctgaagatgttgcaacttattactgtctacaggattatactaccccattcacagtgttacaagccataacaaaaaccccccagagaagcagatgtgtgagtctgcactgtcctagctactcctcctggtgttatcaactggctgtagggagtgaatctacagcctttaacgataaaccaacaagtcacgccaaagattctatgcagatgacttatttcgacaacttgcaattcacttgcagtgtgtcttatacatctcaaaagaataaggttacttcagatgacacaacatttgaaatctacaacctgaataaagatatgcgttctaagtttaaaactgtaggggctacagtaatgcttagagcaggttatacaaccggatttaaaagagatgcaaatggtgatttggtcattgaatatgacaacttaccacttatctacttaggcactattgaatatgcttacacgtataaacgtggtgtagatatgattacaaaagtaatctgctcaaatgacaaaatggagagaaccactatcaagacctccatttcatataaagctggtacatccagacagagtgttatcagagacttggtaagcagattaggtttcacactcattgatgaagacctttcaaatatccaaggttatacttacaagaacggttttagtgtctggggaagcaccgcagaagcacttacaaaggtttgtgaagagagtggactacgttggtacacctttaacaaacaaatccgtgtagtgccatttaacgctaaagctaaacagctttcttgggaggttttcccatataacgtgattgactctctgcaaggctattatagaagaactcgaaaggttcttaaaaagcagaataagacagagattaaagtcaaaactggtgtacgttgtaagattcacttagacggtcgtattaagatgggagacaacgttactatcagagaaagtgaagacttcgaaggtcagtaccgtgtgaaagaatgtctcgatgagtttaaaaaggaactgtacactggtcttccagcaattattgtttcttacgactcaaaaacacaatccgcaacggtaaggccattatattctattgatggtcttccaatgcctgaaattacaggtgttcccgttcaattccctagtggtggtggagcatctttaacattccctgtaaaaacaaatgacagatgctggttagcattctctatgctgccacttgatgacttcgttgtaaacgataaaaatgtacagatggaaacaaatctgagaagaactcatgatatgtccgactgtgtagcatttgttggtatcggtacaagaacccagaacttcaacccagaccctacagcagtgagattacactacggagattccgttttaagaatcactgatgatgggaatttttattttactggtgatgttcatatctccaagaacctttacgtaactgaagaagttcacggttcagattttatcagtgacacaacaggtagaacagctatctttgataactacatgaaagcttaccttgttgaaacaagagatgtaacaaacatctacaactactcttcaacaatggataacgcactgagaaaagtaactgttaatttcgatgcgacaacatctactgatatcgtaacagatattacacaagaggttgctggagcttggttgtggtgtaaatctccgcacaaacttttaaattacttgctcatgggttcggaaagtcaggttcagaatgaagcaatcaaccttgcttgtagaagggcttgtgaagagggtcttacaaagctgaatggtcgaaaaccagctattggtgctagattgcttttagcataccacgatgagaatagttgggagtgcccagaagagatgacacaggatgttaaagcagtaattgactggatgtatggtcaggcatcaagaaacttaggtcttaaggaggaaacgcttgtaactggtactggtaaagttgagttaattcaggagatgtccattgtagtcatgcctagcaagttcgtaaaaacctttaacaacgacgctttaaggtctacacacatccttatcgttgatgatgtccaaactctcaaacaacaacatcttatagctatggcaaaaatggtcaatcacatactacggttattgagtgaggttttcacgatggaagtcttagtaaactatatctattgttatgatgttgttcactccactacaaccgtagctcaacgtaatcccatcatcccacgagaaggtgagttggttcgcattgatggttggacttacactgtggaaagcatcattcataagtttgatgttgctggcgatgttcaagttatcgacgtagagattggtggtgacaaagttattacaacttatggtaaagaaaatggcaagatgatgtttgaagagtatacagcagaacctaaaaacatcggtaaaaagaatgagcgtaatgctgaacagcaagctatctttgaagttactgctaagtacaagaagcaagttgaccgcaaaggttatgcttacacaaaagagtctgcacagaatactgagaaggtaggtgtacagcttgctcatgatgctgcaaaggttagtcatgcaaagtatctgaagttccctgctgatgctcaaccaaaactggatggtgtacgttgtagaatctcaagagatgctgatttagttagcttcacggcttattctcgtgagaatactatttacaacgtcccagcagaactaatcccagatttgcttttgttgcttaaattgcatccacaagtcgaagactttgatggtgagatttatgctcatggctgggacttagaagatattgtgtctatgattaagaatgctgacaatccagaccgacatctactccagttctactgggttttctgcagagaaatccactga

SEQ ID NO: 133671 - DNA, 744 bp, Homo sapiens
ccttccgctctcttcctcggcgctgcctacggagagtggcagccatcttcctttctcgggcatcatggcccgcccttcagacccccttgtgaagccccaaagatcgtcaaaaagagaacccaagaaagttcatccgggcacccagtcagaccggatatgtcaaaattaagcgttaactgggcggaaaaccccagaggccattgacaacaagggttcgttagaagattccaagggccaagatcttgatgccccaacattgggttatggaaggcaacaaaaaaacaaaggcacatgcatgccccagtggcttccgggaagttcctggggtccacaacgttcaagggagctgggaagttgcttgcttgatgttgcaacaaaatctttactgttgccgaggatcggttcacaatgttttccttccaaggaaccggcaaagcccatcgtggggaaaggagcttgcccaattgggcctttcaggagttcacccaaccccattggccagggctgcgcagttgaaagaaaattgagtaaggcagctcatgtgcaacaaatcttactgtgccgagatcgctcacaatgtttcctccaagaaccgcaaagccatcgtggaaagagctgcccaactggccatcagagtcaccaaccccaatgccagggcgcagtgaagaaaatgagtaggcagctcatttgcacgttttctgtttaaataaatgtaaaaactgcaaaaaaaaaaaaaaaaaaaaa

SEQ ID NO: 133672 - DNA, 1070 bp, Homo sapiens
  misc_feature (1)...(1070): n = a,t,c or g
cgtctgggctgccaacatgccatccagactgaggaagaccccggaaacttacttggccacggtgcagccacgggccacgggccgcataggccaagcacccggaaagcaccccccggcggcccgcggtaaatgcctggtggtcctgccatccacccacccggatccaacttccgacaaaatacccacccccaggcctactttgggaaaagttgggtaatgaaagcattaccccacttaaaagaggaacccagagcttcctgcccccaactgtcaaccttgaacaaattgtggactttggtccagtgaaacagacaccgggtgaaatgcctgcctaaaaacaagactggggctgctccccatcatttgatgttggtgcgatcgggctacttacaaagttctggggaaaggggaaagctccccaaagccagcctgttcttcgttgaagggccaaaattcttcagcagaaggagcttgagggaagaaggattaagaggtgtttggggggggcctgtgtccctggtggcttgaagccacaatggagggagtcttcattaaatgctcccctactttttccttgtggtgtgagtgtaggttcttcagtggcacctctacatcctgtgtgcattgggagcccaggttctagtacttagggtatgaagacatggggtcctctcctgacttcccccaaatatatggtaaacgtaagaccaacacagacgttggccagttaaacatttctgtttataaagtcagaataatcccctgtgatcactggaagggcctgcattgattggacctctgaattttacggggaatgataaatggacccctaaatggtcaacagggcttcacaggtaagaaatccatttttgaatggtcacaattctaaagaggggcaacgtcgaataggaacgaaaagggtccctttaggacttaagttctcagcccaaggtttttccacgtggccccctcatcnnnnnnnnnnnnnaaaacggagttttttttcccagcttgaagggcagggacacaatttgggttaattgaaccctccgcctccaaggtaaagcaat

SEQ ID NO: 133673 - DNA, 612 bp, Homo sapiens
ggggcgcctggaagcctggcgcatgcgccctgagggctcgctgacctaccgggtgccagagaggctgcggcagggtttctgtggcgtgggtcgggcagcacaggccttggtgtgtgcgagtgccgaggagggcaccgccttcaggatggaggctgtacaggagggggcggccggggtggagagtgagcaggcggctttgggggaggaggcggtgctgctgttggatgacataatggcagaggtggaggtggtggcccaggaggaggccctcgtggaggggcaggaggaggcccagaagccacagcctggccctgggcccataaccccagagtccgccctggaggagctggtggccgttcaggtggagctggagccggttaatgcccaagccaggaaggccttttctcgccagagggaaaagatggaatggaggcacaagccccacctaggccgcagaggcgccgtcatccagagcgtccctggcttctgggccaatgttgtatccttctcagtgttttttctgcctttccagttgagaggtgctcttggggaagtagaaacccttggtgatgccgagcagcagacgtttggggcatcatttgaagagcagaa

SEQ ID NO: 133674 - DNA, 154 bp, Homo sapiens
agaaacccttggtgatgccgagcagcagacgtttggggcatcatttgaagagcagaacctctttgacctaaatcagattgcaaaccacccccagatgtcagccctgatcactgaccaagatgaagacatgctgagctacatggtcagcctggag

SEQ ID NO: 133675 - DNA, 241 bp, Homo sapiens
tgtttcttcggcctttctagtggagaggtgctctcggggaagtgtaagtgaccgatgggcagctcggcgtcgatgtgactctttggggaacaaaggggagttgccacggaccaatgtggctgtggaaaggcggagaaggcgtggtctctttgacctaaatcagattgcaaaccacccccagatgtcagccctgatcactgacgaagatgaagacatgctgagctacatggtcagcctggag

SEQ ID NO: 133676 - DNA, 322 bp, Homo sapiens
ctgccctctatcctactgtgtgcatgtcaaagacactgtggtccagtacggtatccctatagcggcaatggggcaacagattggtcactgcctgagcttcttcagctggttgtctgactgtgagggcccaggttacggcacgattgctgaggtggggcagctatggggcatcatggcaaaggaccttcttcgacattccttggcatcggaggaattggctttgaaccagaacctgacctgtcacgaccaatttgcccagtccaccagatcatcagccagggcctgtggctctatattctgcagcactacccaagggagttag

SEQ ID NO: 133677 - DNA, 3430 bp, Homo sapiens
tttcgtcaggcagaggaggcgctcagtaactgtatgcaggctgacaagaccaaggcagccgacctgcgtgccgcctaccaggcgcaccaagacgaggtgcaccgcatcaagcgcgagtgcgagcgcgacatccgcaggctgatggatgagatcaaagggaaagaccgtgtgattctggccttggagaaggaacttggcgtgcaggctgggcagacccagaagctgcttctgcagaaagaggctttggatgagcagctggttcaggtcaaggaggccgagcggcaccacagtagtccaaagagagagctcccgcccgggatcggggacatggtggagctcatgggcgtccagggtcaacatatggacgagcgagatgtgaggcgatttcaactaaaaattgctgaactgaattcagtgatacggaagctggaagacagaaatacgctgttggcagatgagaggaatgaactggatgctctgggctgtgttcagggtgactcactgcccctgcccagggaggaggccctggacccctgcagaagccaagactggcggaactccctgcggtccaatgatgcacccagacaaagggccccagcaggccagtccccagaggggccctgcacctggagccgcatcaggcctggacgggcctcttctgttttggctccaggcccggagaccacaagcgagctccccagagacctggccggatccaaccgtgaacagcttactctggcagagcccagcttggatgaacagattcttctcctggtctgtggctgcccaccagaggagtgcttggacgagtcactcctccgcatggacctggcctggatttcagagaatctagcagctgacccagctgcagaagcctttctcctggtgcagacatccgcactccctctctgggggccggctggggactccgcttcttggcgaccactgctgctccaggaggttccctcagatggacaaaaaatccaagaagagttggccaccaggtccccgcctcctcccaaagccacaggacacccaggctgggattgtcaccagacaagaggccgcggtgcctccctcttccacgaggccccctacatttcaaatcacccatttctgaaaaaacaccccaaggatctgaaagacacttggaacaatggaggaggaagccttgcggggagaactgaagaggggaaggcaagggggactttgggcaggaaggggaaaaaccttggtgacaagtaccagctaagtcaggaaagccatcagaacctgagcttggagaatggggctggagctgcagaggacgtgcaggatcagaatggggcttcagagactaaggccgccacctgccgccctgggtcctggcaggagtttttgatgcctcttctacagggggaggcctcagtatcaaaggagggtcccgaatccctgagcaggagggaaagggtggaaggatacgtctggggtctccgaggaggactgtcatcagagaatgaggaagtggcacccccagccaccttctccagggctcatgagaccaaagagccatggccaacagacagtcagctcctcgcagggaaagtcagagccactgggaggacagctaggggcaaggaggaaaaccaagtgtggcttggaaatgctctgcttctgcaaggaggaagcctggaggacaaagggctagaggaagaggatgagatgccgcatcaagaagcatccggtctggggtgcaggggtgcccccgaggagcctgactcccaggaacatgagagcaaggaaatgcttttctttgcaggagagacaggtttgccactgtttcccagatttgccttatcagttgaaggggccgaacccactgatcatggtcatccacaggctgtgagcaaaggacacaacaggtgtgcactcacaatcgatgagcttgcacaggacgtggaggcttgtttccagcagctgtccaccctgcagccgggcagcaggggctggcagtgctcagcctctgcatgtaggggagagaactggagctttgctcagaagtggcacagtggctgggagagagctcactctcagcaggtttggggaaattggggtatttgttctaatgaagaagcgaagtctaaagagagtggtgaaggtgataagccgggaaagaccacggccctgggcaccagcgaagttcctggtaacccagggacactgcctcattgggatgaagccagcccaaaccctccacaggggcctgctgagccctggggtgccctcgagagagtgaggagcaggtttcatcagctcatttctggattgaagaaacagagaagccagattttacatgacaacaccaaacttcacggagaccaagagaggttccatgaaagagtgtgcgcccttgaaagagagagagagagagaggtgacaaaaatatccaggctcgagcgggataaccacaggctggtaggggacatctctcagttaaagaaagaactggatcaatatttacaggcaatctctgaccttgaagactgcaatgggaagaggttgctgcaaattttggaagcttaaagaggaaaatgaaaccctgaaagggaatctgggccaactccagaaagccacgtctgagagtgtcaggaaatccaaagacacgatggagcaagtcaccctggaaaactggaagctccagacactgatctcggagcttggcgtcagttataaagagctgataaaggatatcgtgctaggaatagaagacatgatccgggccttaagtggggagaacgagcaccttctacgcagggtccatgtcctggagagggaagtcaccttgcagaggagcacggatcaggggcgtttggtgaggggaagggagcacctccagggaaaagccaagatgcacgctctagacaaagaggtgcaggtgactccactcacaggacagctgctttcaagagcctgtgggccacccttggaggaggaaatgagtctggctgcagggcagacaggaccttccacaggcaccgggaattccagacgcggtgctgattctccccctccatcgctggtctggagaaacactggtgtagccaatgccctgcaaggaaatgtcagtggagcagaagtgaaagaagcacatttggagaaagaggagaagaggcccaggtgttctgtggctcaggggcaagctctgagctccctgagcaatggccccatgctccgggactcagaggccgaggttactgaggaggatcccaggctgcgggcccagcagctccatcaccgggtgctgaccctgcagtgccagctcagggaccagggcgctgcccaccaggcgtctctggacgaggccacccgcctccaggaggagctccaggccaagcttgaagaacttcagaaaaagcaacatgaagcaaagttggcagtgactcccctgaag

SEQ ID NO: 133678 - DNA, 10672 bp, Homo sapiens
  misc_feature (1)...(10672): n = a,t,c or g
accctgggcctgcgcagcccagcccagcccagcccatgccccgcacccgtaggctctgggggcccgctccccagcagacccgctccctgcaagacccacgggcgtcgccctgctgagaaactggtcccacacctacgtggacccaggtttcctgaggagctcgtggacccgcagatcccgcactggccaaagggctccggtccccagcaggctcaactgcgcacaggagctcgggagccagagccccggccctgcttgcagagccccaccaacaggcaccaactgctcgggtgcgggagctctgggtcgtcaaggccagcaacagcggcgcagccgacaatcgaacctggcggctggcctctggtggcccagggcataggacaagaggccctttggaatgctccttggagtacagcatcctcagggaggaagcatgggggcgcctggaagcccggcgcatgcgccctgagggctcgctgacctaccgggtgccagagaggctgcggcagggtttctgtggcgtgggtcgggcagcacaggccttggtgtgtgcgagtgccaaggagggcaccgccttcaggatggaggctgtacaggagggggcggccggggtggagagtgagcaggcggctttgggggaggaggcggtgctgctgttggatgacataatggcagaggaggtggaggtggtggcggaggtggaggtggtggcggaggaggagggcctcgtggagcggcgggaggaggcccagcgggcacagcaggctgtgcctggccctgggcccatgaccccagagtctgcactggaggagctgctggccgttcaggtggagctggagccggttaatgcccaagccaggaaggccttttctcggcagcgggaaaagatggagcggaggcgcaagccccacctagaccgcagagggcgccgtcatccagagcgtccctggcttctgggccaatgttgtatccttctcagtgtttcttcggcctttctagtggagaggtgctctcggggaagtgtaagtgaccgatgggcagctcggcgtcgatgtgactctttggggaacaaaggggagttgccacggaccaatgtggctgtggaaagccggagcaggctgggtactattgtcctgcatgcggcagagaaacccttggtgatgccgagccgcagacgtttggggcatctttttgaagagcagaagcgagttcagagcggaagaggtttttcagtgaatgaagctatttttaagggagtgtgattgctgccccttgctagtccgatctgggactgggcgtcttcggctataagcagattctgccactcctcagacaccagcaagtctctgcaaatcgcgcctccccatgtcagtgcagtcagcctcagaatcatacaccctctgtgaacacaggaggccttagtttacggggacggggaggcgaaaggagatcatacatggaagcagatctgagaatccctacccagcctctggtgctcttaggccttcttccctgttgctcctcgctttcccttccatcgtgtgtaaagtctctttgacctaaatcagattgcaaaccacccccagatgtcagccctgatcactgacgaagatgaagacatgatgagctacatggtcagcctggaggtgaggccaggaagactggggctagagggtttagcgggggagggtaagggaaataattcattcctgtaagcaagagtgagcacctcacccgaaaacctatctaagctttctccaccttgtcctgacaggtggaagaagagaagcatcctgttcatctctgcaagatcatgttgttctttcggagtaacccctacttccagaataaagtgattaccaaggaatatctggtgaacatcacaggtgacaggtggctcccaggatgggtagtggaaggaagatgggtagtggaaggaagatggtgggtggatcattgccaacgggatccagcccccttcccacaaaaactcctgtctctgtagaatacagggcttctcattccactccaattgagtggtatccggattatgaagtggaggcctatcgccgcagacaccacaacagcagccttaacttcttcaactggttctctgaccacaacttcgcaggatctaacaagattgctgagtcccctgacagatcctatgtaaggacctgtggcgcaatcccctgcaatactacaagaggatgaagccacctgaagagggaacagagacgtcaggcgttaatgtggccaccgagcatgagacgagcctgatccgtggccgcctagtgccccgtccagtggccgatgctcgggactcggcggaacccattctgctgaagcgacaggagcacacggatgcacagaatccacatgccgtcggcatggcctggatgtccattgacaacgagtgcaatctgcactacgaggtgacgctcaacggtgtgcccgcccaggatctgcagctgtatctggaggagaagcccatcgaggcgattggagcgccatcacagactcacttcaggaccctgggctcaaggacgtccagcaacccctggcagcccctggaggagaggaagggaagagctgtgcagncggtcctggcagccatcatcattgtgaccctgaagggcatgctgaggcagctcagcgacatgcgctccctctggaaggccaatcgggcggatctgcttatctggctggtgaccttcacggccaccatcttgctgaacctggaccttggcttggtggttgcggtcatcttctccctgctgctcgtggtggtccggacacagatgtgaactttacagacgaggatgctggggctcggagagctttgactgcttcccgcaggaatggccctcgaggaggaaatggagaccacttctgtctgtggtgtctgcctcctccctccctctaggagacgttctcctccctggtttacagacggcacaaacggaagaagaagaagataaaaagcccaaagcttgcactgtggctcctgaatgtttgcctctttccttcatcatcagtagctctgaggcttcaggctccaatttgtccctggagatgttcagcatcttcctagaagggatatggccaggtgtctcgtgcctggtccgaggccaaactgaccccaggggtgaggactggacctggcgctgcaaacctcctgatcagccttcccagccccaccagtgcagcctcatcctaaaggaggtgctgggccacacgggaaaaggggactttgacaaagggcagaacatcggcccagtggcggaggacacgtcagccccccaacttaacgcggtgcgggaataactgcagtcaccagccctggggcttcaaggactgcagcttactagaatagcgactgcctgggcaacaagagcaaaactccatcgaaagaaagaaaagaaagaaagaaaagaaagaaaagaaagaaaagagaaagaaaagaaagaaaggaaagaaagaagaaagaaagaaggaaagaaaataccattttattcttctgcttggtatgcccacttcctagttcattacacatggccctatggcaccctcaatcacagggttgccatgacctcaaaagtcctgcacacttgggtaggagtctccgaaatcccacgtccatattcctgggaaagagaatctgactgtggccactgatttctgctgctgagtgcccgtaccctagctcaaggaatagggcacacccctcttgtagaagggaaggcaggcgcacccgaggtccccctcccaccccaccttctgccctcccgcacacttggaccagtgctgttgacccggaagcggacatttctgcagctattctaagcacacgtcggcggagggagcgggacgtggccagcggtcagcggcgaaggaggcaggccctgcgcggggatcacggaagccctgtgattcaccatgaagttccatacaaggaggtccatccctttgagtatcggaaaaaggaaggagaaaagatccggaagaaatatccggacagggtccccttgattgtagagaaggctccaaaagcaagggtgcctgatctggacaggaggaagtacctagtgccctccgaccttaccgatggccagttctaccttttaatccggaagagaatccacctgagacctgaggacgccttattcttctttgtcaacaacactatccctcccactagtgctaccatgggccaactatatgaggacagtcatgaggaagatgattttctggtctggtttggaggtgagcactcaacccaaactgagcctaccgcagaactgtgctatcttgcccaagatgatttgtcaagaagagcacagatgactcatgctgagcctatcagggacctctcctgggactttgtaagctggaaccaaaggaaaaggacctgttgctttccagaagtaaagatgggaagacgtgagtctgtaggccatggcagccatatttcctgccagctggaccgcattccgagagaatgaggtctgtgttaatgagatcaacagcagaactccaatgcgcctctcatacattgagaaaaagaaaggccgccagacgactcatatcgtattttccttccgcgatatcacttccatgacgacaggatagagatacaaaattaatgtacacaaatcagtagtggaatcatcatcgcatggcatcaaatggaatcatcacatggaatcgaacggaataatcatcgaatggaatcgaattgaatcatcaaatggaatcgaatgcaatcatcgaatggaatcgtcatcgaatggaatcgaatgcaatcatcatcaaatggaatcgaatggaatcgaatggagtcgaatggaatcatcatcaaatggaatcgagtggaatcatcgaatggattcgagtgtctgttcagacaggtctgggggatatctaaaggactcatgaaataccattcaggacataggcatgggcaaggaattcatgactaaaacaccaatagcaatggcaacaaaagccaaaattgacaaatgataatttaaagttcatatggaaccaaaaaagagaccgtattgccaagacaatcctaagccaaaagaacaaagctggaggcatcacactacccgacttcaaactatactacaaggctacagtaaccaaaacagcatggtactggtaccaaaacagacatatagaccaatggaacagaacagagccctcagaaacaataccacacatctacaaccatctgaattttgacaaacctgacaaaaacaagaaatggggaaaggattccctatttaataaatggtgctgggaaaactggctagccatatgtagaaagctgaaactggatcccttccttacaccttatacaaaaattaattcaaggtggattaaacacttaaatgttagacctaaaaccataaaaatcctagaagaaaacctaggcaataccattcaggacataggcatgggcaaggacttcatgactaaaacaccaaaagcaatagcaacaaaaccaaaattgacaaatgggatctaacatactgaatgggcaaaaactggaagcattccctttgaaaactggcacaagacagggatgccctctctcaccactcctattcaacatagtgttggaagttctggccagggcaattaggcaggagaaggaaataaagggtattcaattaggaaaagaggaagtcaaattgtccctgtttgcagacgacatgattgtatatctagaaaaccccattgtctcagcccaaaatctccttaagctgataagcaacttcagcaaagtctcaggatacaaaatcaatgtacaaaaatcacaagcattcttatacaccaacaacagacaaacagagagccaaatcatgagtgaactcccattcacaattgcttcaaagagaataaaatacctaggaatccaacttacaagggatgtgaaggacctcttcaaggagaactacaaaccactgctcaaggaaataaaagaggatacaaacaaatggaagaacatgccatgctcatgggtaggaagaatcaatatcgtgaaaatggccatactgcccaaggtaatttacagattcaatgccatccccatcaagctaccaatggctttcttcacagaattggaaaaaactactttaaagttcatatggaaccaaaaaagagcccgcatcgccaagtcaatcctaagtcaaaagaacaaagctggaggcatcacactacctaacttcgaactatactacaaggctacagtaaccaaaacagcatggtactggtaccaaaacagatatatagaccaatggaacagaacagagccctcagaaataacaccgcatatctacaactatctgatctttgacaaacctgggaaaaacaagcaatggggaaaggattccctatttaataaatggtgctgggaaaactggctagccatatgtagaaagctgcaactggatcccttccttacaccttatacaaaaatcaattcaagatggattaaagacttaaacgttagacctaaaaccataaaaaccctagaagaagacctaggcattaccattcaggacataggcatgggcaaggacttcatgtctaaaacaccaaaagcaatggcaacaaaagacaaaattgacaaatgggatctaattaaactcaagagcttctgcacagcaaaagaaaccaccatcagagtgaacaggcaacctacaaaatgggagaaaattttcgcaacctactcatttgacaaagggctaatatccagaatctacaatgaactccaacaaatttacaagaaaaaaacaaacaaccccatcaaaaagtgggcgaaggacatgaacagacacttctcaaaagaagacatttatgcagccaaaaaacacatgaaaaaatactcatcatcactggccattagagaaatgcaaatcaaaaccacaatgagataccatctcacacccgttagaatggcaaccattaaaaactcaggaaacaacagacaataagagaggaaataggacaggtgaaggctccgaggagggacaatatccccaaacccagtgctgcccatgcagcccagctcgtcatgtggcatgaagtcagactgacacgggccctctgccccttctgggggtggctggattcttggcatcatttctgtgttgagctacatcccacacatccgttgatcactcagaaaccaaagggaaaggaactcactgacgttgtacatagaagtcaattttctggggcacagagcagagtggagagtatttggatacagaggagtatgacgaagacgccaggtgcaaaacttcaaaagcaagcataccagggagtgtcaaaccctcaccaccatcatcacacaggacagcagctaaaggctgtgccacacccactcatggaagcacctgatgctatagatgggtacagaaaaattcttgtcaattttacaaaaatctacagtgcatttgcagtgactaacagtgattatgaatggcaaccaacacttgtggccataggctacaggtgtggggacccacagggaaccgaacggaggacccagaaaccacctacagaggtggtcactacacagctccagccccagccgtggctgctgagaggccatgttggccttgtgctgctagatcatcctatttttaaagaaaagccataaggaagtaaagcactcctcagcaaatgtaaaagaacagaaattataacaaactgtctctcagaccacagtgcaatcaaactagaactcaggaataagaaactcactcaaaaccgctcaactacatggaaactgaacaacctgctcctgaatgactactgggtacataacgaaatgaaggcagaaataaagatgttctttgaaaccaatgagaacaaagacaaaacataccagaatctctgggacacattcaaagcagtgtgtacagggaaatttatagcactaaatgcccacaagagaaagcaggaaagatccaaaattgacaccctaacatcacaattaaaagaactagaaaagcaagagcaaacacattcaaaagctagcagaaggcaagaaataactaaaatcagagcagaactgaaggaaatcgagacacaaaaaacacttcaaaaaattaatgaatccaggagctggttttttgaaaagatcaacaaaattgatagaccgctagcaagactaataaagaagaaaagagagaagaatcaaatagatgcaataaaaaatgataaagaggataccaccactgatcccacagaaatacaaactaccatcagagaaaactacaaacacctctacgcaaataaactagaaaatctagaagaaatggataaattcctcgacacctacaccctcctaagactaaaccaggaagaagttgagtctctgaatagaccaataacgggctctgaaattgaggcaataatcaatagcttaccaaccaaaaaaagtccaggaccagatggattcacagccgaattgtacgagagctacaaggaggagctggtaccattccttctgaaactattccaatcaatagaaaaagagggaatcctccctaactcattttatgaggccagcatcatcctgataccaaagcctggcagagacacaacaaaaaaagagaattttagaccaatatccttgatgaacattaatgcaaaaatcctcaataaaatactggcaaaccgaatccagcagcacatcaaaaagcttatccaccatgatcaagtgggcttcatccctgggatgcaaggctggttcaacatatgcaaatcaataaatgtaatctagcaggtccctagaagagaagcctcatcagtgttctcttaacaaaaggacccaaagaagagaaaggtatttattgtgctctgaggctgacttcattgagtggctcaagtcacacgcagttcctctgccctcttcaggcatgtggcatagtctggccagccccgtggatagcattgttaatgggacagctcagttgcttccatccttcccccagatgccctttcactctcccttggcttcatgccacttggctttgggctccttctttgtggccacgtggtcttgtgtaactccagacccagatccagccaggagttcagaaatttccagggaagacccagtagagatgagggtggaaaatctggcacgatgtgacagcggacatgggcccaagcagaacatgattcacacacaagaaaatgctaaacatgggccccagcctctgaaatacggaaaagcctatgagaaaatggttaaagtgatgctgaatgccaaatccatcagtgccaatccatcatatcccttaaaaagagtgaggtgcttgtgtaacacagcaacacatgagcatcttttgggggcagttggaaacatcagtcctgagctaaagtgcataaaggagctgatggagctgaaagccaaggctcgagaactacgtgaagaatgcagaagcctcaggagccaatgcgatcaactggaagaaagggtatcagtgatggaagatgaaatgaatgaaaggaagtgacaaggctggttcaatatatgcaaatcaataaatgtaatccagcatataaacagaaccaaagacaaaaaccacatgattatctcaatagatgcagaaaaggcctttgacaaaattcaacaacccttcatgctaaaaactctcaataaattagcaccacatcacacttattctaaaattgactacataattggaagtaaagcacttgtcagcaaatttaaaagaatgcaaatcataacaaacagtctctcagactacagtgcaatcaaattagaactcaggtttaagaaaatcactcaaaaccgcacaactacatggaaactgaacaacctgctcctgaatgacttctgggtaaataacaaacttaaggcagaaataaataagttctttgaaaccaatgagaacaaagacacaatgtatcagaatctcagggacacagctaaagcagtgtttagagggaaatttatagcactaaacacccacagcagaaagtgggaaagatctaaaatcgacaccctaaaatcacaattagaagaactagagaaggaagagcaaacaaattcaaaaactggcagaagaaaataaaagagcctctgtcactcagtttaaccccacaaatgacctcacaaacaactcatctcattattcttctctaatgagaagtacactgatgatgatgatcatcatcatcattttgatgtcagtctagcaacaataccagaccaagacgaaagaaaagagagaaggaaatattagccatgtacttaatgaaacactaccttcagcacaatcctgacactttcaaggctctgttcatccttgctacagggtgctcaagcgctttagcgggcactagagaaaaatcatctattactccaaatagcttatataaactgattggtaccgagctcgaattcgtaatcatgacacaccaaccgcccatccgagaagagaaggaggaaaagaagaagaaaaaagggggagaattgaaaaataatatcaatgatcgggttgtcatatcagatcgatatgcttatccagtatcaaactgcagtaaaaatttcaaggatctaagtaatcatgaggcaaaggaaaacaggaaggtgcaagaccaccaatgcagcccctag

SEQ ID NO: 133679 - DNA, 1083 bp, Homo sapiens
ggtagctcagagaaaagaaaattcaagacaggaaaccagaagctgtccatggaggtggaaaagaatcaacaaatgaggtcactttctttataccagcagagagttgaaggcagcaaatgtgctgtgaggcgaaagggaggctcccccaaaccaaaagcatttttggcagctgctgagaagttcctgaatgttcctgtcatgagatctgctagccatgagcagctggtgctcacaggtgaccccaacaaaaccttgcccggtagcaaaagccggctgtcaggcacagattcacccagagcatgcagcactttccctatatgggccaccaaaattgtaaccgaaatgcaggttcagctatttgctgcttgcagagtccagttaataaaacatcctcggcccagcgcggcccgcaccgccatggaggtgctggagagcggggagcagggcgtgctgcagtgggaccgcaagctgagcgagctgtcagagcccggggacggcgaggccctcatgtaccacacggcctgtcagggacatgaggaacaggtgtgggaggaggaagcccttcagctgggcctgaggtcgggcatattgctcaaccactggaaaaggcagttggtaggaggagcagggattttgcggtcagcacaacttcatagcccttatcaccactggcaaatgatttctttagtatccccgagccctgctgtcatggcagtcatggaaaatgatgatatctgcatggtgctttgtgtcaaagtaatggatgagcctaatcatatccttgatgccatcagtgaacatcagattccttctttggaagaccagtggttctcagagtgtgctttatggaccagcaaagcatacgagaacttggtagaaagacatattcttgggccccactgcagacctactgaattagaaactctaggcatatctgaggatgacatagaccataacccttatctagactttccaggcgttgcaggcttgggatccagaaggaacgtgaaggagcggggctggttgagtgagatgaagaaggagggagacatcttcatgaagatccaagggccccaaagctga

SEQ ID NO: 133680 - DNA, 1710 bp, Homo sapiens
atgaatggaacagcggaaggacagcacccctgggtccacagcaccttcaacggcgagccccagagcctgtcttcatcagtcagggttaaaaatcaggggccacgggaccaggccgaactcggtttccagggcaacggctccacagttccggcagcgcaggcccgtaccattgcgcgggcgcgggggagcgggagcggcggaggggacgcgctgcagggcggcggagccggggccggcccgggcgctaccaaacgcacggcccgcctgctcgcccggggtctgcgccgagccgcgctccggccggacggccgcggcgtccttggtgcgggggccggcagctcccaacgccgcggaggggggaggaggaagatggagacccacatctcatgcctgttcccggagctgctggccatgatcttcggctacctggacgtccgggacaaggggcgcgcggcgcaggtgtgcaccgcctggcgggacgccgcctaccacaagtcggtgtggcggggggtggaggccaagctgcacctgcgccgggccaacccgtcgctgttccccagcctgcaggcccggggcatccgccgggtgcagatcctgagcctccgccgcagcctcagctacgtgatccagggcatggccaacatcgagagcctcaacctcagcggctgctacaacctcaccgacaacgggctgggccacgcgtttgtgcaggagatcggctccctgcgcgctctcaacctgagcctctgcaagcagatcactgacagcagcctgggccgcatagcccagtacctcaagggcctggaggtgctggagctgggaggttgcagcaacatcaccaacactggccttctgctcatcgcctggggtctgcagcgcctcaagagccttaacctccgcagctgccgccacctttcggatgtgggcatcgggcacctggccggcatgacgcgcagcgcggcggaggggctgcctgggcctggagcagctcacgctacaggactgccagaagctcacagatctttctctaaagcacatctcccgagggctgacgggcctgaggctcctcaacctcagcttctgtgggggaatctcggacgctggcctcctgcacctgtcgcacatgggcagcctgcgcacgctcaaccgtgcgctccgtgtgacaacatcagtgacacgggcatcatgcatctggccatgggcagcctgcgcctctcggggctggatgtttcgttctgtgacaaggtgggagaccagagtctggcttacatagcccaggggctggatggcctcaagtctctctccctctgctcctgccacatcagtgatgatggcatcaaccgcatggtgcggcagatgcacgggctgcgcacgctcaacattggacagtgtgtgcgcatcacggacaagggcctggagctgatcgctgagcacctgagccaactcaccggcatagacctgtacggctgcacccgaatcaccaagcgcggcctggagcgcatcacgcagctgccgtgcctcaaggtactcaacctgggactctggcagatgacggacagtgagaaggtcagatgcacagaatttagccagttttcaggaatctgtaaaagcaggatggttaagttctgtggccccctgaacttcatccagctgacagctgacggttgtacgaagcagaaaaggtcttcaagtttccagagcctggagtag

SEQ ID NO: 133681 - DNA, 2325 bp, Homo sapiens
tggcacgaggtgataggtgggccttagaggagacgccgccgagcaccgcaagaactggaaaacacacccctctctgtctgcctgggagagccacggaaattggcacttctctgagtgaagctgaggagaaggctgtaaatctgccaaaacagccttgaagtattcttttgtcatgaggaagtgacggctgctggagggaggtgaacaccacaaggagagatggcatctggcctgggccccgcctagcagcagctccacctcctaggccaggccctgtgggatgcgccactagaccaccatggacggatcccacagcgcagccctgaagctgcagcagctgcctcccacaagtagctccagcgccgtaagcgaggcctccttctcctacaaggaaaacctgattggcgccctcttggcgatcttcgggcacctcgtggtcagcattgcacttaacctccagaagtactgccacatccgcctggcaggctccaaggatccccgggcctatttcaagaccaagacatggtggctgggcctgttcctgatgcttctgggcgagctgggtgtgttcgcctcctacgccttcgcgccgctgtcactcatcgtgcccctcagcgcagtttctgtgatagctagtgccatcataggaatcatattcatcaaggaaaagtggaaaccaaaagactttctgaggcgctacgtcttgtcctttgttggctgcggtttggctgtgcgagggtacctacctgctggtgacattcgcacccaacagtcacgagaagatgacaggcgagaatgtcaccaggcacctcgtgagctggcctttccttttgtacatgctggtggagatcattctgttctgcttgctgctctacttctacaaggagaagaacgccaacaacattgtcgtgattcttctcttggtggcgttacttggctccatgacagtggtgacagtcaaggccgtggctgggatgcttgtcttgtccattcaagggaacctgcagcttgactaccccatcttctacgtgatgttcgtgtgcatggtggcaaccgccgtctatcaggctgcgtttttgagtcaagcttcacagatgtacgactcctctttgattgccagtgtgggctacattctgtccacaaccattgctatcacagcaggtgcaatattttacctggacttcatcggggaggacgtgctgcacatctgcatgtttgcactggggtgcctcattgcattcttgggcgtcttcttaatcacgcgtaacaggaagaagcccattccatttgagccctatatttccatggatgccatgccaggtatgcagaacatgcacgataaagggatgactgtccagcctgaacttaaagcttctttttcctatggggctctggaaaacaatgacaacatttctgagatctacgctcctgccaccctgccagtcatgcaagaagagcacggctccagaagtgcctctggggtcccctaccgagtcctagagcacaccaagaaggaatgagactcgcctccctctatttataactgtcccctccaggctgacagtggttcaaccctgaatcctaaaacttgcctttcaagtctcattttgtttctaactgagaactctatggatgatgatctcaaaaagcctttgtctctgggaaaggatgcgttatcttggtcttggaaatttcaaatgatgagggttgggggatggaagcattattccaggtggacgggatagaatccagcctctgcctggattagcccagggggatttggaaagcctttctaccatccttgaggatggtaactgagcttcctctgacagtgaccaaaggatgctgtatccttcagagctaaggcaagacagagagtctgctgttaattctcaaatccagcgaaaggctggacatctctaaatctcgtcttcctccacctcatgtgcatgcctgatctcaccctgacactcctgatgccgcatctgtgatagcactcgtgttgccttcacatggcaggctgggccaaccctgggtggaaggttctgacatttgtgttttcagaaatgtacatctgccttccagtcatctgtgcccttctagggaagatgtgcttgatatgttcaaattggatctactctgaaaacgaaacttggttttggtcctgtgaggactacttgtttgtccacctcctccaccaaaggaattaggaagttaagagaaggggaagaatatggaggataggagagggtgatgatgctttagcccattaaggaagaaaagttccccttactcttacaaaaggtgattgcaccacttaaaaaa

SEQ ID NO: 133682 - DNA, 2041 bp, Homo sapiens
ttttgcgcactcgcggagcttgagccagaagggtcggacgcccacgcccctggcaggagctcggtggagcaggcaagccccagttgtccccacttttcgggtggaaacaccgaggacacgccccgacgcaggggcaactcccatggtggcttcttcccgccctcggggctccacctagctcagccctggaattccgcaagcacccggaggccggggggtctccgcgggcgtcccatgcggaggacatggtgcgccgtgtactcttccccacgacctcagggaccggtccccccgccggaacagcttccaacctggtccggtcccggcagctgaatttggccagcccaacctcccggtcgctatttcgcgagtccaccttccgccgtccgcgaggtaactccggagggcaggaaaggagagatatgtttggtcccaagtctcgcgagggctctggggagcgctgggtcttcaaggacgttttggatttgaatacttggtgagagcacctgggtcccgttgccttggaatgttctttccagttttgcatcgaggccaagaggagcgggggcatgggctaccttactaaaggtgatgccatggagttaactttgccagaatttctcctcttcgtgccgagcggctcgggcttcctggcggcagcagatggtggagttagcaggtgggatgaggggaggcgttcttggtctaagcccgcttctggaacagaggtgctgtctcctcgagttgtaagtttcttcttcgcctacaagtttgggatgtatgaggcaaaaagaatacagaatacccaagaagctcaccaatatgccattcctggggtcccaaccgagccttttagctctgagatcctgtcatcccacaggaaggacgtgttctgcctgcaggtggctttattctgtcttgctgctcatcgggtgagtcagattggcgccctcttggcgatcttcgggcacctcgtggtcagcattgcacttaacctccaggtaagtttccacatccgcctggcaggctccaaggatccccgggcctatttcaagaccaagacatggtggctgggcctgttcctgatgcttctgggcgagctgggtgtgttcgcctcctacgccttcgcgccgctgtcactcatcgtgcccctcagcgcagtttctgtgataggtaagaccatcataggaatcatattcatcaaggaaaagtggaaaccgaaagactttctgagtaagttcgtcttgtcctttgttggctgcggtttggctgtcgtgggtacctacctgctggtgacattcgcacccaacagtcacgagaagatgacaggcgagaatgtcaccaggcacctcgtgagctggatcattctgttctgcttgctgctctacttctacaaggagaagaacgccaacaacattgtcgtgattcttctcttggtggcgttacttggtaagttgacagtggtgacagtcaaggccgtggctgggatgcttgtcttgtccattcaagggaacctgcagcttgactaccccatcttctacgtgatgttcgtgtgcatggtggcaaccgccgtctatcaggctgcgtgagttagtcaagcctcacagatgtacgactcctctttgattgccagtgtgggctacattctgtccacaaccattgctatcacagcaggtaagggtttttacctggacttcatcggggaggacgtgctgcacatctgcatgtttgcactggggtgagttcttgcattcttgggcgtcttcttaatcacgcgtaacaggaagaagcccattccatttgagccctatatttccatggatgccatgccaggtaaggttaacatgcacgataaagggatgactgtccagcctgaacttaaagcttctttttcctatggggctctggaaaacaatgacaacatttctgagatctacgctcctgccaccctgccagtcatgcaagaagagcacggctccagaagtgcctctggggtcccctaccgagtcctagagcacaccaagaaggaatgagactcgcc

SEQ ID NO: 133683 - DNA, 1240 bp, Homo sapiens
  misc_feature (1)...(1240): n = a,t,c or g
cccgaactagggatgtgacagagcgcgagacccagcctaaagagagcccggagccagcgtgggaggccgctgccgtcgcgcgccttggtttttctgttccttttttttttttttttttttaacttcctgcctatacacacgcagccatcagcccacaaagacatgactaccaacgcgggccccttgcacccatactggcctcagcacctaaagactggacaactttgtacctaatggaccgccccacctgggcatatactgggctgggcctcttctctgtcacagggggtcttaggtcgtggaccacatgggctgttgttcagggtcgtgctnccgggttgtcccattggggactttgggcgggcgactgttccctgttgctgggttttgcagtggtgtgggttcattcacctggtgatcgaggggctggttccgttctctaactacgaaagaccttgctttggagaccaaagccttctttattctcaactctgggaaagagtatggccaaggggagacagcccgatacatcctgggggtgacaaatttcacagtgttgcatgggaaaccatcacaagctttgcctgtgggggaaccattcagcctgtgggtggtgatcgtctcttctcctacagcatccccttccgcttcattcttacagcttgtggtctctgtggggccagatctatgggggatgtgctctacttcctttaaagggccaccccgacggatttccagcacggaaaacctgggcccacccctctcctacttcctggattttcctttgtcttccatgaaatgcccctgtggctggtgcctgcccctggaagtcccttgtgccttgatgcctgtgaaagcaccctcaactcatgccccagagcaacgcctggaatgccaagggcccacaaaagcccaagagcaagaagaactgaggagtggtggacccaggctcgaacactgagcgaggaaggagctctctgcactgcccagaaagagtctagtcctgctcccacagtttggagggacaaagtctaattgatctgtcacactcaggctcgatgggcaggcacaagaaggggaataaaggggctgtgtgaaggcactgctgggagccattagaacacagatacaagagaancccagggggtctatgatggtgacgatttttaaaatcaggaaataaaagatcttgactccgaaaaaaaaaaaaaaaaaaaaaaaaaaaaagtcgtatcgatgt

SEQ ID NO: 133684 - DNA, 257 bp, Homo sapiens; identical to SEQ ID NO: 132826
  misc_feature (1)...(257): n = a,t,c or g

SEQ ID NO: 133685 - DNA, 398 bp, Homo sapiens; identical to SEQ ID NO: 132827

SEQ ID NO: 133686 - DNA, 432 bp, Homo sapiens; identical to SEQ ID NO: 132828

SEQ ID NO: 133687 - DNA, 422 bp, Homo sapiens; identical to SEQ ID NO: 132829

SEQ ID NO: 133688 - DNA, 4413 bp, Homo sapiens
atggccaggccattggctctgcccctcactgggatgtctgcgcccggctcctccctgaccaccattccccacacaccgtcccacccacgctccccgtctacaccagacaccgtgtcccacccacgctccccgtctacaccagacaccgtgtcccacccacgctcccggtatacaccagacaccgtcccacccacgctcccggtctacaccagacaccgtgtcccacccacgctcccggtctacaccagacaccgtcccacccacgctcccggtatacaccagacaatgtgtcccacccacgctcccggtctacaccagacaccgtgtcccacccacgctgccggtctacaccagacaccgtcccacccacgctccccgtctacaccagacaccgtgtcccacccacgctcccggtctacaccagacaccgtcccacccacgctcccggtctacaccagacaccgtgtcccacccacgcttaccgtctacaccagacaccgtgtcccacccacgctcccggtctacaccagacactgtcccacccacgctcccggtctacaccagacaatgtgtcccaccccacgctcccggtctttaccagacaccgtcccacccacgctcccggtctacaccagacaccgtgtcccacccacgctcccggtctacaccagagaccgtgtcccacccacgctcccggtctacaccagacaccgtcccacccacgctccccgtctacaccagacaccgtcccacccacgctcccggtctacaccagacaccgtgtcccacccacgctcccggtctacaccagacactgtcccacccacgctcccggtctacaccactgtcccacccacgctcccgaggtttctgtttcccccgccccatgttgtgccctccagactcatgaacaagctacagccgggctccgtccccaagatcaaccgctccatgcagaactggcaccagctagaaaacctgtccaacttcatcaaggccatggtcagctacggcatgaaccctgtggacctgttcgaggccaacgacctgtttgagagtgggaacatgacgcaggtgcaggtgtctcttctcgccctggcggggaaggtcaccaatgcctcttccccagggagactggggtggggcgtgagccggggctccctgaagcacccctttgtccacacaggcactcctcagctgctggccctggtacagcactgggtgcccggggcacggctggtggaggagctgccacacgagctggtgctggtgctgccctacacgggtgcccatgacggcagcttcgccacactcttccgagagctagacacgcggctggcggagctgaggctcactggctacgggatctccgacaccagcctcgaggagatcttcctgaaggtggtggaggagtgtgctgcggacacagatatggaggatggcagctgcgggcagcacctatgcacaggcattgctggcctagacgtaaccctacggctcaagatgccgccacaggagacagcgctggagaacggggaaccagctgggtcagccccagagactgaccagggctctgggccagacgccgtgggccgggtacagggctgggcactgacccgccagcagctccaggccctgcttctcaagcgctttctgcttgcccgccgcagccgccgcggcctgttcgcccagatcgtgctgcctgccctctttgtgggcctggccctcgtgttcagcctcatcgtgcctcctttcgggcactacccggctctgcggctcagtcccaccatgtacggtgctcaggtgtccttcttcagtgaggacgccccaggggaccctggacgtgcccggctgctcgaggcgctgctgcaggaggcaggactggaggagcccccagtgcagcatagctcccacagcgcccttgagtgtgcacagcccattgtctgcaggttctcggcaccagaagttcctgctgaagtggccaaggtcttggccagtggcaactggaccccagagtctccatccccagcctgccagtgtagccggcccggtgcccggcgcctgctgcccgactgcccggctgcagctggtggtccccctccgccccaggcagtgaccggctctggggaagtggttcagaacctgacaggccggaacctgtctgacttcctggtcaagacctacccgcgcctggtgcgccagggcctgaagactaagaagtgggtgaatgaggtcagatacggaggcttctcgctggggggccgagacccaggcctgccctcgggccaagagttgggccgctcagtggaggagttgtgggcgctgctgagtcccctgcctggcggggccctcgaccgtgtcctgaaaaacctcacagcctgggctcacagcctggatgctcaggacagtctcaagatctggttcaacaacaaaggctggcactccatggtggcctttgtcaaccgagccagcaacgcaatcctccgtgctcacctgcccccaggcccggcccgccacgcccacagcatcaccacactcaaccaccccttgaacctcaccaaggagcagctgtctgagggtgcactgatggcctcctcggtggacgtcctcgtctccatctgtgtggtctttgccatgtcctttgtcccggccagcttcactcttgtcctcattgaggagcgagtcacccgagccaagcacctgcagctcatggggggcctgtcccccaccctctactggcttggcaactttctctgggacatgtgtaactacttggtgccagcatgcatcgtggtgctcatctttctggccttccagcagagggcatatgtggcccctgccaacctgcctgctctcctgctgttgctactactgtatggctggtcgatcacaccgctcatgtacccagcctccttcttcttctccgtgcccagcacagcctatgtggtgctcacctgcataaacctctttattggcatcaatggaagcatggccacctttgtgcttgagctcttctctgatcagaagctgcaggaggtgagccggatcttgaaacaggtcttccttatcttcccccacttctgcttgggccgggggctcattgacatggtgcggaaccaggccatggctgatgcctttgagcgcttgggtgagaacttcctgtcaggagacaggcagttccagtcacccctgcgctgggaggtggtcggcaagaacctcttggccatggtgatacaggggcccctcttccttctcttcacactactgctgcagcaccgaagccaactcctgccacagcccagggtgaggtctctgccactcctgggagaggaggacgaggatgtagcccgtgaacgggagcgggtggtccaaggagccacccagggggatgtgttggtgctgaggaacttgaccaaggtataccgtgggcagaggatgccagctgttgaccgcttgtgcctggggattccccctggtgagtgttttgggctgctgggtgtgaatggagcagggaagacgtccacgtttcgcatggtgacgggggacacattggccagcaggggcgaggctgtgctggcaggccacagcgtggcccgggaacccagtgctgcgcacctcagcatgggatactgccctcaatccgatgccatctttgagctgctgacgggccgcgagcacctggagctgcttgcgcgcctgcgcggtgtcccggaggcccaggttgcccagaccgctggctcgggcctggcgcgtctgggactctcatggtacgcagaccggcctgcaggcacctacagcggagggaacaaacgcaagctggcgacggccctggcgctggttggggacccagccgtggtgtttctggacgagccgaccacaggcatggaccccagcgcgcggcgcttcctttggaacagccttttggccgtggtgcgggagggccgttcagtgatgctcacctcccatagcatggaggagtgtgaagcgctctgctcgcgcctggccatcatggtgaatgggcggttccgctgcctgggcagcccgcaacatctcaagggcaggtcccagccggcagcggccttcgtggcggccgagttccctggggcggagctgcgcgaggcacatggaggccgcctgcgcttccagctgccgccgggagggcgctgcgccctggcgcgcgtctttggagagctggcggtgcacggcgcagagcacggcgtggaggacttttccgtgagccagacgatgctggaggaggtattcttgtacttctccaaggaccaggggaaggacgaggacaccgaagagcagaaggaggcaggagtgggagtggaccccgcgccaggcctgcagcaccccaaacgcgtcagccagttcctcgatgaccctagcactgccgagactgtgctctga

SEQ ID NO: 133689 - DNA, 447 bp, Homo sapiens
atggcttggctcatgcctgtaatcccagcacttttggaggccgagggtggtggcggggggcggtggatctcgagactcatgaacaagctacagccgggctccgtccccaagatcaaccgctccatgcagaactggcaccagctagaaaacctgtccaatttcataaaggccatggtcaggtacggcatgaatcttgtggacctgttggaggccaacgacctgtttgagagtgggaacatgacgcaggtgcaggtgtctcttctcgccctggcggggaagtggagactgggtttcaccatgctggccaggctggtgtctggtgtagaccgggagcgtggactcatgaacaagctacagccgggctccgtccccaagatcaaccgctccatgcagaactggcaccagcgagaaaaagtgactatcttcattaaggccatggttagctaa

SEQ ID NO: 133690 - DNA, 2225 bp, Homo sapiens
tgtcgtcccgtcctgtgcggccccgtcccgccgcccgcttgtcagccatgagctccacgcagttcaacaagggcccctcgtacgggctgttcggcccagggtcaagaaccggctcctggtccaaatatgacccccagaaggagggcagagctccgcacctgggatcgagggactcaccggcctctccatcggccccgacttccagaaggggcctgaaggatgggaactatcttatggcacactcatgaacaagctacagccggggctccgtccccaagatcaaccgctccatgcagaacttggcaccagctagaaaacctgtccaacttcatcaaaggccatggtcagctacggcatgaacccttgtggacctgttcgaggccaacgacctgttttgagagtgggaacatgaccgcaggtgcaggtgtctcttctcgccctgggggggaaaaggccaaagactaaaggggctgcagaaggggggttggacattggcgtcaagtactcggagaagcaggagcggaatttcgacgatgccaccatgaaggctggccagtgcgtcatcggggctgcagatgggcacccaacaaatgcgccagccagtcgggcatgactgcctacggcacgagaaggcatctctatgaccccaagaaccatatcctgccccccatggaccactcgaccatcagcctccagatgggcacgaaacaagtgtgccagccaggtgggcattgacggcttcccgggacccggcggcacatctatgaataccaagctgggaacccgacaagttgtgacaacttctccatgttccttgcagattgggctacacgcagggcgcccaaacccagagcggccaggtctttcggccctgggcggccagatatatgaaccccaagtacttgcccgcaaggcacaattggccgatggggctccctcgggcaccggaagatttgcccggacccgggggaggtccctgaatatcccccttactaccaaggaggaggccggctactgaggctcccaacacgctcttctccccacatcgtctccccatctgggtttttgggtttttctgtgttttcatcttttttttttatttttcttaacccgttcagtgctgccagtcaaccaaaagggtctgtgagtgtcagcgtgggatcaaggcaagcagagcttttttccccctttgccttgatcccttcgcaaggctgagccactgggctgtgggggaaggggtcaaggccatatcccaatacgtgtagggcgaggggtccctgctggcacattcatgctgtgctggtaagaagagacctgggcttggaaggaacccggtccccgacggtttcctggttagcctcgcctctttccccttttgtcagatgagcagtttgcggttcctatgcccgcaagtttcaggaacgaattccaggagaaaaatacattttttcccccaggggtgggggcaaggacagtggagagagtgctaggaaatgagtcccctgggaaaggggaccggggccgtgatgttaaatatctccggcttcccaagtgactggatttgcctaaggaccttcagatcagacagacttcataccctcagacctgccccggggccaggtggagaaagtgagggccgtacaaggaagtgaaattctgagttgttggggctaagcctgaccccctctccatgctccccgccccaacccactctggcctcagtagatttttttttcagttgtggttgttgcccaggctggagtgcagtggcgccatcttggcttcactgcaccttccacctttccgggcttcaaagcgattctccaagccttcagcctccctgagtagcttaggacttgcaggtgctccaaccacgcccgggcttaatttttgtatttttagtagagatggggtttcccccatgttgggccaggctggtctcgaactcctggcctcaggtgtgatccgcccgcctccgcctccccaagcgctggagattacaggtgtgagccagggtgcccaggccctcagtaggttttaaggagtccccagccctcctcccttctgggcccgaccagcttatactgctccatcttccaccggccacatgccccggcaaagtactgcacagggaccccccaccccaggggacctgctccgtgagataaatgtggaaatacgactgtggaccaaacgcaattaaaacctctgttttgtacggagaa

SEQ ID NO: 133691 - DNA, 516 bp, Homo sapiens
  misc_feature (1)...(516): n = a,t,c or g
atgcaaggtcttcgggtttctcattcaacattttatactttgatccctgaggtaacggaaaatcctcatcgcctagactttcattggttcctatcagctcagctggaaagggtggcaagtgggacaatcctgaagaaaaaagagtcacccccacgtcctaaagtacttggaagtgctcgctgggatctgcctgtactccaggttggtgcaactccaccgccctccagtgaagtcccagaagcgatcaagtttaaagtgaaagggggatggaagcattttttctccctatgccttcggagtctgtggcttcagtttgctgcaggttctctccgtggacttctcagaaacctcaactttccacttcgagggacagaaagctacaaggaaaacgctgatggttttngactggtgtctgggctagctaggatcacagctgagagcgaaggtgctctcagtgtccgaagaccacgtgctggtgaacccacaatgagaagcgaaagggtttcaggactctag

SEQ ID NO: 133692 - DNA, 501 bp, Homo sapiens
ctttgttccagaggagcgcagctccgagactgcacttcagcggtgcagcctccctccaggtcggcgagcggcgccagatccgggacttcagggtctccgcgggagcttaggaggctcaggatctgagttggagagccggaaggccaaactccgagccgctgagggactgcgcaggaagaccacagaaataaaccaaagggacaccgcggacagatgtaccagaggacaccactgaagtccaggagaatctccaccaaaaccatcagcgttttccttgtagctttctgtccctcgaagtggaaagttgaggtttctgagaagtccacggagagaacctgcagcaaactgaagccacagactccgaaggcatagggagaaaaaatgcttccatccccctttcactttaaacttgatcgcttctgggacttcactggagggcggtggagttgcaccaacctggagtacaggcagatcccagcgagcacttccaagtactttagg

SEQ ID NO: 133693 - DNA, 1917 bp, Homo sapiens
aggtttttaatcctgataaatcatgcagtatttgaatatcaagacatttttgtagccagctttccttccatattcttcaatattcattgtcgcggggagggagagagagagaaaggttttgcaggcaaagacaggacaccaccgccctccacgctcctctgtggctctgggcatctccctcctctcgcatccaggcggccgcctcggccacgatgcgcttgctgtctgccagggggtccgctgagctcttccgccctggaagcaggttaatattggcgctttcccaagctttctgggtaaaagcgatcccacacaccctgggtcccacagccccagcagccgctcccaaatcccagcccaggaaaatgggtctgggcgtcctcagaagctctgcaagaacccgggcatgaaggggcatcgccgagttaacacatttgcttcgcctccctgcgcgccgcggaacacagcgccccgcccgctggccaccgcgctggggcgagtccgcagttcaggcgcgaggcaagcagccgaggtccggggctgcggccgcggccggggcggacccgggagctgggcttcccaaagcgtcgcgtgtgggcaacggcggcctcctggccgcgtggaactgagccctgcgctgcagcatgaaggcggcggcggcggcggcggcgggcgcgcggccgtgagctcagcccgcgcagcacgtggtcttcggacactgagagcaccttcgctctcagctgtgatcctagctagcccagacaccagtctgtacccaaaggaagagtaggaagttgcaaagggaagctggctaacaagggcttcttctgccctacttggcaaaggcccatacgggtggcctccgtggatatggagctccttcattttgttccaaaaagagctctgccaggctttaccattgccatctcctttctttcctctgctccccctctctgcccctggtactccggatccaatccttggcttaggaatccactcaagccacgtctggctgctttgttccagaggagcgcagctccgagactgcacttcagcggtgcagcctccctccaggtcggcgagcggcgccagatccgggacttcagggtctccgcgggagcttaggaggctcaggatcagaggacaccactgaagtccaggagaatctccaccaaaaccatcagcgttttccttgtagctttctgtccctcgaagtggaaagttgaggtttctgagaagtccacggagagaacctgcagcaaactgaagccacagactccgaaggcatagggagaaaaaatgcttccatccccctttcactttaaacttgatcgcttctgggacttcactggagggcggtggagttgcaccaacctggagtacaggcagatcccagcgagcacttccaagtactttaggacgtgggggtgactcttttttcttcaggattgtcccacttgccaccctttccagctgagctgataggaaccaatgaaagtctaggcgatgaggattttccgttacctcagggatcaaagtataaaatgttgaatgagaaacccgaagaccttgcatcgctgggctgaataacttgttttcttttttatggtgtccagaacaaagcctgtttggtggtctcttcacagggacgtgcatgaaagccttgtcatagccagtgccctgcaccaggcagtgctttagtgggcatgcgcgttcactggggctgcgggaagaagacaggtgaacccggaaatgctgagtcagggtatccgaggtggctgtcgggatggcgggaataaatggcgggaacaggcgaaaatgccaagtcagggtagccaagatggccgctgggatggcgggaaccggcgaatccgggaatgctgagtcagggtagccaagatggttgccggtcgccat

SEQ ID NO: 133694 - DNA, 618 bp, Homo sapiens
tcataaaacataaggaaatgagaacgtgaagtctggaagaaaaacctcactttcaccttttgtactatctgattttactgcaagttcagcactgttggcctccgactccagcaggtggatgtcattgcagtccgccagtgagtgctccaggcagagctgcaggaagcgggcctgggtacgggtgacccgtttcagaagtgacaggagggccactgtctgctcacactcattccagcctttgaaccagccagcgaggatgcccacctggtctcggaacatcatggtgccgggcctttcccctgagggccagggcttaaggacgtttctgggcgtggtggcaacggttgttgggggaggaggaagcctgctcacatggggggaggtcttggtccagccacgcctctccagtttccgcctcggccttcgccgccaccgccgccgctcgggcctcctcaggccaccgccgccgccgtcgccccctctcgggcccgcaagctcccctccctcctcccgcaccgaccaccgccgccgccgccgccgccgccgtcgcgctgcgtcaccgcgccgtgcgtcaccgcccctggccccgccccgacgggggccgccgcgcgccggcat

SEQ ID NO: 133695 - DNA, 343 bp, Homo sapiens
  misc_feature (1)...(343): n = a,t,c or g
ggaagaccccagtccagatccaggactgagatcccagaaccatgaacctggccatcagcaaatacaacatgaaggtcctctacttatccgccttcactagcaaggacgagggcacctacacgtntgcactccaccactctggccattccccacccatctcctcccagaacgtcacattgctcagagacaaactggtcaagtgtgagggcatcagcctgctggctcagaacacctcgtggctgctgctgctcctgctctccctctccctcctccaggccacggatttnatgtccctgtgactggtggggcccatggaggagacaggaagcctcaagttccagtg

SEQ ID NO: 133696 - DNA, 153 bp, Homo sapiens
atgaacctggccatcagcatcgctctcctgctaacagtggaccagagccttcgtctggactgccgccatgagaataccagcagttcacccatccagtacgagttcagcctgacccgtgagacaaagaagcacgtgctctttggcactgtgggg

SEQ ID NO: 133697 - DNA, 1191 bp, Homo sapiens
  misc_feature (1)...(1191): n = a,t,c or g
ccgatagaaaactgcgggctccgagctgggtgcatnaaccggagcggcggcgcgtctggaggaggctgcagagcggaagaccccagtccagatccaggactgagatcccagaaccatgaacctggccatcagcatcgctctcctgctaacagtcttgcaggtctcccgagggcagaaggtgaccagcctaacggcctgcctagaggaccagaaacctgggagagacttggatgaggagtggttgggctgtgcatgggccatagcacggacatggtctgtcctgacagcactcctcggcaggcatggctggttgcctgaagacccccaggatgtgagggcaccaccaagaatttagtggcctaccttgttgagggagagaactgagcatctccagcattctcagccacaaccaaaaaaaaaataaaaaggggcagccctcctttaccactgtggaagtccctcagaggccttggggcattgacccagtgaagatgcaccgtttgaccaaggaaaagcagcgctaagtggaagggttggagaaggaggtaaaggatgaagggttcatcatccctccctgcctaaggaaggctaaaagcattggccctgctggcccctccctgccttccacccaacagtggagacgggctacataaggaggacaagaccctcttcagggctgtccccaagctcccagagatgcttccagaagctctgacccaacagcctcccaagtccaggtgggggtgggagttcccagaagcttgcacaggggttttggccccaagtttttttaaggggagggcatttccttccccttggcccttcagttgccagccccttgcttggcttggtgcctggagccccttcagaacagcccccctgccccgcaggccttgcctttcttcagggatttcttgcggggccctgaggcaaagccatgggagtgagaccccaggagccggacacttctcaggaaatggcttttcccaaccccctagcccccacccggtggttcttcctgttctgtgactgtgtatagtgccacctcttcctcttccctgacttctccccaaccacttagtaagcaacgctaccccaggggctaatgactgcacactgggcttcttttcagaatgaccctaacgagacacatttgcccaaataaacgaacatcccatgtctgctgaaaaa

SEQ ID NO: 133698 - DNA, 1947 bp, Homo sapiens
  misc_feature (1)...(1947): n = a,t,c or g
cggcgatgagaccgttggacactgataacctcccttggcccgaggagaacaggtcagaagaaagggttaaagccttaaaaggggaacttccattgcggggctcagggaggaggataatggtctttgggctgccggaccctgatccccggggtcccgaacccttccgtccctggccagggctgccaaccacagggggagggcccccttccgccgcaacctggcactctcacaccaatgcgggaccgccttctcttttttcctcacccagcaccccaccctggcgtgctttctcccccaatctccgactttgattggctgagcccccggctccccgctcccccttttctccattcccggtgaaaactgcgggctccgagctgggtgcagcaaccggaggcggcggcgcgtctggaggaggctgcatcagcggatagaccccagtccagatccaggactgagatcccagaaccatgaacctggccatcagcatcgctcgtcctgctaacagtcttgcaggtctcccgagggcagaaggtgaccagcgctaacggccgtgcctagtggaccagagccttcgtctggactgccgccatgagaataccagcagtttcaccatccaagtacgagttcagcctgacccgtgagacaaaagaagcacngtgctctttggcactgtgggggtgcctgagcacacattaccgctcccgaaccaactttcaccagcaaatacaacatggaaggtcctcttacttattccgcctttcactaggcaaggacgaggggcaccttacaagtgttgcaattccaccaatttggggccntttccccacccatctttctttccaggaacgttcacagtggttcagaggacaaattgggtcaagtgttgagggcatcaggcttgctggctcagaacacctcgtggctggctgcggctcctgctctcccctctccctcctccagggccacggatttcatgtccctgtgactggtgggggcccatggaggagacaggaagcctcaagttccagtgcagagatcctacttttttgagtcagctgacccccctccccgcaatggcctcaaaccttgagggagaagtggggaccccaccccttcatcaggaagttccaagtgctgcatgcgattatctaccccacgtccaacgcggcccgcctcaccctctcccgcacacctcttggctgttctttttgtacttttttgttccagagctggcttctgtctggtttatttaggttttaatccttccttttctttgagagttcgtgaagaggggaagcccaggattggggaccttgatggagagtgagaggatgtggaggggtaagtgggatgttggggtaccagccactggaggggtcatccttggcccattcgggaccagaaacctggggagagatttgggatgaggagtggttggggctgtgcctgggcctagcacgaacatggtgctgtcctgacagcactcttcggcaggcatggctggtgcctgaagtccccatatgtgagggctccgccaagaatttgtggcctgccttgttagggatagcactgagcatctccagcattctcagccacaaccaaaaaaaaataaaaagggcagccctccttaccactgtgggaagtccctcagaggcctttgggcatgacccagtgaagatgcaggtttgaccaggaaagcagcgctagtggagggttggagaaggaggtaaaggatgagggttcatcatccctccctgcccccgcttcgctggggtctccacgggtgaggctggggaacgccacctcttcctcttccctgacttctccccaaccacttagtagcaacgctaccccaggggctaatgactgcacactgggcttcttttcagaatgaccctaacgagacacatttgcccaaataaacgaacatcccatgtcaaaaaa

SEQ ID NO: 133699 - DNA, 992 bp, Homo sapiens
atggcagaaaggaggcttcgggcttcccactggagtggctgctgcatggtattctccaagaggacccttggaccacctgcctgtgactgccagcaggtgggtacttacactgtgaaattttatgatggagtagttcagactgtcaaacatattcatgtcaaagctttttccaaagatcagaatattgtgggtaatgctaggcctaaagaaacagatcacaaaagtctttcatcatctcctgataaacgagagaagtttaaagaacagagaaaagcaacagtgaatgtgaagaaagacaaagaagataaacccttaaagacagaaaagcgacccaagcagcctgataaagaaggaaagttaatctgttctgaaaaggggaaagtgtcagagaaaagtcttcccaagaacgagaaggaagacaaggaaaacatttccgaaaatgacagagagtattctggagatgcccaagtggataagaaacctgaaaatgacattgtgaagagtccacaagaaaacttgagggaacccaaaagaaaacgaggcagacccccttccatagctcctactgcccaggaaaagtcaaaaaactactcggaaaacactgacaaagacttatcgaggagacgttcctccaggctgtccactaatgggacccatgagatcctagatcctgacttggttgtatcagatttggttgatacggatcctttgcaagacacgttgtctagtaccaaggaatctgaagaaggtcagttgaagtctgctttggaagctggccaggtctcatctgcactgacttgccactcctttggggatggatccggggctgcaggcttggagttgaactgcccatcaatgggagaaaacacgatgaaaacagaaccgacttctccccttgtggaattacaagagatttcgactgtggaaggttcatatttagagttaaattaatcctctttttatatacacttttgcttatgctttgtgaacta

SEQ ID NO: 133700 - DNA, 1828 bp, Homo sapiens
tttttttcttctttggcttcactctcacaaactccttgaatttcttctctttattcttttccttgtcttttgtagccggggaactggcagagaccccgcctttcctgggtcaggggtcttcctggctgggcttgtctgaagctgaagggcccctggtttggacatgcctctccccccgggctctcttctggctccagtgacttctccattccatggaaatacttcatgtgatagtgcaacagtttggctttgcggaaaaattttaaacagtccacaactttgcatctaaacttatggtctagggtcgacagctgggtgcattaggatgacccaaaatcatctgttttcttaaaagtatttgttacttccacagtcggaaatctcttgtaattccacaagggggagaagtcgggttctgttttcatcgtgttttctcccattgatggggcagttcaactccaagcctgcagccccggatccatccccaaaggagtggcaagtcagtgcagatgagacctggccagcttccaaagacgacttcaactgaccttcttcagattccttggtactaagacaacgtgtcttgcaaaggatccgtatcaaccaaatctgatacaaccaagtcagatctagatctcatgggtcccattagtggacagcctggaaggaacgtctcctcgataagtctttgtcagtgttttccgagtagttttttgacttttcctgggatgaatttttgtcaagccgaggacgttttaaatgggacttcacatccttttgatattttccttcttctcagttccaatgttattggttgcaaagttcgagagtttgaatccacagcagtaggagctatggaagggggtctgcctcgttttcttttgggttccctcaagttttcttgtggactcttcacaatgtcattttcaaggttcttatccacttgggcatctccagaatactctctgtcattttcggaaatggttttccttgtcttccttctcggttcttgggaagacttttctctgacactttccccttttcagaacagattaactttccttctttatcaggctgcttgggtcgcttttctgtctttaagggtttatcattctttgtctttcttcacattcactgttgcttttctctgcttctttaaacttctctcgtttatcaggtgatgatgaaagacttttgtgatctgttctttaggcctagcattacccacaatattctgatctttggaaaaagctttgacatgaatatgtttgacagtctgaactactccatcataaaatttcacagtgtaagtaccatccttgttaacagcagtgactttggccgggtaaaaaacgacaatcagaccagcaagcaaggacctgctcatttatttgaaattcaagaagatccatcctccttcaatgcaagccctcctttccctcaagctgtattttcctcctaaagggcgtaaataaggactgtcccagcagaaccactcatcataacgatggttcccaacgccttgaaatggatgagtacttttccttcctcgtagtcaatgtcttctatgtgagctggataccagttttttaaacggtcccgggcttccaactgggctcccacttcaaagctgattcctcgtctgttaggtggatgctttgtcattttcagtcatcaacggggctgcctttattctcctcacggccccactccggttgcgccgctccaggaccaaccgacagaaggactctgcgtgctctgcaccacgtgacctcgtgccgaattcctgcaggcgggactacctaggggcgatcaaggtttttcttct

SEQ ID NO: 133701 - DNA, 639 bp, Homo sapiens
atgtacccataccccaaacccctggctccacaaggagacgaacagaagagcagaagaatggcagcatggcatgacagaagagaaggagcgtctgaatgccgagaaggtgctatcgtagtacaccgttattcccgcgatgatagcgggctggtgtttggaatgctttaatcctgcatattattcatacaaagctgtgaaaacaaaaaacgtgaaggaatatgttcgatggatgatgtactggattgtttttgctctctatactgtgattgaaacagtagccgatcaaacagttgcttggtttcccctgtactatgagctgaagattgctatttgtcatatggctgctttctccctataccaaaggagcaagtttaatatatagaaaattccttcatccacttctttcttcaaaggaaagggagattgatgattatattgtacaagcaaaggaacgaggctatgaaaccatggtaaactttggacggcaaggtttaaaccttgcagctactgctgctgttactgcagcagtaaagagccaaggagcaataactgaacgtttaagaagcttcagtatgcatgatttaacaactatccaaggtgatgagcctgtgggacaaagaccattccaacctctaccag

SEQ ID NO: 133702 - DNA, 1542 bp, Homo sapiens
atgaacgaaactggtaaatttacttcagtaatagggggccgaattcggggatctgggcgagcagccggtgtcacctttctcggtaagctgcaaatcttgggaaaactaggacccttcccagggatcctgggctgggagcggtctccggtttttagacaaatctctcctcctaccacacgtgaccgaatggcaatcagccgccaagagagacaccgcaacgcatcagccgcgggatacaaaggctcggcactgccgtcgcatcctcgggaggatcgcggagcctcccgcgctcggcgtctgcggagcctgcgcagggagcagctgcgaggcgcgccgctcccgggcccgcagggcggtgccgcgctgcgcggggagcaggagcggggagcgcgcgccgcctgccctgagcgcctgcccacccagcgccgccggagcaggggcgccgcgccgcaccgcacgcagccgagcagcgccacagccgccgccgccgtcgcagccgcagtcgccgcagctaggccctcggccgtcgcagggagctccgcagcgacgtggaccaagctcccctgggcctcgcgccggctgcagggcgcagtgagaggcacttacaccacggctctggagatcatccaggacaccatcttcacgggggcttgggccccacgtccggggcggaattttttccccaaagatacccacatgactccatcacttctttctggcactgggaataaagttgtgaaaggaagtggatcaaattgctgcccttatggaaatcagtttatggaaggagagacaaaagataagaagataaatgagtatgatgaatggctggtgtttggaatgctttatcctgcatattattcatacaaagctgtgaaaacaaaaaacgtgaaggaatatgttctataccaggggtccccatcccccggaccatggaccagtaccagtccatggcttgttaggaactgggctgcaaagcaggagttaacatttactgagcacctaccatgcacgaagcacgctaatgagcaatctatagatagctcatttaatccagtcttcggacaaacaagagaggaaaaaaaaaagagaaccggagaaaaaaagcgacacgaacaagagtcagacagcgaaaggcgagcgcggccccaaccaaaccgcacacacgaggacagagggagcgatccccagaaggaagagggcgagcacaacatggccaacatgggaacccccttgcctactaaaatacaaaaattagccaggccactgaaaaatgagagttctgataggtacagaatggggagcaaagtgttaagggaaaaacgaaatctgggcaaaagcactgagcatgaaaatacaggctggcgctgcctgcggcacgaccaaggcctcatcaggccaccgcagatctttcgttatctgcggaatcctgtcgtctatcggctaataactctgtgcatcacaccactgaatatgtactcaatgcgatgcactaccgtctatgatcaggcacgcactaacacgagctacagcgtcacataa

SEQ ID NO: 133703 - DNA, 398 bp, Homo sapiens
ccgggtcgacgatttcgtcgtgtctccgcggagacgttaccgtggtccagctggagaccaaaaggtgaaaatgctcaagttcaaggccttttgcctggattactggcagttcctgtgcctacagcccctgcatggagcctacaaaagcgtcgagggcgaggcccccagcagtgagactggcacatccctggacagcccctcagcctacccccagggccccttggtgcccggttccagcctgagcccggatcactacgagcacacgtcagtgggagcctatgggctgtactcggggccgccggggcaacagcagcgcacgcggaggcccaagctgcagcactcgacctccatcctgcgcaagcaggctgaggaggaggccatcaagcgctcacgctcac

SEQ ID NO: 133704 - DNA, 813 bp, Homo sapiens
atggggtttcgccatgttggccaggctggtctcgaactcctgactttgggtccaacccaaaatgtccccccattagagcctctcctggggcagaattacaagctctttcctccactgtcacgacaccatactggggaatacttgtcacagcagtgtttccccactgaggcctcagaccgagacaatgtcgccaagaccatcctgctgggcggcagggccctgggcctggagaagtgcctgaaattcttggacaatccggatgcacagaccgaacttggtcaaaggcaggaggcaggacccaggctcctgggcccagatccagagctggacgccgagtctctgggcaggaaatcagggctccagggcccctgggctgccggcatggaggctgggagctccctggacaccggaagcagcctctccactgaccgctacagagcccagctgcccccaccccaagcaccatgtggctacatgcccctctccgtgtctccgcggagacgttaccgtggtccagctggagaccaaaaggtgaaaatgctcaagttcaaggccttttgcctggattactggcagttcctgtgcctacagcccctgcatggagcctacaaaagggattcggatttgatgacatggatttggggactgctccctgaggtgacaggggctgcaggcaccacaagcccgaatgttcatacctccggcaggttcttccgagcgtgtgtgttctgtccagtgcacaccttggtcaagaaagaaccacatccgggccagcaggagatcatcatggagccgtcgccatggtcaccttga

SEQ ID NO: 133705 - DNA, 1729 bp, Homo sapiens
tttcgtgagggagcaggggcctgcggggacctggtgtgggtggagtggggacaagcggtggagaagggtacgccagggtcgctgagagactctgttctccctggagggactggttgccatgagagcagccgtctgaggggacgcagcctgcactacgcgccccaagaggctgtgcgtggcgagcaggtcacgtgacgggagcgcgggctttggaaggcggctgaacgtcaggacatccgcgccgctaatgctgatgaagggagattttatctttggaccgcctgcccggggcaaccccgaaccaagctttatccgccgaggccgcgtgtcccaaaggccagacatccctcctctgtggtgccatgggaattcaaggcctggccaaactaattgctgatgtggcccccagtgccatccgggagaatgacatcaagagctacatttggccgtaaggtggccattgatgcctctatgagcatttatcacttcctgattgctgttcgccagggtggggatgtgctgcagaatgaggagggtgagaccaccagccacctgatgggcatgttctaccgcaccattcgcatgaagggaaaacggcatcaagcccatcacaagtcaggcgagctggccaaatgcagtgaactgcggggctgaggcagagaagcagctacagcaggctcaggctgctggggccgagcaggtggtggaaaaattcactaagtggctggtgaaggtcactaagcagcacaacgataagtgcaaacatctgctgagcctcatgggcatcccttaccttgatgcacccatcgaggcagaggccagctgtgctgccctggtgaaggctggcaaagtctatcctgtggctaccgaggacatggactgcttcaccttcggcagccctgtgctaatgcaacacctgactgccagcagtgactactgtaagagtatctggagtattgggcccaagcgggctgtggatctaatccagaagcacaagagcatcgaggagatcgtgcagcgacttgaccccaacaagtaccctttgccagaaaatcggctccacaaggaggcttaccagctcttcttggaacctgaggtgctgggcccagagtctgtggagctgaagtggagcgagccaaatgaagaagagctggtcaagttcgtgtgtggtgaaaagcagttctctgaggagcgaatccacagtggggtcaagaggctgagaactgagaaaggaggaggagaaccaagagggccaactggacacagccaggaagagcatctcccaccaaaagaccagaccatcaggaagaccagcacactcgaagcagatcttcagaaggaagtcattgagggtggttggagggaagacacagaccctagaaagcaagaaccctggcaactcaaaataccagagtgttttcttacttccaaacaaccacacagctccccagcaatggttcttaaccaggctgaaatggctgaaatgtcagacctagaattcagaatctggatggcaatgaagatcatcaagattcatcagaaagttgaagtccaatccaagaaatctaaggaacccagtaaaatgattaacagatcattcatcctgagaaaagtcagctgccatgctatgaggaaagatccacctggcaaaagactgaggcctgccaacaactgtgagaaactgaggcctctaacttatagctctgtgagtgagacaatttacaagtga

SEQ ID NO: 133706 - DNA, 2325 bp, Homo sapiens
acctacgagctggtagaaagcggtaatccagaaaaagggtggggtgacagcgaacaaccaggatccacagtcataccaagggtggtcgaccaccacggcagtatctctacaattgtgcaagagccacagcattactgggcttggggtgcccctgccaatgcagatacagctacaatgaccaaagatttagatgacaacaactcaatgttctttgaatacttggaaaactttcccaagaaggacagtgtactagtgaccaatcctgaagtgacagagatatgtgacctttcagagagagaattcaaaatagctgttttgaggaagctcagcgaaattcaagataacacagagaaggaattcagaatcctatcaggtaaacttaacaaagaggttaaaataacttttaaaaatcaagcagaaattccagagttgaaaaattcaattgatatagtgaagaacgcatcagagtcaacaggagtattgatcaagcagaagaaagaatcaagagaggcgagaggcggaaatacaaagaaaagaacggatgagagaggaaacggtcgacggtggccgatagtggtcctactgtcgtgggactgctctgcgcgctcccggactgggggagtcagaggtctggcagcgctgtctgcgcacacctaccggacgctacctcccaaccccccgtcttcctcctgcctcctcctcctcccgtcacctcctgacccgccggagctccgagcaactgccggcctccgcccccagccgcagccggtcactggcggcgccttccgcgccaagcttgggggccttttcggggtcccacatggcacggcttccgacccccggcccgggacggggctcgcaggccccacaggggcaggctggagaaggaggagaaaagctatgcaggaatccaatggcaaagtagactataaggatgcagacataaatggattaccaacaaaagggccaacagacatctctgataaaaagactaaagtgattttcctagaggatttcatcattttaaaaatggacctgattgccggcatgcccacctgcctccactcctgcatcaaccatgtccatcatggtgacccagaagtcctacaaggtgtccaccagaggtggtcctctggcccccaggccttcggcaactgctcctatgcgcgtgggcccggtgcctgcatcagctccttgagcttctcccgagtgggcagcagcatctttcggggtgtcctgggtggaagttatggtggggccagtggcatgggaagcatcactgctgtcacagtcaaccagagcctgctgagcccccttaacctggaggtggaacccaacatccaggccgtgtgcacccaggagaaggaccctcaacaacaaatttgcctcctccatagacaaggtacaattcctggagcagcagaacaagatgctggagaccaaagctacatcaacagccttaagcagcagctggagactctgggcttggaaaggctgaagctggaggcagagcttggcaacatgccagggctggtggaagacttcaagaacaaatatgaggatgagatcaacaaacgtacagagatggagaatgaatttgtcctcatcaggcagtatgtggatgaagcttatatgaacaaggtagagctagagtcttgcctggaagggctgactgaagagatcaacctcctcgggcagctgtatgaagaggagatccagaagctgcagtcccagatcttggacacatctgtggtgctgtgcatgaacaacagccactccctggacatggacagcatcatcgctgaggtcaaggcgcagtatgaggagatggccaaccacagccaggctgaggctgagagcatgtaccagatcaagtatgaggaactgcagacgctggctgggaagcacggggatgacctgcggcatgcaaagactgagatctgggatgaaccagaacggtgccaagcaggacatggcgtacagctgcatgagtaccaggaactgacgaacatcaggctggccctggacatcaagatcaccatctacaggaagctgctggagggcgaggagagccagttggagtctgggatgcagaacatgaatatccatatgaagaccaccagtggctatgcaggtggtctgagctcggcctatgagggtctcacaagccccagcctcagctatggcctcggctccagctttggctctggcatgggctccatctccttcagccacaccagcttcaccagggccatagttgtgaagaagattgagatccacgatgggaagctggtgtccgagtcctctgatgtcctgcccaagtga

SEQ ID NO: 133707 - DNA, 2325 bp, Homo sapiens; identical to SEQ ID NO: 133706

SEQ ID NO: 133708 - DNA, 410 bp, Homo sapiens
tggaactttaataaattgactggacattatgcatttctctgttgtatctggaatgcgaaggttacaaaacgtcagcagttgtagattttaaataagcaatgacttttgagttgaaccatgatggggtatattgaaaagaatggtggtataatgtcttaaccaagggtgcgggcctccaggtctgactcccaactcagttcttctttaataaccacactttgttaattctccttaacaggggttcctggcaagtcagttctccctcaggccttcagtttcctcacctccagggtccgtatctcctgctgggtgaggtcattggacacagcgcacttggtgcacagcccgcacaggctgccaataaagatgacaatgagcttctggagctgcccgcactgctgcagacgaaa

SEQ ID NO: 133709 - DNA, 419 bp, Homo sapiens; identical to SEQ ID NO: 67858
  misc_feature (1)...(419): n = a,t,c or g

SEQ ID NO: 133710 - DNA, 2319 bp, Homo sapiens
atggctggaggatcatgggaacaatatccctggggggtgtccactttctgcgatatatgtagtcatatcaccccctacgcctttgaatattacgaaggaccatctcacacgggggtgtacacttcctgcgatattgggagtaatatcaacctctcggcctctgaatatgaggaagaaaatcacaggggctatggcgtgtgctcggtggggctggagcggctggcttacgtcttcggtgcttacagcctggggcctcagccgcctcactcctgggcctgctgggcctgtggctgccacgcccagtgcccctcgtggctgcagcaggggtattctgtgagcgcctccaggaatgagaatacagcattattcaaaatagcaaagacgtggaaccaacccaaatgcccatcaatgataggactggaaaaagagtatgtggtacatatacgccatggaatgctatgcagccatcaaaaggaacaagagaatatcctctgcagggacatggatgaagctgaaagccattatcctcagcaaactaatgcagaaacagaaaaccaaacaccacatgttctcacttacaagtggaagccgaacaatgagaacacacggacacagagaggggaacaacacacactggggcctactggagggcagcggtttggagtgatccactcggtgttcaccaacctgcttctgtgggccaatggcgtcctcaatgagtcaaagcaccaactcaatgagcacaaggaacggctcatcactctgggttttgggaacataacaacagttttagatgaccacacaccgcagtgtaactgcacgcccccaactctgtgcactgccatctcccacgggatctactacctctaccccttcaacatagagtatcagatcctggcctccacaatgctctacgtcctgtggaagaacatcgggcgcaaagttgacagccatcagcaccagaagatgcagttcaagtctgatggggtcatgaccaagagcgagtcggcactcatcatgttctacctgtatgccatcaccctgctgatgcttatgggggctgcggggctggctggaatccggatttacaggatagacgagaagtcactggatgagtccaaaaatccggcccgcaaactggactcggacctcttggtgggcactgcctcgggctcctggcttatctcctggggctcaatcttggccatcctctgtgctgagggccacccccgctacacctggtacaacctgccctactccatcctggcgatcgtggagaagtacatccagaacctcttcatctttgaatccattcaccgagagcctgaaaaactctctgaggacatccaaacccttcgggtggtcacagtctgcaatggcaacaccatgccccttgcttcttcctgccccaagagtggaggtgtggccagagatgtggctccccagggcaaggacatgccaccagcagccaatggaaatgtgtgcatgagagaaagccatgacaaggaggaggagaagcaggaggagagcagctggggagggagcccaagcccagtccgccttccccgtttcttacagggcaacgccaagagaaaagtcctgaggaatattgcagccttcttgttcctctgcaatatttcgctttggatacctcccgcctttggctgtcgacctgagtatgacaatggattggaggagattgtctttggctttgaaccctggataattgtggtcaacctggccatgcctttttctattttctatcgaatgcacgcagctgcctccctctttgagcctcagaaggtccaggcgagaagctggcttctggctgcatctgccccagtgtcctctgaggcattcggatggggcgatgactataaaaaccacgtgaaatgcataagtgaagatcagaagtatggtggcaaaggctatgaaggtaaaacccacaaaggcgacatcaaacagcaggcgtggattcagaaaattagtgaattaataaagagacccaatgtcagccccaaagtgagagaacttttagagcaaattagtgcttttgacaacgttcccaggaaaaaggcaaaatttcagaattggatgaagaacagtttaaaagttcataatgaatccattctggaccaggtgtggaatatcttttctgaagcttccaacagcgtgaatgatgaaaggactgtgatgcacgcacagcacgggatactcctcaccaataagatgaatattggtcagttcagcaacctgggtgaatctccagagaaaaacgctgagcgaagagtcagtctcaaaaggttacatactgtatga

SEQ ID NO: 133711 - DNA, 1341 bp, Homo sapiens
atggccgcacgtgccaagggaacaggattcccgtccttctcattcactgcatctcctccaatcccagcaaagcaccagagacgagagattgtagaaataaagacacaagacaaagaggtagaagaaaagacagctgggcccgagggccactaccacctagacgtggagaccagtagtggccccgaatgcctggctgcacagttatttattggatacaagacaagggggcaggttttagatgaccacacaccgcagtgtaactgcacgcccccaactctgtgcactgccatctcccacgggatctactacctctaccccttcaacatagagtatcagatcctggcctccacaatgctctacgtcctgtggaagaacatcgggcgcaaagttgacagccatcagcaccagaagatgcagttcaagtctgatggggtcatggtgggcgcagtcctgggcctgaccgtgctggccgccaccattgctgtggtggtggtatacctgattcatattgggcgctccaagaccaagagcgagtcggcactcatcatgttctacctgtatgccatcaccctgctgatgcttatgggggctgcggggctggctggaatccggatttacaggatagacgagaagtcactggatgagtccaaaaatccggcccgcaaactggactcggacctcttggtgggcactgcctcgggctcctggcttatctcctggggctcaatcttggccatcctctgtgctgagggccacccccgctacacctggtacaacctgccctactccatcctggcgatcgtggagaagtacatccagaacctcttcatctttgaatccattcaccgagagcctgaaaaactctctgaggacatccaaacccttcgggtggtcacagtctgcaatggcaacaccatgccccttgcttcttcctgccccaagagtggaggtgtggccagagatgtggctccccagggcaaggacatgccaccagcagccaatggaaatgtgtgcatgagagaaagccatgacaaggaggaggagaagcaggaggagagcagctggggagggagcccaagcccagtccgccttccccgtttcttacagggcaacgccaagagaaaagtcctgaggaatattgcagccttcttgttcctctgcaatatttcgctttggatacctcccgcctttggctgtcgacctgagtatgacaatggattggaggagattgtctttggctttgaaccctggataattgtggtcaacctggccatgcctttttctattttctatcgaatgcacgcagctgcctccctctttgaggtctattgtaagatatag

SEQ ID NO: 133712 - DNA, 1659 bp, Homo sapiens; identical to SEQ ID NO: 127207

SEQ ID NO: 133713 - DNA, 3561 bp, Homo sapiens
atgcctggcccccaccccgcctcggcttcttgcccgccgcggctttttaccccccgccgccgcgctttttgcccgctgcggatttgtgcccccctcgccgccgcggctttttgcccgccgcgctttctgccacacacccgccgccgcgcgtttttgctcctctgccgccgcggctttttgcccccaccttgcctcgggggggggctcgccgcggctttcttcccccacccgccgctgccctttttgcgcccccaccgccgtggctttttgccccaccgccgccgcggctttttgctcccaccccgcctcggcttcttgcccgccgcggctttttaccccccgccgccgcgcgtttttgcccgccgcggctttgtgcccccctcgccgccgcggctttttgcccgccgcgctttctgccacacaccccccgccgcggctttttccccctctgccgccgcggctttttgccccaccgccgacacagctttttgcacactcgccgccttggctttttgccgccgcggctttctgccccctcgctgccgcggctttttgcccctccgccaccgccgctcctttttgccccaccgccgccgtggctttttgcccaccgcggctttttgccatcgcggctttttactcgccacggccttttacccgccgcggctttttgcgccccgctgtcacggctttttgcccccctgtcgcagcgactttttcgccgccgcggcattttgcccccgccgccgtggctttttgccgctgtcgccgccgctttttgcccccgccgcagtggctttttgtccccgccaccgcggctttttgctgccgcgactttttgccccggtcaccgccgctttttgtcaccgcgactttttgcccccgccgccgaggatttttgtccccgccgccacggctctgagggcgggagcggcagactcggctgccagctctactggcgtcctggcaagggcagcgctgaggggcccctgtggcctgcatagagtggcgctgcctgtggaggcgatgggagagaagaaggagggcggtggtgggggtgatgcggcggccacggagggtggcacaggggctgcggccagccgggcgctgcagcagtgcgggcagctccagaagctcatcgtcatcttcattggcagcctgtgcgggctgtgcaccaagtgcgctgtgtccaacgacctcacccagcaggagatacagaccccggagccagccaagccagccaagccagccagccagaccagacagccaagccagccaagccacccagccagccaagccagccaaaccagtcagccagccaagcagccagccagccaagcctcccagccagccaagccagccaagccacccagccagccaagccagccaagccacagagccagccaggccagccaagccacccagccagaaaggcccgccagccagccagcaagcgagccaagccagccaagcctgccagccagccaagccagccaagacagacagccagccaagccagccaagcctgatagccatccaaggcagccaagccagccaaccagccaagccagccagccagccaagccagccaagccagccagcctgccaagccatccaggcaacccagccagccaagacagccaagccagctggccagccaagctagccaatccactcagccactcaagccagccaagtcacctgtccagcaaagccagccaagccagccagccagcccagacagccaagccagccaagccagccaagccacccagccagccaagccagccaagccgcccagccaagccgcccagccagccaagccagccaagccgcccagccagccagcctgccagccacccagccagcgagccaagccagccaagccagccaggcagccaagccagccaagccagtcaagcccgccagccagccagccaagccaggcatgccagccaagccagccaggcagccaagccagccaagccagccaggcagccaagccaggcatgccagccaagccagccaggcagccaagccagccaagccagccagccagccaagccaggcatgccagccaagccatccagccagctaagccagccggctagccaagccagacaagccacccggccatccaagccagccagccaagccagccaagccagccaaccagccaagccacgaccagcgctgagaggcgccactgcgcgcgtcgcagaggcgaccagcgcgcagagccgccagccgcgtcgccgcgcagagccgtacagcgccgcagagtcgcacagcggctgcgagtgcgcagcgacatgcacgcgcggagagcccgtgcgactgctctggcgcggagaggcgcaggctcagctccactccccagctgtgaaaggagtcatcttctctatcctctttggcaactcaccaaataaatgtgatttagttttagatgaccacacaccgcaatgtaactgcacgcccccaactctctgcaccaccatctcccacgggatctactatatctactacctctaccccttcaacatagagtatcagatcctggcctccacagtgctctacgtcctatggaagaacatcgggcgcaaagttgacagccatcagcaccagaagatgcagttcaagcctgatggggtcacagtgggcacagtcctgggcctgaccgcgctggccgccaccattgccgtggtgaccaagagcaagtcagcactcatcacgttctacctgtatgtcatcaccctgatgaagcttatgggggctgcggggctggctggaatccggatttacaggacagatgagaagtcactggatgagtccaaaaatccgccccgcaaactggactcggacctcttggaccacccccactacacctggtacaacctgccctactccatcgtggtgatcgtggagaagtacatccagaacctcttcatctttgaatccattcaccgagagcctaaaaaactctctgaggacatccaaacccttcggatggtcacagtctgcaatggcaacaccatgccccttgcttcctcctgcctcaagagtggaggtgtggccggagacgtggctccctggggcagggacatgccaccagcagccaatggaaatgtgtgcctgagagaaagctgtgacaaggaggagaagcacgaggagagcagctggggagggaacccaagcccagtccaccttcctcgtttcttacagggcaacgccaagagaaaagtcctgaggaatattgcagccttcttgttcctctgcaatactttggttcaaggggtacgcatgcagatttgttacatgggtaaattgcgtgtcgctgaggtttggtgcacaaatgatcccgtcacccagagtgctgggattacagtgcctggccctgtaaggttcatcacagcacgacttacaataggaaagtcatggaatcaacctagttgcccatcagtggggtaccggataaagcaaaagtggttcttctacagcatcgaatactacacagccatgaaaaagaataaaatcatgtcctttgcagccacatggatgtag

SEQ ID NO: 133714 - DNA, 2289 bp, Homo sapiens
atgcttcaaagcaaccgaaccgccgccagccattcaccatccatccagccagccatccagccagccatccagccagccaaccaactatccatccacaatttgtggacacaattccggcattcaaccaaaattccagttgaatgggtgaatggtgaatggctgaatggacgaatgccaggggatcctcatgaatggcaatgcaactatcagccagccatccagccagccatccagccagccaaccaactatccatccacaatttgtggacacaattccggcattcaaccaaaattccagttgaatgggtgaatggtgaatggctgaatggacgaatgccagggaaacatcatgaatggcaatgcaactatcagccagccatccagccagccatccagccagccaaccaactatccatccacaatttgtggacacaattccggcattcaaccaaaattccagttgaatgggtgaatggtgaatggctgaatggacgaatgccagaagatcatcatgaatggcaatgcaactatcagccagccatccagccagccatccagccagccagccaactatccatccacaatatgtggacacaattccggcattcaggccaaattcctgttgaatgggtgaatggctcccggctgcatggacgccagcaagggatcttcatgcatggcaatgcaacttcgagccattcaccatccatccagccagccatccagccagccatccagccagccaaccaactatccatccacaatttgtggacacaattccggcattcaaccaaaattccagttgaatgggtgaatggtgaatggctgaatggacgaatgcagagaaacatcatgaatggcaatgcaactatcagccattcaccatccatccagccagccatccagccagccatccagccagtcaaccatctatccatccacaatttgtggacacaattccggcattcaaccaaaattccagttgaatgggtgaatggtgaatggctgaatggacgaatgccagggaaaaatcatgaatggcaatgcaactatcagccagccatccagccagccatccagccagccaaccaactatccatccacaatttgtggacacaattccggcattcaaccaaaattccagttgaatgggtgaatggtgaatggctgaatggacgaatgccaggggatcatcatgaatggcaatgcaactatcagatagcgccaatgcttcaaagcaaccgaacagccgccagccattcaccatccatccagccagccatccaggcagccatccagtcagccacccatctatccatccccaatttgtggacgcaagtccggcattcaaccaaaattccagttgaatgggtgaatggtgaatggctgaatggacgaatgccagggagagacatgaatggccatgcaactatcaggtacggcccaaagccggagaaaaacaaccgggcgccgaggcaaaccgagaaacaaggccagaagggggcacaccagcggagagaggggaaggcaagggccggcaacgaggagacagaaaagtactccagaagcagggccatccgacctagaaaaacagatagcgcgtcaagaagctcccgcgggcacagacgaaatcgaaaggcagcaagcgcggccacactaggccccatagaagataccaatcaaaataaactgcatgtcagagacacagggctagaagttaaagctatttcaattcaaggcccaggaactctcatggaagaggtgggcatgtgggatttgatcttatttcattatggtgaaagttggaacctcttacgtgccgatcaacgtctcattttcgccaaaagttggcccagggcttcccggtatcaacagggacaccaggatttatttattctgcgaagtgatcttccgtcacaggtatttattcgcgataagctcatggagcggcgtaaccgtcgcacaggaaggacagagaaagcgcggatctgggaagtgacggacagaacggtcaggacctggattggggaggcggttgccgccgctgctgctgacggtgtgacgttctctgttccggtcacaccacatacgttccgccattcctatgcgatgcacatgctgtatgccggtataccgctgaaagttctgcaaagcctgatgggacataagtccatcagttcaacggaagtctacacgaaggtttttgcgctggatgtggctgcccggcaccgggtgcagtttgcgatgccggagtctgatgcggttgcgatgctgaaacaattatcctga

SEQ ID NO: 133715 - DNA, 2382 bp, Homo sapiens
atgaaaggaattaaggtgaggcagctagagaaaactaaggagcatccccaaaccaaggacagaacaggccccatgcacgccagcgcgcaccccctcaagtctccgggggagcctgagcgaagagcacctctcccgagcggccacggagagccctgcaggcaccgacccccacccttcccacagccgccccgggtacgcagaagccgcttctgcaaggccccgggggaggctgacctgcggaaaacgcaccgaccgcggccctcgggagccccgccccgccccggggatgccaagccgcccctccacctcgcagcggcgccggccgcccagacctgcccaccctcgccgggccgcgccccgccccggcccgctccgccctcggccgccccgccaccgcctccttccggtgctccttcccggctgcagctggccgccagcgcttgtcgggtgttagttccgggcccagcttgggctggtggtaggtcgggagagggcgcggtctcccagcctttgcgcagattgcggggcaccaggtggggccgaggcgacgccgaacgccggcaggccggaaaccgcgcagccccgctggacctcgctgattgccggcggcaccggtggtttcgcgaccttgaacagctactaaaagcgcaaaagaaggcccagagaagggagcacatgctaaaacttgaggctgagaagaaaaagcttcgaactatacttcaagttcagtatgtattgcagaacttgacacaggagcacgtacaaaaagacttcaaagggggtttgaatggtgcagtgtatttgccttcaaaagaacttgactacctcattaagttttcaaaactgacctgccctgaaagaaatgaaagtctgagtgttgaagaccagatggagcagtcatccttgtacttttgggaccttttggaaggtagtgagaaagcagtggtaggaacgacatacaaacacttgaaggatctactgtctaaattgctgaactcaggctattttgaaagtatcccagttcccaaaaatgccaaggaaaaggaagtaccactggaggaagaaatgctaatacaatcagagaaaaaaacacaattatcgaagactgaatctgtcaaagagtcagagtctctaatggaatttgcccagccagagatacaaccacaagagtttcttaacagacgctatatgacagaagtagattattcaaacaaacaaggcgaagagcaaccttgggaagcagattatgctagaaaaccaaatctcccaaaacgttgggatatgcttactgaaccagatggtcaagagaagaaacaggagtcctttaagtcctgggaggcttctggtaagcaccaggaggtatccaagcctgcagtttccttagaacagaggaaacaagacacctcaaaactcaggtctactctgccggaagagcagaagaagcaggagatctccaaatccaagccatctcctagccagtggaagcaagatacacctaaatccaaagcagggtatgttcaagaggaacaaaagaaacaggagacaccaaagctgtggccagttcagctgcagaaagaacaagatccaaagaagcaaactccaaagtcttggacaccttccatgcagagcgaacagaacaccaccaagtcatggaccactcccatgtgtgaagaacaggattcaaaacagccagagactccaaaatcctgggaaaacaatgttgagagtcaaaaacactctttaacatcacagtcacagatttctccaaagtcctggggagtagctacagcaagcctcataccaaatgaccagctgctgcccaggaagttgaacacagaacccaaagatgtgcctaagcctgtgcatcagcctgtaggttcttcctctacccttccgaaggatccagtattgaggaaagaaaaactgcaggatctgatgactcagattcaaggaacttgtaactttatgcaagagtctgttcttgactttgacaaaccttcaagtgcaattccaacgtcacaaccgccttcagctactccaggtagccccgtagcatctaaagaacaaaatctgtccagtcaaagtgattttcttcaagagccgttacaggctacttcttctccagttacttgtagctcaaatgcttgcttggttactaccgatcaggcttcttctggatctgaaacagagtttatgacctcagagactcctgaggcagcaattcccccaggcaagcaaccgtcttcactagcttctccaaatcctcccatggcaaagggctctgaacagggcttccagtcacctccagcaagtagtagttcagtaaccattaacacagcaccctttcaagccatgcagacagtgagtatgaaacatgaatga

SEQ ID NO: 133716 - DNA, 1536 bp, Homo sapiens
atgaaaggaattaaggtgaggcagctagagaaaactaaggagcatccccaaaccaaggacagaacaggccccatgcacgccagcgcgcaccccctcaagtctccgggggagcctgagcgaagagcacctctcccgagcggccacggagagccctgcaggcaccgacccccacccttcccacagccgccccgggtacgcagaagccgcttctgcaaggccccgggggaggctgacctgcggaaaacgcaccgaccgcggccctcgggagccccgccccgccccggggatgccaagccgcccctccacctcgcagcggcgccggccgcccagacctgcccaccctcgccgggccgcgccccgccccggcccgctccgccctcggccgccccgccaccgcctccttccggtgctccttcccggctgcagctggccgccagcgcttgtcgggtgttagttccgggcccagcttgggctggtggtaggtcgggagagggcgcggtctcccagcctttgcgcagattgcggggcaccaggtggggccgaggcgacgccgaacgccggcaggccggaaaccgcgcagccccgctggacctcgctgattgccggcggcaccggtggtttcgcgaccttgaacagatctcagcaatcaccacagtatctgttgcttggaaggtactcagtgggaagataggagaaggtgcagagggcaactgtaaatgtgtcataagtgaaggggcctgggctgtttgccctacccagccctgtggcaaggctaaaccaggccccatagaagataccaatcaaaataaactgcatgtcagagacacagggctagaagttaaagctatttcaattcaaggcccaggaactctcatggaagagagattcctctggatgacagtcatgggaaatggcaagaaagacaggcctcgcggatcccccacttgtctcgacgcaggggacgcccacttgtctgacgcaggggacgtggctgaagtcagtcgggccgcccgcttgctgcacggcagccgtgggactggcacaggctcctcggcagcattatgggcagctggtagagcggccacttctgagagccggatgggccttccgaggtcgggccgtgccccgctgggcagcgcagagggggtgtgtagggcacgcgacttggagccaggtccagacccatcctggctcctctcagggctccttcccctgcccccattccaccccagccctgctggctgtcccgcaggacccagcgccgcggtagccttctctgaactgcggctcaggcggagaagcgccctcgagaagtgtctaaaggagacagttgatagccaaacaacagttttggattcactgactgattatgaaagaagcagtagactggtatcaagaatcagtcaggtaggaaatggagcacttggtggtgtctttggctatgggaaaaaggaaatgcccactgatcccattcctggaaaatgggagaggagacagaatacccttcacaatgaggaaaatgggattaggaattag

SEQ ID NO: 133717 - DNA, 476 bp, Homo sapiens
tacttcccccacacggccatccgctacccacctcatctcaaccgccaggacccgctcaaagatcttgtctcgctggcctgcgacccagccagccagcaacctggaccgttaaatggaagtggtcagctcaaaatgcccagccactgcctttctgctcagatgctggcacctccgcccccggggctgccacggctggcgctcccccctgccaccaaagccgccaccacctccgagggaggagccacgtcgccgacctcgcctttcctggtatctgggatagcaaaggtcttcttccctcgccccttctccatcgtcccaggaatcccagggggcagcacagccggcccccggcccacgttttcggtggaaaattagagtgaacaagaacacccctgccgactcccagcccggccaaaaagacaaaacacatagacgcacacactcaggaggaaaagaaaaaacaaaggcagaagaag

SEQ ID NO: 133718 - DNA, 285 bp, Homo sapiens
cctactctccgcccgacacgtcccctgcaaaccgttcctttgtgggattaggaccaagggatcctgcgggcatttatcaggcacaggaatcccagggggcagcacagccggcccccggcccacgttttcggtggaaaattagagtgaacaagaacacccctgccgactcccagcccggccaaaaagacaaaacacatagacgcacacactcaggaggaaaagaaaaaacaaaggcagaagaagaagaagaagaaataaaaacccacccaagcaagaagacaaaag

SEQ ID NO: 133719 - DNA, 1556 bp, Homo sapiens
ccggctggaattcccgggtcgacgatttcgtagcgcgcccgctccggccggccctgcgcctcccgccgcgcccgggatgtattcgtccccgctctgcctcacccaggatgagttccacccgttcatcgaggccctgctgcctcacgtccgcgccttcgcctacacctggttcaacctgcaggcgcggaagcgcaagtacttcaagaagcacgagaagcggatgtcgaaggacgaggagcgtgcggtcaaggacgagctgctgggcgagaagcccgaggtcaagcagaagtgggcgtcgcggctgctggccaagctgcgcaaggacatccggcccgagtgccgcgaggacttcgtgctgagcatcaccggcaagaaggcgccgggctgcgtgctctccaaccccgaccagaagggcaagatgcggcgcatcgactgtctccggcaggcggacaaggtgtggcggctggacctggtcatggtcatcctgttcaagggcatcccgctggagagcaccgacggcgagcgcctggtcaaggctgcgcagtgcggtcacccggtcctgtgcgtgcagccgcaccacattggcgtggccgtcaaggagctggacctctacctggcctacttcgtgcgtgagcgagatgcagagcaaagcggcagtccccggacagggatgggctctgaccaggaggacagcaagcccatcacgctggtcacgaccgacttccaggagagctttgtcacctccggcgtgttcagcgtcactgagctcatccaagtgtcccggacacccgtggtgactggaacaggacccaacttctccctgggggagctgcaggggcacctggcatacgacctgaacccagccagcactggcctcagaagaacgctgcccagcacctcctccagtgggagcaagcggcacaaatcgggctcgatggaggaagacgtggacacgagccctggcggcgattactacacttcgcccagctcgcccacgagtagcagccgcaactggacggaggacatggaaggaggcatctcgtccccggtgaagaagacagagatggacaagtcaccattcaacagcccgtccccccaggactctccccgcctctccagcttcacccagcaccaccggcccgtcatcgccgtgcacagcgggatcgcccggagcccacacccgtcctccgctctgcatttccctacgacgtccatcctaccccagacggcctccacctacttcccccacacggccatccgctacccacctcatctcaacccccaggacccgctcaaagatcttgtctcgctggcctgcgacccagccagccagcaacctggaccgtcctggtatctgggatagcaaaggtcttcttccctcgccccttctccatcgtcccaggaatcccagggggcagcacagccggcccccggcccacgttttcggtggaaaattagagtgaacaagaacacccctgccgactcccagcccggccaaaaagacaaaacacatagacgcacacactcaggaggaaaagaaaaaacaaaggcagaag

SEQ ID NO: 133720 - DNA, 477 bp, Homo sapiens
ttgagtccagaatctcagaatcgggcgttgggctttgccgggtgcttcagatcaatggatgagttccacccgttcatcgaggcactgctgcctcacgtccgcgctttctcctacacctggttcaacctgcaggcgcggaagcgcaagtacttcaagaagcatgaaaagcggatgtcgaaggacgaggagcgggcggtgaaggacgagctgctgggcgagaagcccgagatcaagcagaagtgggcatcccggctgctggccaagctgcgcaaggacatccggcctgagttccgcgaggacttcgtgctgaccatcacgggcaagaagcccccctgctgcgtgctctccaaccccgaccagaagggcaagatccggcggattgactgcctgcgccaggctgacaaggtgtggcggctggacctggtcatggtgattttgtttaaggggatccccctggaaagtactgatggggagcgg

SEQ ID NO: 133721 - DNA, 734 bp, Homo sapiens
tggacgcaggacatggaggaggcatctcgtcgcggtgaagaagacagagatggcgaagtcaccattcaacagcccgtccccccaggactctccccgcctctccagcttcacccagcaccaccggcccgtcatcgccgtgcacagcgggatcgcccggagcccacacccgtcctccgctctgcatttccctacgacgtccatcttacccccagacggcctccacctacttcccccacacggccatccgcttacccacctcatctcaacccccaggacccgctcaaaagatcttgtctcggctggcctgcgacccaatccagccagcaacctggaccgcctactctccgcccgacacgtcccctgcaaaccgtttcctttgtgggattaggaccaagggatcctgcgggcatttatcaggcacagtcctggtatctgggatagcaaaggtcttctttccctcgccccttctccatcgtcccaggaatcccagggggcagcacagccgggcccccggcccacgttttcggtggaaacattagagtgaacgaagagacactccctgaccgactccgcagcccggccaaaaagacaaaacacatagacgcacacactcaggaggaaaagaaaaaacaaaggcagaagaagaagaagaagaaataaaaacccacccaagcaagaagacaaaaggtaaagacgcaacgtttccaactctcgggacgccaaggccgcagact

SEQ ID NO: 133722 - DNA, 2152 bp, Homo sapiens
atgccccaccggcttcgagcatgggtccccgtgtgcccggcggacacccacgggccgtgtgtccgtcacacgctgtaggcgccgcgcgtggggatctctgcgcgtgtccgtgtgcgggccgagagcccagctccaggcagagctggtgcaggaggagcagggaggtggcgtgctgtgtgtcattgtgatgcctctcacccctggccgcactcccagactgccccggggccgagccttgtgcaatggccgagggggtgtgtggggagggggcggctccccccggggactccttccagcccaggctcccggggaccccgaggtctgcaagttccgttttctagaccgctgctttcctccttacgcaggcccctccgacctcagccttcggggccgggcagtgggtccgccctctgcgtccctggcgctcctgacctctcgcctctccggcctgcaggatgagttccacccgttcatcgaggccctgctgcctcacgtccgcgccttcgcctacacctggttcaacctgcaggcgcggaagcgcaagtacttcaagaagcacgagaagcggatgtcgaaggacgaggagcgtgcggtcaaggacgagctgctgggcgagaagcccgaggtcaagcagaagtgggcgtcgcggctgctggccaagctgcgcaaggacatccggcccgagtgccgcgaggacttcgtgctgagcatcaccggcaagaaggcgccgggctgcgtgctctccaaccccgaccagaagggcaagatgcggcgcatcgacctgtttccggcaggcggacaaggtgtggcggctggacctggtcatggtcatcctgttcaagggcatcccgctggagagcaccgacggcgagcgcctggtcaaggctgcgcagtgcggtcacccggtcctgttgcgttgaagccgcaacacatttggcgttgccgtcaaaggaacttggacctctacctggcctacttcgtgcgtgagcgagatgcatagcaaagcggcagtccccggacagggatgggctctgaccaggaggacagcaagcccatcacgctggacacgaccgacttccaggagagctttgtcacctccggcgtgttcagcgtcactgagctcatccaagtgtcccggacacccgtggtgactggaacaggacccaacttctccctgggggagctgcacgcgcacctggcatacgacctgaaaccagccagcgctggcctcacaagaacgctgtccagcaccttctccagtggtaacaagcgctacaatagcgggctcgatggaggaatacgtagactctaccccttggggcgatgactagacttagcccagctcgcccacgagtagcagccgcaactggacggaggacatggaaggaggcatctcgtccccggtgaagaagacagagatggacaagtcaccattcaacagcccgtccccccaggactctccccgcctctccagcttcacccagcaccaccggcccgtcatcgccgtgcacagcgggatcgcccggagcccacacccgtcctccgctctgcatttccctacggacgtccatccttaccccagacgggccttcacctactttcccccacacggccatccgctacccacctcatctcaacccccaggacccgctcaaagatcttgtctcgctggcctgcgacccagcccagccagcaaccatggacccttaaatggaagtggtcagctcaaaatgcccagccactgcctttctgctcagatgctggcacctccgccccccggggctgccacggctggcgctcccccctgccaccaaacccgccaccacctccgagggaggagccacgtcgccgacctcgccttcctactctccgcccgacacgtcccctgcaaaccgttcctttgtgggattaggaccaagggatcctgcgggcatttatcaggcacagtcctggtatctgggatagcaaaggtcttcttccctcgccccttctccatcgtcccaggaatcccagggggcagcacagccggcccccggcccacgttttcggtggaaaattagagtgaacaagaacacccctgccgactcccagcccggccaaaaagacaaaacacatagacgcacacactcaggaggaaaagaaaaaacaaagg

SEQ ID NO: 133723 - DNA, 1824 bp, Homo sapiens
taggcgcccagggccaggcagcggttgcttccccggcccggctcgcccgcgcttctctccctgtgggcggcggcccggcgcctggaaggtcaagatggaagaaatcctgaggaagctgcacaaggaggcgtccgggagcaagtacaaagccatcaaggagagctgcacctgggccctgggtaagcgtccggcacctgctcgccgcggcgggagggccgcgcggccggggctgaacccgcgcctccgcgcgtggggctttcgcggagcgtcggtcatgggtgccgttctggcgattgcgagagtcgcctcgggaaattgatgtgggatttgagagtcttggctcgggcgtggacatcagccgcctcccctccggtctctttcactctccgaaaccttcctcgggaaccgctgtcctccctgcctggcggcccccttctcctggtcccggcgctggggacgatgcttccccatcgccgagttaggcaggacccggagccggtgcgaatcctggggcctgacagcgaagcgcctctggggaaaagggaagttaaaccaacaaccccgatgtcgaatccttggcgagtggaaccaggaaggaaaggcttgtttaatttgattttcctgatagagcttgctcttagccttatagagctgggcactgttacccagccttggttgactatatatccctctgtcctgcgggaaaaccatgctgatctggttgttcactgtcactgcctttccttggggagcagcatcggctcatcctgggtgccagtccctgctgtgctaactgaaactctaggtggtctggataccattgtcaagatccctccacatgtactgagctgggagaaaaaccttcaaaaacaaaaggggttttgtaagcttatttcagaggctgttggtaggacagaagccaggaaactgggtccagctgtgcttgggggttgggagaaggagagatcccgtgactgggaagggcagagggagagggctgaacacagaggacacccaggactgagcagagcttgtcatttgctgaagggaaagcaaatagatcatcataatacagatgcaagtcctggttctcctacatatgccttttgggacctcgagctggtcattttgcctgtcagtttccgtaaatggagatggaaacgggaaggtagggaggtgcctctgtttccccagtgtgacaggtctgaagagatcccattgcaggccacagaagtggcctcaacctcccctcctggagcagtgaggctccttgctcagacaccctgggctttcagggagaaatgcctgctgcctctccagttggctttggaatccaagaatgtgaagctggcccaacatgctttggcagggatgcagaagcttctgtcggaagagaggtttgtatccatggaaacagattctgatgagaagcagctgctcaatcagatactgaatgccgtgaaagtgacgccttcgctcaacgaggacctgcaggtggaagtgatgaaggttttactatgcatcacctacacgccaacatttgatctgaatgggagtgccgtgctgaagatcgcggaggttcacttttcaaaagacagtgttgtttctgaaaatagcaagaagcaggattggtgtgtaagaggcttgttagccctttgccatgtgaaggaagagaggggaggtgtcaagccactgcccctgctgatggaactggggggaaggggagacaaggagcagagggtcttcaggaggagagggctgccagggattgaggctgttagtatcaacaacaaccaggttttgaatgagagtcagaatgattga

SEQ ID NO: 133724 - DNA, 2631 bp, Homo sapiens
ttaagatttcatcaaatcaccaccatgaccaccaccaccaccaccaccaccaccaccaccaccatcatcatcatcatcatcatcaactgtatgggttcttctatgtctctggagctcatcactccgtgtgaatcttttgccacaaaacatccagttgcatataaaaggtctttctccagtatgccagcgaagatgtgctcgtaaatgagatgttttgccataaactttaccacatccttcaatatgacagatatgctgcttcttttttcctggttcattactgcctcttccttctccttccctacaattaggacaggaacaggcaactcttcgaagcctcttgccaggttgtacctcttgatcagaagtctgctggccttgctgcaaatgcacttgtgtgagttggtcaggactaacagcacctatcgtggcattagcaattcctccaactgctacagttacaggagctatagtagcttgctggacttttactccatcttgtccttgctgctgacctgagccatcactgttgcttggtaacctttcattcatcctatgctggcaatgtacatagcccttcattggctgttccaatttttttccctctgtcctcaaatcctcattcccctttccttgcaccttacaattgtggaagctttgttcttttgctcttcgcaataaatcttgctgctgctcactctttgggtccacactgcctttatgagctgtaacactcaccgcgaaggtctgcagcttcactctatactgaaatacaccacctgtttgctgctgttgttgttgttgttgttgttgttgttgttgttgttttgagacagggtcccgttctgttgcccagactgcaacactagtgattgtaacgggaactccctgcacttgaacacctgcagcacccaggttggcaacgctcactgtctgaaggttaggcactgatgcaagctgggcagtattcaaagttattggggcaccagcaacagccacaggagcaatctgagcaagagttgtgccaccacttgaagacactggggtgatggttaattgttgggataacccagcattctgaacttgcaaatttgaaagactctgaatattctgaacctgtacagtttgccaactgatttgccctgaaggtgttaaagttggagccctgataagcacctgagtcggatttactgcttgaagttgaacattctgtaaaggctgctgctggatggtctgaatcgtctgccctgactggagttgaaacgactgtggtggaatagcctgaatgatctgttgctgaggctgttggatctggatctgctgtaagataggttggcctacaatttgcacctgctgaagagaatttgattgatcctgtgcattctgcattccattaggctgaagctgactggagctctgggcttcagactcagtagcagcaggtgtttgagattcttcaatggtgcgttcagaactactggctgatgtgcttgcatactggccagtatctgctgagctcactaatgtgtcactgcttgtcaaagacgttgaagcagtggttgtgcaggtagtggaggaggagggagattctggcatagtactggcagaagtagtggtgttggtgggtgtggaaactaattgattcccattggaagtcccactatcagcagtagcagcaggctggccaacctgcccagtccctcctccggcagccacgttgtttatcactggcaaagctagagtcactcctccaatgttaattggtagggttgttacaacttgagcctgagtaccaggaagagtctgtaactgcagtggtattgaaacaccaggtctaatttggaccggaactgtctgatttgccaggttttgagcaagaatattcccagaagctgtcctgttagcagctgtgagtatagcttgattattacctgcagaaatgagctgaatttgaccctgcaaatcctgtagagatgaactactagttggattgatttgaatttgttgaccttccactgtctgaagttgtggaattacttggtactgtacactaccacttggattttgtacttgtatgacttgaaattgaccaggggtggaagaattacctgatttagtttttgtaggagatgcactcccgttattactgctggaagaactagacgaactagaggctggttgagaaacgttattctcttttgaagcaggaggagtggaggcaacaagttgccaagcgtttccagcaagttgcgttgttaccagttctagctgttgtggttgattttgaagttgcaccaatccttgacttggatctataataatttgttgttgtccagttgcttgattttcaccaggagtccctattttgctgcaagtagctgccagtaaagccagaggagagggctgagagtcctgggagcctgaggttttgggttttttattgttattctctggctcagaggttttccctccttctgtagccatcgccgctgccgctgccgcctcctcctcctcctccttcttctgatctgtttccagagctgttcgcttattaccaagctctcccatctctgctgaaaaattaagatcaaattgacaagagaactgaacagcattagtcctcagaaacat

SEQ ID NO: 133725 - DNA, 678 bp, Homo sapiens
atgtggaaccgactttgcaactgggtaacaagtataggttggaagagtttggagggctcagaagaagataggaagagttcccaatggggcacactgcctagtggagctgtgagaagagggccaccatcctccagatccaagaatggtagatccaacagcagcttgcaccctgtgcctggcaaagccacaggcactcaactcgagcccatgagagcagtcatgggtgatgaatcctgcaaagccacagggacagagctgctccatgccttgggagcccacccactgcaccggcttctcaaacagcacagccacatgatgtttcaaaaagtccaagtggaacctcttcggaaagatgccccaccattggcagaggctgtgacctttttcctcagaatgaaaccacggaccttcacggtgagcgttacagctcttaaagatggtgtgtccggagtttgttccttcagatgttcagatgtgtccggagtttcttccttccagtgggttcgtggtctcactgacttcaggagtgaagccgcacaccttcgcaaaaggccaggttgtaccaccttccttacaatacagaaacaagctctctcaaccacaagcatcaatgacattatccagtttcgtggaatcactggcaatgcccccatgtatcagaatgtcttctgtggctga

SEQ ID NO: 133726 - DNA, 604 bp, Homo sapiens
atgggcagtgggcctcgggtgagacctagtgctgtgctggcttcaggtctgaatcagagcagtcctagtggtggtagccacagggtgcttatatcaccattccccccaagctccaggcagttcagcacagagagactctatttgggagaaaataaaggaagacaacaagagtctctgcctgttgatccagagaattcttctggatcttacacaagaccatcaagggggtacctctatgagtctgcaaaagccacagtgttactggctttggggttcttggtctcactgacttcaagaatgaagccacggaccctcacagtgagtgttacagctcttaaagatggtgtgtccggagtttgttccttcagatgttcagatgtgtccagagtttcttccttccggtgggtttgtggtctcgctgacttcagaagtgaagctgcagacctttctcaaaaaggtcaagttaacagaaacacatgtccagggcttatacccaaacaagaattccagagaacaaagatcgagatggtagatggggaaagaagaatcagttcagtaatatttcccgtatctgaagagcaagtttatacaatgacaagattca

SEQ ID NO: 133727 - DNA, 1086 bp, Homo sapiens
atggtgtgtccggagttcgttccttcagatgttcagatgtgtctggagtttcttccttctggtgggtttgtggtctcactgacttcaggagtgaagctgcagaccctcgcggtgagtgttacggctcttaaaggcggtgcatctggagttgttcattccttctggtgggtttgtggtcttgctgacttcaggaatgaagctgcagaccttcatggagtgaagctgcagaccttcgtggtgagtgttacagctcataaaggcggtgcggacccaaagagtgagcagcagcaagatttagtgcaaagagtaaaagaacaaagcttccacagcctggagggggacccaagtgggttgcccatgctggctctggtggcctgcttttattcccttatttggccccacccacatcctgctgattggtccatttcacagagagctgattggaagattattgtgggatctgccccgcagcccgcaatgcaatggggctctttccttgttcacgggcagatcggcaggtcgagaaataatagacgcacacaagatagtgaaaactgggtccagggggggtcaccatcttctggtcccgtggtgccgccaatgcactggatataccagcatttattattaagtttagtgaggtcaggggtaggtgtatccccaaacaaattggaaacaaaatactgggacaagagtcttcatagcagcactattcacaatggtccaaaggtgaaaacaaatgaccgtcaatgggtgaatggacaaacaaatgtggtctatccatacaatggaacgtcatgcagccataaagagaatcgaagcacaggtgtatgccacaatgtagatgaaactaaaaagcatgctgctattagaaagaaaccagacatgaaagagattcacaatgcacatcgccttatgaaggcagctgagaatgcctgtagcaagggaacctgtggagctctgtttaatcctgagtttccaaaacctcctgggtcacagaacccctttgatgtagacagcgttttactgagagtgtgggaaatgctgctctgtgatgatacagtgactttgatttgtttaggatga

SEQ ID NO: 133728 - DNA, 1954 bp, Homo sapiens
gcgcgtttcctgaaggtcgatggccaggtggtcttcataaactatactgccttgtgatgcctccctagaaatgagaggtctcaataccagctcagaccatgtggaccgcggatgagattgctcagctatgctatgaacactatggggatcaggctgcccaagaaggggaagcctgagccaagccatgagtggacattattggcagcggtggtgaagatacaatctccagcttgacaaggcctgcgacacccctgataagccggtgcaagtgacaaaggaagttgtgtcaatgggaacaggaacaaaatgcataggacagtccaaaattgaaggaagaacggagacatccttcaatgatagccatgcttgaggtcatagcccagaaggagtttccaaaggtaccttctccaccaactccagttggcagccaccctgaaagaggatagcatctttgtcccaggaactcaaaaaggagtgtggaaacttagacgagaccataattaatgtgtttttctccagccatacaccctgtggggatgcctccatcattccgatgcttgagtttgaagatcagccttgctgtcctgtcttcagaaattgggccaacaactcatcagtagaagccagtagtaacctggaagctcctggaaatgaaagaaaatgtgaagaccctgacagtcctgtaaccaaaaagatgaggcttgagcctgggactgcagccagggaggtcaccaacggagcagctcaccatcagagttttggcaagcagaaaagtggcccaatctcaccaggcatccacagctgtgatctcactgtagagggactggctactgtcaccagaatagcccctggtagtgccaaagtgacagacgtttatagaactggagccaagtgtgtacctggagaagctggagactccggaaagccgggtgctgcgtttcaccaggtgggggctgctccgagtgaagccaggccgtggagacagaacacggtccatgtcctgtagtgacaagatggcccgattggaccgtcctgggatgccaaggggcactgttgatgcacttgctggaagagcccatctacctgtcagctgtggtcattgggaagtgcccatacagccaggaagccatgcagaagagcacctgattggaaggtgtcagaaagtggtctgctttaccaaaaggcttcggagttcaagaattaaaaatactgcagtcagatttactatttgaacagagccgcagtgcggtgcaggcaaaaagggctgatagcccaggtcgacttgttccttgtgggggcagccatcagctggagtgcagttcctgagcagcctttggatgttactgccaatggctttccacagggaacaacaaagaaaacaattggaagccttcaggcaagatcccaaatcagcaaagtggaactcttcagatcattccagaagctgctaagcagaattgcaagggacaagtggccacactccctcagggtgcagaagctggatacctaccaggagtacaaggaggctgcgtcctcttaccaggaagcctggagcacactccggaagcaggtgtttggatcctggatcagaaacccaccggattatcaccagttcaagtgagaaggaaatgtttgctctggtagcaggaccctttcatcctgaactgccttcctccacgcaggacaagtcttagcttttttggtagttaaatcagggaacattctttctgagctttgcatctctgttgtgtaatacagatggaatctggaacttagagcaagctatacttgattgaagtagctctctgctaaaatggcatctcactaatgacctcactatctgacttccattgtgttttattgcttctctaaaatatgaaatcagagtttggaacatgatgctttgaaagtactctgcagcagctctgttttatgggttcctacattgatcaag

SEQ ID NO: 133729 - DNA, 295 bp, Homo sapiens
accaagtacagatggactgagtacggcctgacgtttacagagaaatggaataccgacaatacactaggcaccgagattactgtggaagatcagcttgcacgtggactgaagctgaccttcgattcatccttctcacctaacactgggaaaaaaatgctaaaatcaagactgatgaatccagcttcacactaatgtgaatgacgggacagagtttggcggctccatttaccagaaagtgaacaagaggttggagacccctgtcaattttgcctggacagcaggaacagtaacacgg

SEQ ID NO: 133730 - DNA, 354 bp, Homo sapiens
atgctaaaatcaagacagggtacaaagcgggagcacattaacctgggctgcgacatggatttcgacattgttgggccttccatccggggtgctctggtgctaggttacgagggctggctggccggctaccagatgaattttgagactgcaaaatcccgagtgacccagagcaactttgcagttggctacaagactgatgaattccagcttcacactaatgtcctcctcctgaatctggagaggacttgcttcctcactggccccacaccaacacctcctcctctgtcctggttgccaggaacgactttctctctgacatgggcaatgacaggtagatacacaattaatagccag

SEQ ID NO: 133731 - DNA, 2015 bp, Homo sapiens
gccgctcgctcggctccgctccctggctcggctccctgcctccgcgtcgcagcccccgccgtagccgcctccgagcccgccgccacatcctctgagcagaagatggctgtgccacccacgtatgccgatcttggcaaatctgccagggatgtcttcaccaagggctatggatttggcttaataaaacttgatttgaaaaccaaatctgagaatggattggaatttacaagctcaggctcagccaacactgagaccaccaaagtgacgggcagtctggaaaccaagtacagatggactgagtacgggcctgacgtttacagagaaatggaataccgacaatacactaggcacccgagattactgtgggaagatcagctttgcacgtgggacttgaagcttgaccttccgattcatccttctcaccctaacacttgggaaaaaaaatgctaaaatcaagacagggtacaagcgggagcacattaacctgggctgcgacatggatttcgacattgctgggccttccatccggggtgctctggtgctaggttacgagggctggctggccggctaccagatgaatttttgagactgcaaaattcccgagtgaccccagagcaacttttggcagttggctaacaagacttgatgaattccaagcttcacggtgaatgtgaaatgaccgggacagagtttggcggctccatttaccagaaagtgaacaagaagtttggagaccgctgtcaatcttccctggacaagcaggaaacagtaacacgcgtttcgaaatagcagccaagtatcaagattgacccttgacgcctgcttctcgggtaaagtgaacaactccagcctgataggtttaggatacactccagactctaaagccaggtattaaactgacactgtcagctcttcatggatggcaagaaccgtcaatgcttggtggccacaagctttggtctaggactggaatttcaagcataaatgaatactgtacaattgtttaattttaaactattttggcaggcatagctacctttcagaattttagtgttatctttttaatgttgtatgtctggggatggcaagtattgcttaaatatgttaggccctccgggtttaaagttggatttcagcttttaagatgttatcccttccagagggtacaggaaggaaacctattttccaaaaaaggtccctttcagtgggtagactcggggagaaacttggtgcccccttttgagatgccaggttttttttttaatctaaaaatggctgcaagtggaagcggaataatatgtaggccactttgtaaatttcatattgagtaaatgaatgaaaatggtgatttcccgaggaatcgaaccttggttccctaacccctaattcgatgagaggcttcctggcttggatggtgtgtacaaaacctcacctgaatgggactttttttagaccagatcttcatgaaccctgttcccacccccagtttcatcaatcacctctttttaccaccaaaaaggtctgcaggggtgtggtaactgtttccttttgtgcccattttgggggtgggagaagggtggatgtgatgaaagcccaataaatcaaggacttaatcccttccttgtgttgtgttttttttttgccccttgccaccagaagtatgaaatagcttccccaggagctcccagctataaagcttgggaagtgtctgtgtggattgtaaatcacatgggtgacaaccactcaggaatcttaaattgggacttctggtggtattctcaccactcaatttgtttttttagcagatttaatggggtacattttaggagtcttcccattttgttgggaattaggatccctccccctttcaaatgctgtaattaaccaacactttaaaaaacttggaataaaatatttgaaacctcaaaaaaaaaaaaaaaaaaaaagggcggccgctctagagtatccctcgaggggcccaagcttacgcgtacccagctttcttgtacaaagtg

SEQ ID NO: 133732 - DNA, 932 bp, Homo sapiens
atgaaagagaagaatcctgaggaagttctaaaattttggtttgagcaccagggtgtatggtggaggatctggatttgggaaaaaagggacatcctggggagctcccgaggggagaacttgccggagccgccccagggatgcattgcagttagccttgggaggaccaaggggacttccccaagggaaggggacaacatcattggagccaaagaagctgagacaacttcctggcccggtgattctagtgttttcttggtcacgaacaggcccacaaggctggccccaaacctgctggaatgcctgtccccctggtccaggggccaggaaggagaaggatcaacagcagccacacacaggaaccaggatgattcctggatctgtatccttcacacttactataccttcagtaccatcagtgctcgttcactcacaggttttacaaagagacgaaacatgcattcctattttaatggagaaaacaagataaacgtatgcctaggaatggagacatttattatcatcgatgacgatgagactgcttgtgagctaatgtcatccctcctcccatgtgctctgtgcccctgccagcctgagtgatcaccagtggcccccaccggccctgtgtccctcctccaggcctcagcctgtgcccttccttggtctgggacactctcttccaggcctcagccctgtcccactcatccctcaggtattgaggcttagctgtgtcttcctctagttacccaactgggttagcttcctctctcctgctccacagcacctggtacctccctgtcccagcacttgtcctactatgttgaaattgttttaagcgtcagcagcagatttaaacgccatcagggaagagactgtgtcttctcttatactctcactgtctagcaccagacgatcagtaggtgcccaataaatat

SEQ ID NO: 133733 - DNA, 1297 bp, Homo sapiens
gcaccaaggcggcagtcttgattcccttttggccagcagtttttaggtctgtcagtactgcactgcaagaatggcagattttgggatctctgctggccagtttgtggcagtggtctgggataagtcatccccagtggaggctctgaaaggtctggtggataagcttcaagcgttaaccggcaatgagggccgcgtgtctgtggaaaacatcaagcagctgttgcaatgtttagtcccaggaagcaccactcctgcacagtgcctgagattttggcctgaaatcgcccggatccttcggcctggtggatgtctttttctgaaggagccagtagagacagctgtagataacaatagcaaagtgaagacagcatctaagctgtggttcagccctgactctttcctggtcttgtggaagagaaagagctgcagcgggagcccctaacccctgaggaagtacagtctgttcgagaacaccttggtcatgaaagtgacaacctgctgtttgttcagatcacaggcaaaaaaccaaactttgaagtgggttcttctatgcagcttaagctttctatcaccaagaagtcttctccttcagtgaaacctgctgtggaccctgctgctgccaagctgtggaccctctcagccaacgatatggaggacgacagcatggatctcattgactcagatgagctgctggatccagaagatttgaagaagccagatccagcttcccctgcgggcttgcttcttgtggggaagggaaaaagaggaaggcctgtaagaactgcacctgtggccttgccgaagaacttggaaaaagagaagtcaagggaacagatgagctcccaacccaagtcagctttgtggaaactgctaccgtggagcgatgccttccggctgtgccagctgcccctaccttgggatgccagccttcaaacctggggaaaaggtgcttctgagtgatagcaatcttcatgatgcctaggaggttcctgacatgggacccatctgctcctccagccaactcctgtccctcacatcccaccatggtggctcctcccacctcctctggatttgttcactctgagatctgtttgcagagtgggtgcttagcagacagagtgaagctggctgggggggcacagtggtgtgttagtgctgctgtgttattcaaaagaccaaggtattatgggacctggtttcagaatgggatgggtttcttcacctcatgttaagagaagggagtgtgtcctgaagaagcccttcttctgatgttaaaatgctgaccagaacgctcttg

SEQ ID NO: 133734 - DNA, 1271 bp, Homo sapiens
  misc_feature (1)...(1271): n = a,t,c or g
cggaagcgagctcatgcggcagtcttgattccctttttggccagcagtttttcaggtctgtcagtactgcactgcaagaatggcagattttgggatctctgctggccagtttgtggcagtggtctgggataagtcatccccagtgggaggctcttaaaggtcttggtggataagcttcaagcgtttaaccgggcaatgagggccgcgtgtctgtgggaaaacatcaaggcagctgttgcaattctgcccacaaagaatcccagctttggacattattttgttcaggtttagtcccagggaaggcaccactctggcacagtgcttgagatttttgggctggaaatccgcccggattccttcggcctgggtggatgttctttttcctgaaggagccagtagagacagctgttagataacaataggcaaagtggaagacagcatctaagctggtgttcagcccttgactctttctggtcttgtgggaagttgaaagagctgcagcgggagcccctaacccctgaggaagtacagtctgttcgagaacaccttggtcatgaaagtgacaacctgctgtttgttcagatcacaggcaaaaaaccaaactttgaagtgggttcttctaggcagcttaagctttccatcaccaagaagtcttctccttcagtgaaacctgctgtggaccctgctgctgccaagctggtggaccctctcagccaacgatatggaggacgacagcatgtgcatcttctgtggatgtagtttaactcaccgttggcctcttgagcatgtggtccaggttgaaacatgatggatcaacccaaaaggaggacaagggtggacacccttctttaccccctgnactcccaagtttccctctcgaagccctgnaagtcactttagcttttcaattaagcagaagacccacgacctgtatcactcattgctttgaacactctcccaggatctcattgactcagatgagctgctggatccagaagatttgaagaagccagatcccagccttctgcgggctgcttcttgtggggaagggaaaaagaggaaggcctgtaagaactgcacctgtggccttgctgaagaactggaaaaagagaagtcaagggaacagatgagctcccaacccaagtcagcttgtggaaactgctacctgggcgatgccttccgctgtgccagctgcccctaccttgggatgccagccttcaaacctgggggaaaaggtgcttctgagtgatagcaatcttcatgatgcctag

SEQ ID NO: 133735 - DNA, 678 bp, Homo sapiens
  misc_feature (1)...(678): n = a,t,c or g
cccaagattttggcacgagggcgcttgcggcagtccagatcaaaaatggcggtagttggtggtgtcctccggtttctctggctgctggcgtcggtccccgcccacagctgggccggccctatgttcgagtggcgccccatggccaagtagcggctcagcttcgccatgtggaagactctcacccttctttcgtggcgcttcccccggggtgggcagtcaagcaatgctgaaatgtgtagcctgaagtccgcaccactggagagcacggagagaccccgagttcatcgcctacccccgatctccgccatcaggaccaagcccgtttccctgggggagatggtaaccatactcaacaatacataacccctcattgtgaatccactttccaacttggctaccgaagattgaataaaagaagaatcttggaccactaacccgggcaccaggggcacccaacaagcactggttttgggaccgtttactcttggcacattggacccagaaaaaaagtatatttggggacctttaagctcaccttcttttactttgtatcaaaatgattgacttggtatacttgggtctccccatcccttttgccttgttgggcaaggagattggcttaaataaataacttacccttaaaaaaaagagttctacaacnctgtctatggtctcgat

SEQ ID NO: 133736 - DNA, 450 bp, Homo sapiens; identical to SEQ ID NO: 119663
  misc_feature (1)...(450): n = a,t,c or g

SEQ ID NO: 133737 - DNA, 2037 bp, Homo sapiens; identical to SEQ ID NO: 119665

SEQ ID NO: 133738 - DNA, 467 bp, Homo sapiens
ggaattcccgcgtcgacgatttcgtgccccaccccgaggggtcaggggtcagaggccgccggatggcgtaagatcggccgctggtggtggtgataccgggtacccgggctatggcgccggcgcagcgctgccctctgtgccgccagaccttcttctgtggtcgcgggcacgtttacagccgcaagcaccagcggcagctgaaggaggctttggagaggctcctgccccaggtgcggaggcaaggctagagatgggatgggagtgcggggcaggtcagtgaaggccagagcgggtgtgatttgggggtccccctcggggttctacttggcctctctgcggcaggtggaggcggcccgcaaggccatccgcgccgctcaggtggagcgctatgtgcccgaacacgagcgatgctgctggtgcctgtgctgcggctgtgaggtgcgggaacacctgagccatggaaacct

SEQ ID NO: 133739 - DNA, 742 bp, Homo sapiens
ttgggatacacctaccacattatccaaccgttccacccctaactagagaaaaagaaagccctgtcctacatagacttgtacacaaatccttcagaacagcttcacttgtagcagctcccaaattggaaacaattcagatgtctatcaacaggcaaatggattaacaatggaatagtattcccaggatgaagacagaattattgatacgtacgacacagatgaatctcagaagtccagacctggccggcgtggtggctcatgcctgtaatcccgacactttgggaggccaaggcgggcggatcacgaggtgccacacctccctggatgatccaagatgaagaatacattgctgggaaccaagaaataggaccatcctatgaagaatttcttaaagaaaaggaaaaacagaagttgaaaaaactccccccagaccgagttggggccaactttgatcacagctccaggaccagtgcaggctggctgccctcttttggccgcgtctggaataatggacgccgctggcagtccagacatcaattcaaaactgaagctgcagcaatgaagaagcagtcacatacagaaaaaagctaatcatgctctctaccaactaccatgaggctaaaagcaaagtcaacaaacccctattataccttccaccaaattctttatcattgtctttcttaggaaacagacatactcattcatttgatttaataaagttttatttttccaaatgtagaaa

SEQ ID NO: 133740 - DNA, 681 bp, Homo sapiens
tttcgtcgccggatggcgtaggatcggccgctggtggtggtgataccgggtacccgggcttatggcgccggcgcagcgctgccctctgtgccgccagaccttcttctgtggtcgcgggcacgtttacagccgcaagcaccagcggcagctgaaggaggctttggagaggctcctgccccaggtgcggaggtggaggcggcccgcaaggccatccgcgccgctcaggtggagcgctatgtgcccgaacacgagcgatgctgctggtgcctgtgctgcggctgtgaggtgcgggaacacctgagccatggaaacctgacggtgctgtacggggggctgctggagcatctggccagcccagagcacaagaaagcaaccaacaaattctggtgggagaacaaagctgaggtccagatgaaagagaagtttctggtcactccccaggattatgcgcgattcaagaaatccatggtgaaaggtttggattcctatgaagaaaaggaggataaagtgatcaaggagatggcagctcagatccgtgaggtggagcagagccgacagggaggtggttcggtctgtcttagagcctcaggcagtgccagacccagaagagggctcttcagcacctataagctggaaagggatgaacagccaagtagctttcagcttacagcagcccttaag

SEQ ID NO: 133741 - DNA, 4017 bp, Homo sapiens
atgaagaagacagaagacaacaacgcacttgtgttcactgtgaatgttaaagccaacaagcaccagaagaagctctatgacactgatgtggccaaggtcaacaccctgattcggcctgatggagagaaggaacatgttcgactggctcctgattacaatgctttggatgttgccaacaaaatagggatcatctcaactgagtccatgggtcatgcagtgctggccatcaatggcatggacgtgaatggcaggtacacggccgacgggaaagaggtgctggagtatctgggtaaccctgctaattacccggtgtccattcgatttggccggccccgcctcacttctaatgagaagcttatgctggcctccatgttccactcgctctttgccatcggctcccagctgtctcctgaacagggaagctcaggcattgagatgctggagacagacacattcaaattgcactgctaccagacactgacaggtatgcatctccacggaggccagaggagtgtgatggagaaggtggagcgctatgtgcccgaacacgagcgatgctgctggtgcctgtgctgcggctgtgaggtgcgggaacacctgagccatggaaacctgacggtgctgtacggggggctgctggagcatctggccagaacagcttcacttgtagcagctccaaattggaaacaattcagatgtctatcaacaggcaaatggattaacaatggaatagtattccaggatgaagacagaattattgatacgtacgacacagatgaatctcagaagtccagacctggccggcgtggtgccacacctccctggatgatccaagatgaagaatacattgctgggaaccaagaaataggaccatcctatgaagaatttcttaaagaaaaggaaaaacagaagttgaaaaaactccccccagaccgagttggggccaactttgatcacagctccaggaccagtgcaggctggctgccctcttttggccgcgtctggaataatggacgccgctggcagtccagagctccagaaggggagagggaggtgccatggagtgaggagcagaccccagacccacacacttccaggagcctccgtatcccggctgaggtggcgccgcggagtaagcggcgctgtgtgctggagcggaagcagccgtacagtggggacgaatggtgctctggaccggacagtgaggaggacgacaagcccattggggccacccacagcaagcttcttcaaagagctgtctacactaactctagtgcctcaactcccagttacctctgcactcttacaggcagcttctgcctcctcaccctcccagggaagcttagggtcctgttctgggaactggacagattggacaactataacgacacctccctggtggaaaatcatctctgccctgccacagaggggcccctcatggcctccttcaaggccgtgttcgtgcccgtggcctacagcctcatcttcctcctgggcgtgatcggcaacgtcctggtgctggtgatcctggagcggcaccggcagacacgcagttccacggagaccttcctgttccacctggccgtggccgacctcctgctggtcttcatcttgccctttgccgtggccgagggctctgtgggctgggtcctggggaccttcctctgcaaaactgtgattgccctgcacaaagtcaacttctactgcagcagcctgctcctggcctgcatcgccgtggaccgctacctggccattgtccacgccgtccatgcctaccgccaccgccgcctcctctccatccacatcacctgtgggaccatctggctggtgggcttcctccttgccttgccagagattctcttcgccaaagtcagccaaggccatcacaacaactccctgccacgttgcaccttctcccaagagaaccaagcagaaacgcatgcctggttcacctcccgattcctctaccatgtggcgggattcctgctgcccatgctggtgatgggctggtgctacgtgggggtagtgcacaggttgcgccaggcccagcggcgccctcagcggcagaaggcagtcagggtggccatcctggtgacaagcatcttcttcctctgctggtcaccctaccacatcgtcatcttcctggacaccctggcgaggctgaaggccgtggacaatacctgcaagcttaaatgcctctctccccgtggccatcaccatgtgtgagttcctgggcctggcccactgctgcctcaaccccatgctctacactttcgccggcgtgaagttccgcagtgacctgtcgcggctcctgaccaagctgggctgtaccggccctgcctccctgtgccagctcttccctagctggcgcaggagcagtctctctgagtcagagaatgccacctctctcaccacgttctaggtcccagtgtccccttttattgctgcttttccttggggcaggcagtgatgctggatgctccttccaacaggagctgggatcctaagggctcaccgtggctaagagtgtcctaggagtatcctcatttggggtagctagaggaaccaacccccatttctagaacatccctgccagctcttctgccggccctggggctatgctggagcccagggagcggaaagcagctcaaaggcacagtgaaggctgtccttacccatctgacacccccctgggctgagagaacctcacgcacctcccatcctaatcatccaatgctcaagaaacaacttctacttctgcccttgccaacggagagcgcctgcccctcccagaacacactccatcagcttaggggctgctgacctccacagcttcccctctctcctcctgcccacctgtcaaacaaagccagaagctgagcaccaggggatgagtggaggttaaggctgaggaaaggccagctggcagcagagtgtggccttcggacaactcagtccctaaaaacacagacattctgccaggcccccaagcctgcagtcatcttgaccaagcaggaagctcagactggttgagttcaggtagctgcccctggctctgaccgaaacagcgctgggtccaccccatgtcaccggatcctgggtggtctgcaggcagggctgactctaggtgcccttggaggccagccagtgacctgaggaagcgtgaaggccgagaagcaagaaagaaacccgacagagggaagaaaagagctttctttccgaaccccaaggagggagatggatcaatcaaacccggctgtcccctccgcccaggcgagatggggtggggggagaactcctagggtggctgggtccaggggatgggaggttgtgggcattgatggggaaggaggctggcttgtcccctcctcactcccttcccataagctatagacccgaggaaactcagagtcggaacggagaaaggtggactggaaggggcccgtgggagtcatctcaaccatcccctccgttggcatcaccttaggcagggaagtgtaagaaacacactgaggcaggaactcccaggcccaggaagccgtgccctgcccccgtgaggatgtcactcagatggaaccgcaggaagctgctccgtgcttgtttgctcacctggggtgtgggaggcccgtccggcagttctgggtgctccctaccacctccccagcctttgatcaggtggggagtcagggacccctgcccttgtcccactcaagccaagcagccaagctccttgggaggccccactggggaaataacagctgtggctcacgtgagagtgtcttcacggcaggacaacgagaaagccctaagacgtcccttttttctctgagtatctcctcgcaagctgggtaatcgatggggagtctgaagcagatgcaaagaggcagaggatggattttgaattttctttttaataaaaaggcacctataaaacaggtcaatacagtacaggcagcacagagacccccggaacaagcctaaaaattgtttcaaaataaaaaccaagaagatgtcttc

SEQ ID NO: 133742 - DNA, 1388 bp, Homo sapiens
cggcccccattgacgccgcattagaggcctgaagtaccgggtcgacccacgcgtccgggcggaagacaggaagcggattctagttcccaagccgcaccgcctaaatactgccggagtctgcgctagttgtgacgcagtactatagcgctgttttcctgcactgataaacgaaaagcaatccaccaggtctcggcagctaactttccggcactacttatgcccgagcgtgtcgctcccagtgcgcaagtgcagcaggtggctgcacggagggcgcgggaggaggaggaggagaatgaggaggaggatggctgggtggggccggcggcaagtgctgtgatgcggttccggggaggggccgtcgggtagaggctgaataccagtttccgagcggcaaggcagcgattggcgattttttagtgtgtatgtggtgaacaaagctggcggcttgatttaccagttggacagctacgcgcccacgggcttgaggcttgagaaaactttcaagttatccgctggatcttgctggctcaagctaacacgatgagcgtgtgttggttgctttcggccagcggggacggcatcccgagtggggtcatgcagtgctgggccatcaatggcatgggacgtgaatggcaggtacacggccgacggggaaagaggtgctggagtatctggggtaacccctgcttaattacccggtgtccattcgattttggccggccccgcctcaacttctaatgaagaagcttatgctgggcctcccatgtttccactcgctctttgccatcgggctcccaagcttgtcttcctggaacaagggaagcctcaaggcatttgaagatccttggaagacaagacacattcaaatttgcactggctaccagacactgacaagggatcaagtttgtggttctaagcagatcctagggcaagctgggattagattctcttctccgaaagatttatgaggatttacttcagactttgccctcaagaatcccattctaattccttagaaatgcctatcaggtgtgagctctttgaccagaacctgaagctagctctggaggtggcagagaaggctggaacttttggacctgggtcataggctgaacctgttatggacctccaaattctgagagttcctgcaacaagaatactgctgttgacactccagtggaaatcccagcagccttgttagtgcacttgaaagtgggagaatgctgaccctgatgacttgtactgattcctgagccttaacactgtgctctttccttctgtatataccatggtcttactttccaactctgtacagatttatttatggaggagctaggtccataaatgttgtaataaatattcctttgatcttggtgtttgcaaaaaaa

SEQ ID NO: 133743 - DNA, 312 bp, Homo sapiens
ggcacgaggggagtcctcaaagttccatctgtgatttcttcggcagttggtattctcctttgtaataaattttgaaaaaatggggaccgtgcagaaataacagccttgtgggctttgagctcttcatctaaacagttctgatgtccaccaaaagcttcttccagttcagagtctgaagaaaagctaaggacgacatcgtaataacacatgtaatcaaagagtccacgcatatctacatcaagggaattcttcactaagctgaacaaggataacgacattttgaaaccctgagtcttccattccaaactctcc

SEQ ID NO: 133744 - DNA, 317 bp, Homo sapiens
ttgtcttgtggtttctcatggccatggtcaaggctatacaactttgattcgcaaccatagccttgctgagaataggatgaggtccctataaaagtctgttgggcctgtgaatttccccctaccctcggggaacatgaatgaggataattagatgcattagcacccattttcttcagtcactcaggcattccgtctgcgggttcttcagagtataatcccagaggcctttatgaaccttcaaccctggatccagcagcctcttttcatccatttccggacaatctaacttccccctgggagtagcagtcctcaggcct

SEQ ID NO: 133745 - DNA, 389 bp, Homo sapiens
gatcaagagccttttgggcatagtgaaattttaaaaccttgaaaaataattagatatataaatgaatgtgttcccaggaaattaagatactatcttaaaaacttataagattctggtatgaaatacatgcttttttcccttgggctcacggggtcgtcttttgtgtagctcaggaattttgcttgcccactgttgttctccttccagttcctcgtctcctcattatgaaagacatggtcagacgactgcaggaactgcggcacacggagcaggtgcagagggcctatgccctgaactgcggggaaggcgccactgtcagctatgaaattcagattcgagtgctaagagagtttggtcttgcagatgctgctgcagagctgttgcagaat

SEQ ID NO: 133746 - DNA, 2257 bp, Homo sapiens
tttttttttttttaccaagcacgaataagtgtttccgttttatttaacacttaagcagaacatttttgactatacatctatataatgcacagtactaaaaaagtgcaaaatattcatcataaacatgaggaaagtgaataccacaatggttgcatcaactcaactaggcaattttgctcgttaacaaaaacacagctttttctgaaagttttttggacgttaacagctgttcaacatcatcttccatctaattccttctgaactgcttcaggttgcctagcacatatgcagctggtgttaagaaggtcgtaaaaaacaccacaagtccaacagccatttccgcggcagacaggggccgctggcgcgggggccccgagtgggcgaagcggggagcgggctgcaggccgagcagggccaagcggcggtagtggcggcgggcaggacagcgcccacgcaggagaggcatatcgcgtcaggggtatcttgttaaggaaaacttttcagtgtcttaaagattattttttaacctactacacaagtagcaaggtggtgcctgtaaaagtaccatgcagacaagtgcttacgatagacaagtgctcactgccaagaagcagccaccggaatgccaggactgtcagcaatgactttccgcggaagagttgttctcgagaaagatgcactcattgcatgcgaccacccgagggacgccggccgccgaacggaaacatgaattcgtggaaatggccatctggtgacgagtcaaaatggcggcgaggggaacctggagcagtcccggagcctgagccactgacaggagaggagagggcggcggcggcggcggtgggaggaggatggccgggggtgctggcgccggtgcggacggcggtgctggtggcggcggcggcggaggcgacggcagcggtcccagcggcagcagcagcggcgggaggagcctccgggcattgtaaccacccagttatgcaaggtagaaacctcagtcatcgtttccttcttcctctccaccattccccttaccagtttgggacctcatcctattctcagcaaggctatggttgcgaatcaaagttgtatagccttgaccatggccatgagaaaccacaagacaaaaaaaagagaacctctggtcttgccaccctcaaaaagaagtttattaagcgtcggaaatctaataggtctgccgatcatgccaagcagatgcgagaactcctctctgggtgggatgttagagatgtcaatgcattagtggaggaatatgagggaacatcagcattaaaggagctttctctacaagccagtttggctagaccagaagcccggacattgcagaaagatatggctgatctttatgagtacaagtattgtactgatgtagacttaatatttcaagaaacttgttttcctgttcatcgtgccattttggcagcaaggtgtccattttttaaaacactgctttcttcctcaccagagtatggggcagagataataatggacatcaatacagctggtattgatatgcccatgttttctgctttgttacactacctttatacaggagagtttgggaatgggaggactcaaggtttcaaaatgtcgatatccttgttcagcttagtgaaggaatttgggaacaccaaattcccttgatgtaggatatgcgtgggactcttttgattacatgtgttattatgatgtcgtccttagtttttcttcagactctgaactggttgaagcttttggtggaaatcagaactgtttagatgaagagctcaaagcccacaaggctgttatttctgcacggtccccattttttcgaaatttattacaaaggaggatacgaactggtgaagaaatcacagaccgaactttgaggactcccacaagaattatattagatgagtccattataccaaaaaaatatgcaacagtgatattacactgtatgtataccgacgtggtggacctctctgttttgcactgtagcccctctgtggggagtctcagtgaagttcaggctctcgtcgcagggaagccaaacatgaccagggcagaagaagccatggaactttaccacatagcactgttcttggaatttaacatgcttgcacaaggcagctgctgggaatgtattccaccaaatgacgaagcaaaccaagaacaaagaagtgaaggatctagaaaatgggctccaacacgggaaggaagcaaagggagatcccacgcatcagccacacagtag

SEQ ID NO: 133747 - DNA, 4042 bp, Homo sapiens
atgatggctgggcctcaactcaccgcggcagacagggggcttggcgcgggggccccgagtgggcgaagcggggagcgggctgcaggccgagcagggccaagcggcggtagtggcggcgggcaggacagcgcccacgcaggagaggcatatcgcgtcaggggtatcttgttaaggaaaacttttcagtgtcttaaagattattttttaacctactacacaagtagcaaggtggtgcctgtaaaagtaccatgcagacaagtgcttacgatagacaagtgctcactgccaagaagcagccaccggaatgccaggactgtcagcaatgactttccgcggaagagttgttctcgagaaagatgcactcattgcatgcgaccacccgagggacgccggccgccgaacggaaacatgaattcgtggaaatggccatctggtgacgagtcaaaatggcggcgaggggaacctggagcagtcccggagcctgagccactgacaggagaggagagggcggcggcggcggcggtgggaggaggatggccgggggtgctggcgccggtgcggacggcggtgctggtggcggcggcggcggaggcgacggcagcggtcccagcggcagcagcagcggcgggaggagcctccgggcattgtaaccacccagttatgcaaggtagaaacctcagtcatcgtttccttcttcctctccaccattccccttaccagtttgggacctcatcctattctcagcaaggctatggttgcgaatcaaagttgtatagccttgaccatggccatgagaaaccacaagacaaaaaaaagagaacctctggtcttgccaccctcaaaaagaagtttattaagcgtcggaaatctaataggtctgccgatcatgccaagcagatgcgagaactcctctctgggtgggatgttagagatgtcaatgcattagtggaggaatatgagggaacatcagcattaaaggagctttctctacaagccagtttggctagaccagaagcccggacattgcagaaagatatggctgatctttatgagtacaagtattgtactgatgtagacttaatatttcaagaaacttgttttcctgttcatcgtgccattttggcagcaaggtgtccattttttaaaacactgctttcttcctcaccagagtatggggcagagataataatggacatcaatacagctggtattgatatgcccatgttttctgctttgttacactacctttatacaggagagtttggaatggaggactcaaggtttcaaaatgtcgatatccttgttcagcttagtgaagaatttggaacaccaaattcccttgatgtagatatgcgtggactctttgattacatgtgttattatgatgtcgtccttagtttttcttcagactctgaactggttgaagcttttggtggaaatcagaactgtttagatgaagagctcaaagcccacaaggctgttatttctgcacggtccccattttttcgaaatttattacaaaggaggatacgaactggtgaagaaatcacagaccgaactttgaggactcccacaagaattatattagatgagtccattataccaaaaaaatatgcaacagtgatattacactgtatgtataccgacgtggtggacctctctgttttgcactgtagcccctctgtggggagtctcagtgaagttcaggctctcgtcgcagggaagccaaacatgaccagggcagaagaagccatggaactttaccacatagcactgttcttggaatttaacatgcttgcacaaggctgtgaggatatcattgctgagagcatctcattagataccttaattgccatcctcaagtggagttctcatccatatggctctaaatgggtgcaccgacaagctttacatttcctctgtgaggaattttcccaggtcatgacttcggatgttttttatgaactcagcaaagaccatctgcttactgctatccagtctgactacctacaggcaagtgaacaagatatccttaaatatctgattaaatggggagagcatcagttgatgaaaagaatagcagatagagagccaaacttactgagtggcactgcccatagtgtgaacaaaagaggtgtaaaaagacgggacctggacatggaagagctcagagagatcctttcttctctcttaccttttgtgcgaattgaacacatcttacctataaacagtgaagtcttaagtgatgcaatgaaaagaggcttgattagtactcctccatcagatatgcttcctacaacagaaggtgggaagtcaaatgcctggttacggcaaaaaaaatgctggcatctatgttcgtcctcgactcttctctccctatgtggaagaagcaaagtcagtgctagatgagatgatggtggaacaaacggttcttgtgcgcttgcgaatggttagaatgtccaatgtgccagacacgctctacatggtcaataatgccgtgccacagtgttgtcacatgatcagccaccagcagatcagcagcaaccagtcaagccctccttcagttgtagccaacgaaattccagttcctcgtctcctcattatgaaagacatggtcagacgactgcaggaactgcggcacacggagcaggtgcagagggcctatgccctgaactgcggggaaggcgccactgtcagctatgaaattcagattcgagtgctaagagagtttggtcttgcagatgctgctgcagagctgttgcagaatcctcacaaattctttcctgatgaacgttttggggatgaaagtccactcttgacaatgagacagcctgggagatgtcgcgtaaacagtacacctcctgcagaaaccatgtttacagatctggactcttttgtggccttccatccacccttgccccctccaccacctccctaccaccccccagctaccccaatccataaccaactcaaagcaggctggaagcaaagacctcccagtcagcacccttcacgttcattttcttatccctgtaatcattcgctgttccactccagaacagctcctaaagctggccctcccccagtctacttgccgagtgtgaaagctgcaccgcctgattgtaccagcactgcaggactgggcagacagacggtggctgctgctgccgccaccaccacctcaacagcaacagcagcagcagcagcagcatctgagaagcaagtgcgaacacaacctgtgctgaatgatctgatgccagacatcgcggtgggtgtgtccacactgtcactcaaggacaggaggcttccagagcttgctgtagacacagaattaagccagtcagtttctgaagcaggaccagggcctccccagcatctgtcgtgtattccacagagacatacacacacttctcggaaaaaacacacactagagcaaaaaacagacaccagagaaaatccacaggaatatccggatttctatgacttctcaaatgctgcttgcagaccttctactcctgctctcagcagacgcaccccttccccttcgcaaggtggatattttggtcccgatctgtacagccacaataaggcatcaccaagtggcttaaagtcagcctacctacctggtcagacgtctcctaaaaaacaggaagaagctaggagagaatatccactttcccctgacgggcatctacacagacaaaagaatgagccgatacacctggatgtcgttgagcaacctccccagcggtcagactttcctttggcagccccagaaaatgctagtaccggtccagcccatgtcaggggacgaactgcagtagaaactgacttgacttttgggctgactcctaacagaccttcactttctgcatgtagctctgaagctcccgaagagagatccggtagaagactggcagacagtgagtccctgggccatggagctcagagaaatacagatttggaaagggaagattcaataagcagaggaaggaggtcaccaagcaagccggacttcctctacaaaaagtctgccctctga

SEQ ID NO: 133748 - DNA, 2157 bp, Homo sapiens
atggaatactatgcagccatgaaaacaaaggagatcatgtcctttgcactaacatggatagagctggaggccatcgtcctatgtgaattaacacacgtcctaagtgaattaatgcagaagcagaaaaccaaataccacatgctctctcttgggtctccggttccaaccttcgcactctggaacttcgatgtggcccaggatttccaccattttatcgaaaacgctagatcttcgcagtgccgaggacgtccgaggatgacaggggctggcgcgggggccccgagtgggcgaagcggggagcgggctgcaggccgagcagggccaagcggcggtagtggcggcgggcaggacagcgcccacgcaggagaggcatatcgcgtcaggggtatcttgttaaggaaaacttttcagtgtcttaaagattattttttaacctactacacaagtagcaaggtggtgcctgtaaaagtaccatgcagacaagtgcttacgatagacaagtgctcactgccaagaagcagccaccggaatgccaggactgtcagcaatgactttccgcggaagagttgttctcgagaaagatgcactcattgcatgcgaccacccgagggacgccggccgccgaacggaaacatgaattcgtggaaatggccatctggtgacgagtcaaaatggcggcgaggggaacctggagcagtcccggagcctgagccactgacaggagaggagagggcggcggcggcggcggtgggaggaggatggccgggggtgctggcgccggtgcggacggcggtgctggtggcggcggcggcggaggcgacggcagcggtcccagcggcagcagcagcggcgggaggagcctccgggcattgtaaccacccagttatgcaaggtagaaacctcagtcatcgtttccttcttcctctccaccattccccttaccagtttgggacctcatcctattctcagcaaggctatggttgcgaatcaaagttgtatagccttgaccatggccatgagaaaccacaagacaaaaaaaagagaacctctggtcttgccaccctcaaaaagaagtttattaagcgtcggaaatctaataggtctgccgatcatgccaagcagatgcgagaactcctctctgggtgggatgttagagatgtcaatgcattagtggaggaatatgagggaacatcagcattaaaggagctttctctacaagccagtttggctagaccagaagcccggacattgcagaaagatatggctgatctttatgagtacaagtattgtactgatgtagacttaatatttcaagaaacttgttttcctgttcatcgtgccattttggcagcaaggtgtccattttttaaaacactgctttcttcctcaccagagtatggggcagagataataatggacatcaatacagctggtattgatatgcccatgttttctgctttgttacactacctttatacaggagagtttggaatggaggactcaaggtttcaaaatgtcgatatccttgttcagcttagtgaagaatttggaacaccaaattcccttgatgtagatatgcgtggactctttgattacatgtgttattatgatgtcgtccttagtttttcttcagactctgaactggttgaagcttttggtggaaatcagaactgtttagatgaagagctcaaagcccacaaggctgttatttctgcacggtccccattttttcgaaatttattacaaaggaggatacgaactggtgaagaaatcacagaccgaactttgaggactcccacaagaattatattagatgagtccattataccaaaaaaatatgcaacagtgatattacactgtatgtataccgacgtggtggacctctctgttttgcactgtagcccctctgtggggagtctcagtgaagttcaggctctcgtcgcagggaagccaaacatgaccagggcagaagaagccatggaactttaccacatagcactgttcttggaatttaacatgcttgcacaaggcagctgctgggaatgtattccaccaaatgacgaagcaaaccaagaacaaagaagtgaaggatctagaaaatgggctccaacacgggaaggaagcaaagggagatcccacgcatcagccacacagtag

SEQ ID NO: 133749 - DNA, 238 bp, Homo sapiens
agccggaaaatccagggactcctgaagtcatgtgggaaacctgtcgaggagctgctggcaaagcttcaaggcctccacaggcagcccggcctccgccagccaagcccctcccacgacggcagcctcagccccctccaggaccgggcccggactgctcacccctgaccctcttgcactctccctgccccccggacgccgcccagcttgcttgtgtataagttgtatttaatggttctgt

SEQ ID NO: 133750 - DNA, 210 bp, Homo sapiens
gaggcagacatgcccgatgagatcaacattgatgaattgttggagttagagagtgaagaggagagaagccggaaaatccaggacttcatccaggagctgctggcaaagcttcaaggcctccacaggcagcccggcctccgccagccaagcccctcccacgacggcagcctcagccccctccaggaccgggcccggactgctcacccctga

SEQ ID NO: 133751 - DNA, 601 bp, Homo sapiens
cccacgcgtccgggccaggctgggtccagcagcgcgatggcagctcagcggctggcaaagcgcgtgctggagcaagctgcagtctccatcgcgggcccgcgggcatgcgcgggcagtcccggggggctgcagaaagcggccacgcgcgcgtcaccgtcaagtatgaccggccggggagcttgcagcggcggctggacgtggagaagtggatcgacggaccactggagggactgtaccgcagacatggaggcagacaatgcccatgagatcaaacattgatgaattgttggagtttagagagtgaagaaggagagaagccggaaaatccagggggttttagggactcctgaaagtcatgtgggaaacctgtcgaggacttcatcccaggagctgctggcaaagcttcaaggcctccacaggcagctccggcctccgccagccaagcccctcccacgacggcagcctcagccccctccagggaccgggcccggactgcttcacccctgaccctcttggcacttttccctggccccccggaacgccgcccagctttgctttgtgtattaagttgtatttaaattggttctgttaacaattaaaa

SEQ ID NO: 133752 - DNA, 256 bp, Homo sapiens
accaccctccccgccgccactaccaccaccaccactaccaccagccccctccctccccctgtccctcccctcctttgacctcccccagccccctgtcttggatactctgggtgttcattttagctctgcagaaaaaaaatcagtgtttcgtgaaggtgttggagaggggctgtgtctgggtgagggatggcggggtactgatttttttgggaggttatgagcaaaaataaaacgaaacatttcctctgaaaaaaaa

SEQ ID NO: 133753 - DNA, 420 bp, Homo sapiens
  misc_feature (1)...(420): n = a,t,c or g
tttcgtgccacagcagccccctcctccttctccacctcaaccttctcgcctggccccctacccacatcctgccaccacccgaggggaccgcaagcaaaagaagagagaccagaacaagtcggcggctctgaggtaccgccagcggaagcgggcagagggtgaggccctggagggcgagtgccaggggctggaggcacggaatcgcgagctgaaggaacgggcagagtccgtggagcgcgagatccagtacgtcaaggacctgctcatcgaggtttacaaggcccggagccagaggacccgtagctgctagaagggcaggggtgtggcttctaggggctggtcttcagctctggcgccttcatccccctgcctctaccttcattccaaacccctctcnnnnnnnnnnnnnnnnnnnnnntt

SEQ ID NO: 133754 - DNA, 1609 bp, Homo sapiens
  misc_feature (1)...(1609): n = a,t,c or g
ctgacctggatgactgagcgagttgatttcacagctctcctccctctggagcctcccctaccccccggcaccctcccccaaccttccccaaccccacctgacctggaagctatggcctccctcctcaagaaggagctggaacagatggaagacttcttcctagatgccccgctcctcccaccaccctccccgccgccactaccaccaccaccactaccaccagccccctccctccccctgtccctcccctcctttgacctcccccagccccctgtcttggatactctggacttgctggccatctactgccgcaacgaggccgggcaggagggaagtgggggatgccgcctctgcccccgccacagcaggccccctccttccttcttccaccttcaaccttctcgctggggccccctaacccacattcctggccaacccacccgagggggacccgcaaagcaaaaagaagagagacccagaaacaagtcggcggctctgaaggtaacccccagcggaaagcgggcaagagggtgaagcccctggagggcgaagtcccaggggctggaaggcacggaattcgcgagcttgaaggaacgggcaagagtccgtggagcgcgagatccaagtacgtcaaggaccatgctcatcgaggtttacaaggcccggagccagaggacccgtagctgctagaagggcaggggtgtggcttctaggggctggtcttcagctctggcgccttcatccccctgcctctaccttcattccaaacccctctcggccgggtgcagtggcttatgcttgtaatcccagcactttgggaggccaagggcaggaggatcgtttgaggcccaggaggtcaactaccagcccgggcaaccatagtaagaccctggctctattaaaaaaaaaaaatcaacccttcttccccaccaaaccacccaactcctctctactcttatccgttttatcctctgtctctccttatcacctctcttccgttatttctggatctccttccctcctttctcgtccaaatcatgaaaatgtttgggccttaggtcaatgtcttatgccccgtcacataaccacccgaggcacccgaggccccaccagagaagccagctggggagcttgggaaacctgggtctcttgaattttcaaacctgggtttctttacaggtggtttgtcctggggtggggtgggagtggcccgaacagggataagaancctgaaagggacctatgccaaatgaggaaagtaaagtccagggcggggcttttgagaagggggacccccatatcccctacaggcaaaaaagcaggcctagggtgacccttgggaacacctacgcctaagggagggaggcctaaaggcggccccaggtttgcagtgcgggaagatgagcaggccagtgggaggaggggcagggcagggctgtagttggtgactgggtgttcattttagctctaagaaaaaaaaatcagtgtttcgtgaaggtgttggagaggggctgtgtctgggtgagggatggcggggtactgatttttttgggaggttatgagcaaaaataaaacgaaacatattcctctggaaaaaaaaaaaaaaaaa

SEQ ID NO: 133755 - DNA, 2446 bp, Homo sapiens
cggccgccatggcgaccccggccaggcccggcgaggccgaggacgcggccgagcggcccctccaggatgagccggcggcggcggcggcaggcccgggcaagggtcgcttcctcgtccgcatctgtttccagggagacgagggcgcctgcccgacccgggacttcgtggtaggagcgcttatcctgcgctccatcggcatggacccgagcgacatctacgcggtcatccagatcccgggcagccgcgaattcgacgtgagcttccgctcagcggagaagctggccctgttcctacgcgtctacgaggagaagcgggagcaggaggactgctgggagacttttggtggtgctgggggcgaggcaagtccagcttgaagacgctcttcatcctcttccggaacgagacggtggacgtggaggacattgtgacttggctcaagcgccactgcgacgtgctggccgtgccggtgaaagtgaccgacaggttttggatctggaccggggagtacaaatgcgagatcgagctgcgccagggggagggcggggtcaggcacttgccaggggccttcttcctgggggccgagaggggctacagctggtacaaggggcagcccaagacatgctttaaatgtggttcccggacccacatgagcggcagctgcacgcaggacaggtgcttcaggtgcggggaggaggggcacctgagcccttactgccggaagggcatcgtgtgcaacctctgtggcaagcgaggacacgcctttgcccagtgtcccaaagcagtgcacaattccgtggcagctcagctaaccggcgtggccgggcacctaaacacccggctgcctgccagggtgaacacacaagccagcttatccctcttaaagtgcccaaaactttttttttaaaaccattttttatcgtttttgaaggagatctttttaaaacctacaagagacatctctctatgccttcttaaaccgagtttactccatttcagcctgttctgaattgggtgactctgtcacaattaacggactgcgggagaactgtagcgtgcagatgtgttgcccctcccttttaaaattttattttcgcttttctattgggtattcgttttgattcttgtactttttctctctctccttgcccccctcccgccctccccgccccataccttttcttcccctggaattttcaccctttgggcctgccttgctcatctttatgccccagcactaggtacggggcccaacacgtggtaggcactccatacagtgtttgactgaattgaaaacattgttgactgtggcttctatcagagtgtctaccttttgcagctctttcccctccctcatttaatttggctgcttttaatctacgtgggtctgaggaatttgtgaaaccagtgttgttaggaagtgtatataatctggaatcaatgaagctctggaatgggtgggccaagggcttcttcttatgggcacaaaggatggcatgggactttcatggacagctcttttgggtgggctcagaaggccatttttttatagaatcatcggaatctagaatattcctgctggaaagaacctgagagttggtttggaccaattccctggttttccaggcagatgaaacagggcccaaagaggttaaattgacttgggtgaaaatcacatatgcttgtctggtgcccagagccaagcctatagtagacgtcccctgaccccaaagccctggtgctcattccactacctcgtcacacgttcacaacaatttcctcaaccacttgagggcccagaaagtcttgatctctccagaatgatcagcccagaggaatgctgagaaatcacctggaggagggagcagaaagagaaggtttttaaggaggggcttctgaatacttggggagatacggaacggaccagggacccacactccaggggtgcattcgttgctccctggggggcaccactttctgggattaccagtgtgcccaggtccctttgggaggcccttaccccttcccccattccattgcccacccagtgagaaaatggggggtggcccctgtgttaaaggaaacctaccgaaaggttttacatttgtcacctttaggcctcaattagctacgaaccttaggagaaggcagcctagcttggagctcattgtgcaacttcctgatttttcaggagaaagatgggattttaaacccaaaatttatggagtgagttgtttaactcttaaaatgtacttggggagatagggccaagcggagaggtcatgggccaacttaagtgttatccgagtagaaaagacagtacactgcttttcttttaagtgtttgccttttcctttgctatatgttttgctatttccttgtggcttagaatgtacccattgattgttaaaagttttgttctgaataaatatttatcttttgtattgct

SEQ ID NO: 133756 - DNA, 2331 bp, Homo sapiens
atggcggcggccgcggttgcggcggctccgggacgagctcccgagccagccgggaggacacttactacagctgctcagaagcaccactggaaactcagacatctgttttcctccatgattgtggaaaagttcacccaggattatctgtggctttcaattgcaactcggcatccctggaaccagtttacaagggtccaacggctgtcttgctgcatgacactgctactctgcaacatggtcatcaatgttatgttctggaagataaacagcaccactgccaagagagatgagcaaatgcgtccatttgctgtggcctggtctgaactgctggtcagcatccatactgctgtcatcctcttcccaatcaatcttgtcatagggcggctcttcccgttgattgagccacaggagactctgcccctctttcctcccatccaggcctcctgcctctcagatgcttctgttgagcctctctctgccacaatggtagttgagggttgtcagctgaaacagcagaagtggaggttcttcactgggaaaagaaacattctggacacaagtataatcctcattagcttcatcctcctggggcttgacatgaagagtatttctctacataagaaaaacatggcacgataccgcgatgaccaggacagattcatcagcttctatgaggcagtaaaagtgaactctgctgcgactcaccttgtgggcttcccggttctcctggcaactgttcagttatggaacctgctgcgtcatagccccaggctgcgggtcatcagcaggacactgagccgagcctgggacgaggtggtgggctttctgctgatcatcctaatcctgctgacaggctatgccattgcctttaacctgctgtttggatgcagcatctctgactaccggacatttttcagctcagcagtgactgttgttggtctcctgatgggaatttctcaccaagaggaggtcatagatgagatagcagggaacttcagcagagcagttcatggtttgcaagctcttaacaaactacaggaagcttgtgagttcctccagaaactaacagccttaaccccaagattttctaagccagctcagataacaggactagctttcaatcccttcaaggatttggacaacagaaacattgttggaagcattggaagtgtgttactaagcgctaatcgtaaattgctccaagtccatgatttaatggaggacattgagatcatgctctggagaaatgttagcttggaaacccatcccaccagcctcaacatgagcacacatcagcttacaatcacagtgaacgtcacttccttggagaaatccttgatagtgagcatagatcctgacagtccccttttaatgacactctacctggggttccagtatcagcctaactgcactcacttccacctgaacatcacccttccaaaggataaggtgtggcaaaaagtcctccagtgtaccctgctggaattctgcttgtgtgcaacaactgtgctgcctaccgtaaactgctggaagcccagactcccagtgtacgcaagtgggctctacgtcgacagaatgagcctttggaagtacggctgcagcggctggaacgagagcgcacggcccaagaagagccggcgggacaatgagacccccgaggagcgggaggagacagacgagcagcgggcacgccggctgcagcgggatcgggaggccatgaggctgaagcgggccaatgaaaccccggaaaagcggcaggcccggctcatccgagagcgagaggccaagcggctcaagaggaggctggagaaaatggacatcgatgttgcgagctcagtttggccaggacccttctgccatggcagccttagcagctgaaatgaacttcttccaactgcctgtaaaatggggtggagttggaacagccagcttctgggcaagatggcctttgaaagagcagaacagcagctctctgcactgaaccacaccctcctgcctgcccctctttccccacctacctaccccacccacccacaccccacagccacgaggaccagtgctgctgccacccacgaggccctgtcctctgctgccagaggcaggcctgggtttattgcaggtggacctgagcagcccttgcatatgggaacaggatgatggggtcaggagggacctggctcaaggcagctctggacaagggagcaggcagtccagagaactggcctccccagcccacttccacaaggttgtgcttctaggactgtggggcccctgtgtggcccaatgaagttgtgaagtcaaataaattaattttatctttaaaaaaaaaaa

SEQ ID NO: 133757 - DNA, 2805 bp, Homo sapiens
gatggtcgcaagatggcggcgctgaaggaggataggagctacgggctgtcgtgcgggcgggttagcgacggcagcaaggtgtcggtgttccacgtgaagctcaccgacagtgccctgagggccttcgagagctaccgcgccagacaggattctgtttcactgaggccatctatccgatttcaaggaagccaagggcacatctccatcccccagcctgactgccccgcagaggcgcggacgttctccttctacctctccaacatcggccgcgacaacccccagggcagcttcgactgcatccagcagtatgtctccagtcatggggaagttcacctggactgcctgggcagcatacaggacaagatcacggtgtgtgccaccgacgactcctaccagaaggcgcggcagagcatggcccaggcggaggaggagacgcggagccgaagtgccattgtcatcaaggctggaggccgctacctgggcaagaaggttcagtttcggaaaccagccccaggtgcaacagacgcggtgccctcccggaagcgggcaacccccatcaacttggcgagtgccatcaggaagagtggtgccagtgccgtgagtgggggcagcggggtgtcccagaggcccttccgtgaccgagtgctgcacctcctggcactacggccctaccgcaaggctgagctgctgctgcgactgcagaaggacggcctgacgcaggcggacaaggacgcgctggatggcctcctccagcaggtggccaacatgagtgctaaggacggcacgtgtacactgcaggactgcatgtacaaggatgtgcagaaggactggcctggctactcggagggggaccagcagctgctgaagcgggtgctcgtccggaagctgtgccagccacagagcactggcagcctccttggagaccctgctgcctccagccccccaggcgagcgtgggcgctcggcctcgcccccacagaagcggctgcagcctcctgatttcatcgaccccctagccaacaagaaaccccggatatcgcacttcactcagagagctcagcctgccgtcaacgggaagctgggcgtgcccaatggccgtgaggccttgctgcccaccccgggcccaccagccagcacggacaccctcagctccagcactcacctgcccccgcggctggagcccccgagggcccacgaccccctggccgatgtcagcaatgacctgggccacagcggccgagactgtgagcacggagaggcggctgccccagcccccactgtgcgcctcggcctgcccctgctgacggactgtgcccagcccagcaggccacacggcagcccctcgcgcagcaagcccaagaagaagtccaagaagcacaaagacaaggagagggcggctgaggacaagccccgggcccagcttccagactgtgcacctgccacccatgccacccccggagccccagcagacaccccaggtttaaacggaacctgcagcgtttccagtgttcccacgtccacgtcggagacgcctgactacttgctgaagtacgcagccatctcctcttcggagcagcgccagagctacaagaacgacttcaatgccgagtacagcgagtaccgcgacctgcacgcccgcattgagcgcatcacgcggcggttcacccagctcgacgcccagctccggcagctctcccagggctccgaggagtatgagactactcgagggcagattttgcaggaatatcgaaaaatcaaaaagaccaacaccaactacagccaggagaagcaccgctgcgagtacctgcacagcaagctggcccacatcaagaggctcatcgccgagtacgaccagcggcagctgcaggcttggccctagccgccctccccgatggcggggatctgggagggtcgggggagcaaaaggcggtgagagaggatttatttaaaaaaataaacccgaggaagatgctcatctgagccagcaccgccggctttcagggcagcccctgcagacgtctggccctggcgggtggctgcaagcccacctcggccctccctgcgcttcctgagcagtccctgcttatgatgggctccccaggaagcccactgcctcctccctggctgcagcctccggggttcagcctcctgtctcgccagaagactcctaggcccttggggtggcgcgcctgccttttctagttttatacaaagacagccacttttagctactgctaatgagacttgagtctatttttgtacaaaagagaagcaaaatcttttttctaaacctgtgcctccctctcctcggacacccagggtctagccgctgccctgggtcctgcctgcagtattacagaggtcgtcgaaaggtgcagctgcgttctgagggcgtggggaatgggcaggtggcctctgctggtctctggctctacgtttaggcacccctttccccagcctctcctccttgggcagggtctctgctccagcaagcaaacagggtggcccaggtggctattttgagaactccagctggtgcccccagacagctgctcagagccaagggggcagagggctttcagcgcccccaggcctgccctgctatttcaggccctcagctgtcgggggccactgtgtttctgtgctccaagttgagactcggccgcagcggcgtcagacttttctttgcgatgtcctcggtttcccatttgttgctgctgctgctcattccacactgttgagaccttgtggtctcgatgctgctggcctccctccgtccctctgtccacttgtgggtcctggggtc

SEQ ID NO: 133758 - DNA, 1209 bp, Homo sapiens
atgagtgctaaggacggcacgtgtacactgcaggactgcatgtacaaggatgtgcagaaggactggcctggctactcggagggggaccagcagctgctgaagcgggtgctcgtccgcgcacacaacacccagcgccagagacaaaacgaacgaagcgacactcgtccttgccaacgcgccgccccccgacgtttctcacacggcacccggaggggcacgttacctctggccagtcccgaccgggcccgggccccacggacgggacactgtcggacccaaaggcgcctggaccgaactggcgggggcttcccccctctgacaggagcttgggcgatgctggctgactggatccatgaaggaacaccatccagggggcgttccgacaacgatgagcccagtgcaggctctgtgggaggcttgcggcagcatggcccaggaccaagagccccaaagctaacaaccactaaagtgaaagcactggccagcccggtgctgggccaaaaaattgcagccctgtgcttggggcttacagcccagggcctcaacatcatggacaacccgggctccctggccatacatgtccacccggactcagtgttgaccaggaagaccaacccctgcacccacatctggggtttcactcagagggaaccccctctggtggccaacatgagtgctaaggacggcacgtgtacactgcaggactgcatgtacaaggatgtgcagaaggactggcctggctactcggagggggaccagcagctgctgaagcgggtgctcgtccgtcctgccaggaagtctcaaggaggattcctgaatagcgtttcccaatcatttgtgctttactggaaagggggggcctgttgtggggaggccaccgtccagggctcttcccgggacttcaccttccctctgctggaccacacgccgtggcttggcaggctctccccagagggcaaagcactacttgagtctggagaggcctgtcggaagacccggggaaaggcaaaaccaaagagacagaaagccgaccagcaggtgtccagggctggaggtgggagtggggagtggctgcagccgggcgagggtagagggtcaaaactcacaagatgggacgttttacaggatgttcgctacaccttcccaactgcccttgagctcacaggggccgtctttgttgactcagggcacaggagcaacattctctga

SEQ ID NO: 133759 - DNA, 2275 bp, Homo sapiens
atgaggggcagtgttcaaatgttcacaaatgggaagggagctgagcaccatccttcattcctgcaagcgtggccatcattggccttgcaagccctgacctggctgtctacagccttgccagcatgggtcatgcttcttacatgcatgggcaatctacacccagggatcttgtttgttgctcctttcattgatatgtcatcagcaagcacctctgcagaggccaggacacagggagaagacgccatctatgaaccaggaaacgggtcctcaccagacactgaatctgctggttctctgctcttggactctctggcctccagaactttttcgggcaaacccctacctctgccttctctggtgtctgcgacccaggatctgaccactgacgttacccctgcagcctggctgcagagactcaaagtggaccaacgatcaacgtcaccagaaattttactctacctgttgggaaagggggatctttttctgctagagtttctaagttgctatagtggatgcctccagtgtatgtcaatttgtagcaggatgagccgcagacaaaactcctcagacaccgagttaaagaaggaaggggtttattcagctgggggcattggcaagactcctgtctccaagagccaagctccccgagctgtgataaatgagagcccaattccagcatctattgctgagatgttctccagcagtctgggaaaatgtctgcagcatttcctggtgtctttccctcacaacgtctccaagccttcccctaagttagctttaggggttgggaaaaacaaagtactgtcccttggtctgggttgcttggatccccagtggaaaatactcattgtcatagtgaatggctttctgtgtggcaagcaacaggtcctagaccaaactcctggtgtttcattagcatttccaaagatagctgaaagagatagcacctgggggaaaggccagctgtggggcagcttcagcagacttaaacgttcctgcctgtcggttctgaagatagcagtggatcccccagcacagtgctcaagctctgctaagggacagactgccttctcaagtgggtccctgatccccatgcctcctgactgggggacacctcccagcagacacctcatacagaagagctcccgctggcatctggcaagtgcccctctgggacgaagcttcccagaggaaggaaaaggcagcaatctttgctgttctgcagcctccactggtgaggcaaacagccaggcaaacagggtctggagtggaccttcagcaaactccagcagacctgcagtcgaggggcctgactgttagaaggaaaattaacaaacagaaaggaatagtatcaacatcaacaaaaaaaaatgtccacacaaaaaccccatccgaaggatcacaactcctcaccagcaagggaacaaacagtatggagaataagtttcacgaattgacagaagtaggcttcagaaaaataaccagtttagagaagaacataaatgacctgatggagctgaaaaacacagcacgagaacttcgtgaagcatacacaagtatcaagagcagaattgatcaggcgaaagaaagcatatcagagattgaagatcagcttaatgaaataaaatgtgaagacaaggttagagaaaaaagaatgaaaagcaacaaacaaaacttccaagaaatatgggactatgtgaaaagaccaaacctacgtttgactggtgtacctgaaagtgacagggagaatggaaccaagttggaaaacactcttcaggagattatccaggagaacttccccaacctagcaagacaggccaacattcaaattcaggaaatacagagaacagcacaaagacaatcctcgagtagagcaaccccaatacacataatcgtcagattcgccaagtttgaaataaaggaaaaaatgttaagggcagccagagagaaagacatatcaatgagacagaaaattaacaaggatattcaggactttaacacagttctggaccaagtggacctaatacacgtctatagaactgtccaccccaaatcatcagaatatacattcttctcagcaccacatcatacttattgtaaaactggccacataattggaagtaaaacactcctcagcaaatgcaaaagaatggaaatcataacaaacactctctcagattacagtgcaatcaaattagaactcaggattaagaaactcactcaaaaccacacgactacatggaaagtgaacaccctgctcgtgaatgagtactga

SEQ ID NO: 133760 - DNA, 876 bp, Homo sapiens
atggcagaaatccataggctgccaaggccagatgtcaccgaggatacacagcagcagcagtggtcagccatggccgtcggagggacagcaaagtggatggctgccttgggaaggtttctggtcacatatgttgaagtcgaaggagtgaagctgcagaccttcacggtgaccacgctcactcaaagcttcaagtattctctatccaagtatctccagcagcagcctctcctgagctctagaaccatatacccaactttctattatttatctcttcttcgaaatctcagagcctttaaactcaacgcagccgaagctaagcctatgagctcaccccagaacctagtcctcttcctgtgtttcctgtctctgcagatggcagcaccacccatccgcttgcagacaaaaggaaagcaagcccagtgccagagcagcacgaagagcaccttccagcgaggccggtcactcagaggtgtctcacctaccctttccccaacatcacaacagcctcggaatttggaccagcaactggcttcagagcaaggagaagtgggagaggctccactgtgtgctgtaatccagggtgttatccccgtgctaggccggagccggagccgcgaggaacaccccccagtgtcagcgctccccgggctgcacaggaagcgccagcgagacaaagaggccgggcctgtgctcgctgacacggtgcccttccggccccacgcgggaaaagggacatttctccgctgtttggaaacgctcactcggcgagccccaaaccctcgctggacctttgggctccccctccgtaagctgcagggcgccgtggcccacagcaggcctgagatccgaacacactcggtgccgaaccgaacctaa

SEQ ID NO: 133761 - DNA, 813 bp, Homo sapiens
gaccaggacatgacatcatctgatatcccagtacgtttagaaggatccctctggctgccgtgaatcttcattggcaccttcaaggcttttgacaagcacatgaatttgatcctctgtgactgtgatgagttcagaaagatcaagtgaggagtggactgtggggggcggagactggaggatgggaatggattgagtgggtgggccaagcaatagagtctggtctcaatgacagtagagggacctcctcccaaagatgtaagtcagagcaggaagccttgtggaggaggggaggccctactgtgagccaggctctgtgttagattctgtatcccagctggggttcccatgccccaggctcctgcaggacttgctgggccagtccgtggggttggcgggccatcccaacaggtgaggagttggggaaagggtaccacctcctggtggctaaaataaaggataaaggggagggtccatagttttccaacccagtacccacctggccgtgggggtcctcccccacctatgggccgaggagcaccccctccaggtgaggagcccataaggagaccagtgctaattgatagaagatgccttagctggattaatgatgagatataacctccaatgggcatgccccctccgggaatgcggcctcctccccctgggatgcgaggtaagtgcctgcagtggtgactttggcttctttccctagagcctagtgggataggaaatggagggaagattggggcaaatttctaggctgggctgtgtcacttgacctggtctagtgagacaggattctggaacctcatc

SEQ ID NO: 133762 - DNA, 2061 bp, Homo sapiens
atggttttttgggctaggcccaggaccctgctgctttgtgcagccttaggacttggtgccctgtatacagccactccagctccaactgtggctaaaaggggccaaggtacagcccaggcactttcttcagagggtgcaagccccaagccttggtggcttcgacatggtattgagccttgtaagcaaagctactgggaagttcggactgagcagagcccaggtgtctctgaaagaaaggcagcagccccagtcaggggcttagagataaaactcccatctccctgggacaaagcacctgagggaggaggcggctgtgggcacagcttcagcaggcttaaatgttccttcatgccagttctgaagagagcagtggatctcccagcacagcgctcaagccctgctaacggacagactgcctgctcaagtgggtccctggcccctgtgcttcctgactgggagatacctcccagcaaggggcgacagacaccttatgcaacaggagagctccggctggcatctgatgggtgcccgtctgggacgaagcttccagaggaaggtacagacagcaatctttgctgttctgcatcctccgctgaaagtaataacatcaacatcaacatcaacatcaacaaaaaagacgcccatggaaaaaccccatccaaagggcctcagcatcaaagatcaaagttagataaatccatgaagacgaggaaaaaccatcacaaaaatgctgaaaattccaaaaacctgaatgcctcttctcctccaaaggatcacaactcctcaacagcaaaggaacaaaactggacggagaatgagtttgatgaactgacagaagtaggcttcagaaggcgggtaatagcaaactcctccaagctaaaggagcatgttctaacccaatgcaaggaagctgagaactttgaaaaaatcttggaggaattgctaactagaataactagtttagagaagaacataaacgacctgatggagctgaaaaacacagcacaagaacatcgtgaagcatacacaagtatcaatagccaaattgatcaagcagaagaaaggatatcagagattgaagataaacttaatgaaataaaacgtgaagacaagattagaggaaaaagaataaaaaggaacaaaaaaaagccttcaagaaatatgggactatgtgaaaagagcaaatctatgattgattgctgtagtgcccttgaacaagataacatccccaaggacctcagagaccctttctacgtcaaccaatatgagcaggagcacattaagctgcctgttatcaagcttctcctgtccagcgagctgtactgccacatctgcagccttattctgaaaggggaccaggtggccaccttactgggacaccagtctgtcttccaggccctggcctggaaagagatctatgtgatggagggtaacgaaacccccatgacagagtctgacctcagtcgtgcacccataatgatgagtgcccacatggtgatggtggatgccctgatgatggcctataccatggatatgatcagcattgagaaggtggtggccagtgtcaagcacttctcaacattcagtgcctcgaaggaacttccgtatgaccttgaggatgccatgggtgtttcccgtaacacaattaagaacactgattaccaaccacgagaagacatgcttgcttccgttttgtcttctgccatgatcgtctccccttcccctgaaactcctattcaggctgcagataaactctctctgtattcttatcccccagcacccattcctcgcctgtccaaactctccgccctagtggcctctccttcctccaatccttcagccccacctcttacccattcagaagcctcttctgccattctccctctccgggaagtggctggcgttaaaagcattgctcgcattcatgtccctttctccacgtctgataagtcgcagatcaaagctatgagtatattcaaaaggactttatgttcttctctttatatttttctcttcatcaatcttgttttcctggaaaaggtttttttcccgattaactga

SEQ ID NO: 133763 - DNA, 1312 bp, Homo sapiens
atgcgccgagcaggctcctgcgcagcagagcggtctgcagagctcagccctctgtacccgtctactaaggctgcccggctgcaaggcctggccgaaggtggcaagctgcatgggctcctgccctgtttcacctgcgggcaggaggcagcgggcgcgacggctcttttcacggcgttcccctacggcgtggtcgacccgagggaaaggcccgctcccgctccagagtccgaggaaaggagagagagctgaaagctggtcttgcgcagagaccccagaatgcgcccctgaaaaacagaatcaaagcgcagtgttagggaggcgggagagaggagggggagggtggggagagggacacgaggcgggagggagcatgcgagggatacaaggtgacaagaggacaggaccccagtcggccggtcgcgacctccgtccccaggcttcagggggacgcggaggggacgctgagcccacggagcgcggggcccgcagcccggggggagggggtggcgcgatgactgtaagcgcaggtccgggctgcggaagtccagaggagggtgcatgcgctgcggatactgccgcgtccagagaaacgatttcgggagctggagcagtgaaaacgagtccgcagatgaggaccaaaacgttttcaatcgctgctcagcgcgttcgcagaggaaagaagaggctgagagccttccgtggtataaggtgctttaaggtgggagagccgcagaaggctcgcagcccccagttgcagaacctaggtgcagcagaggggcaagagcgctgcccttgcccgacacctcttggcgtcaacccagtgcccgcaggcagctccctaagacgtcgagcttccagcctctccaagcgctcctttcgccgtcctgctgtcaaaacccaggctctctcaaaacaagccaaagtcaccgttctcagttgcctctccctaacatggagacaaacgcccacaacccagtcgacaccttatctagatcccacatttaagctctcgggctcctgttcactcacactcggttggccaagtaacaggaaaataagcaccttaggccggacacagcccacgctccagctgagggaccgcctcttaattatgtgcgcaagcagcaaaagcagagctaatctgcatctcctcttctcaaccccgcagcctgccttcccccgaggccaaggtttaggtttatgtttaatcttatcacgaatgccattccggacgaatgtgcctttcaaaacaatgacgctttgccaacctaactcagcgtcccaaccagagccctggaccaccactcggtga

SEQ ID NO: 133764 - DNA, 1956 bp, Homo sapiens
atgaagggctgcggcgtgtggaggggctgcgcccggaaggaagcggtgtgcgcccggaaggaagcggtgtggacccagaaggaagcggagccttggacctcccactctcgggcaaaggccgaggcagccctcacagcagctcagaaagcccaggaggaggcgcggatcgccaggatcactgccaaagagttctccccttccttccagcaccgggaaaacgggctggagtaccagaggccgaagcgtcagacctcctgtgacgacatcgaggtgctgtccaccgggacacccctgcagcaggagagccccgagctgtaccgcaagggcaccactccctccgacctgacccccgacgacagccccctgcagagcttccccaccagccccgcggccaccccgccgcccgcgcccgccgccaggaacaaggtcgcccacttctcgaggcaggtgtcggtggacgaggagcggggcggggacatccagatgctcctggagggccgggccggggactgcgcccgcagcagctggggcgaggagcaggccgggggctccaggggtgtccgcagcggtgccctgcgcggcggcctgctcgtggatgacttccgcacccgaggttcgggccgcaagcagcccgggaaccccaagccgcgggagcggcggacggagtcaccccccgtgttcacgtggacttcccaccaccgggccagcaaccacagccccggaggctccaggctgctggagctgcaggaggagaagctgagcaactaccggatggagatgaaacccttgctgaggatggagacgcacccccagaaaagacgctacagcaagggcggcgcctgccggggcttgggggacgaccaccgccccgaggaccggggcttcggggtgcagagactgcggtccaaggcccagaacaaggagaacttcaggccggcctcctccgcggagcccgccgtgcagaaactggcgagcctgcggctgggcggggccgagccccggttgctgcgttgggacttgaccttctccccgccccagaaatccttgcctgtcgctctagagtccgacgaggagaatggggatgagctcaagtccagtacggcagcatgggatccttgcgctccccgcaacgtgctcaaccccagctgctccaagagtctgtgcccctgtgctgcaggaatgaagggctttgggaatgaagggctgtgggacggtggctacataggatctgcgcacggccaggccctcaccccagcagggctctgctcgctcgtggctgccaggcagtgcgtggtgctgaacagaagtgctgcaagccagtctgcccctcggctcccggactctgctttctgcctggtgcccagcttctcacgcagcatgcactgctcctgcgctttctctgtggcagccgcggttgcacggcccatgtcttccccgctgtgtgttcatcctccactggacagctggctctgcttccactccgtggctgttgtgaatcctgctgccgggaggctcagcgcctatcctggtggtcatggcccaggggacctgcttccctgcacacagtcgggcagggcaggacagcatgtgcccggctggctgctgctgcatggagaatttgacgagttttcattaacccgagagcagcctggttttatcgacagctggacccgtcggactgaagagaccctgaggcctgtggtggtccccaagctgctggcgctcctgggccgtgtgcgggtggcaactcccctcacagtcttcatgggacagtgcggatttcacctcatacagctgcgcaatggatgtgtggacagagctagtcgggacgtggaggctcttctggttttcgagcaggaaacgtgctgtgagcaggaatcgcgaggagtggttactcaatttcttcccagccagagctttgtaaacctgcgcttctcacccctcagtgaagcctga

SEQ ID NO: 133765 - DNA, 647 bp, Homo sapiens
aagctggaaagatagcttgattacttatgaaatgaaaaaaagttttcctaaatgaatgtaacagtttaaatcatactgttacgaaaacaacactgtcaagattaaaaagaaattctgctccttttagtaataaacaatgtcgtgtgacactttggaacgcttctctcgttacaaaccagcgtctttactgaaggtccttccgctgcagagctgcgcaatggatgtgtggacagagctagtcggcacgtggaggctctcctggttttcgagcaggaaacgtgctgtgagcaggaatcgcgagtgagttccatggcgtccccgggtcagcgcgcgtgcaggaatcgcgagtgagttccatggcgtccccgggtcagcgcgcgtggggtcctgtctcgctggctcaccactggtggccagggcatgtctcccccagccctgagtctccgcagtggtgaccagggcatgtctcccccagccctgagtctcccggcagtggaggcagcgtgggcacagggtttgtcacagcctgtaagtgaatggaggacacaaaaataaccagagaggcaggctctgccctccgggagtgcacaggcggtttttcccatgtgtgcgttcatgtaattaaacgtctccgtttgtttcaaaaa

SEQ ID NO: 133766 - DNA, 940 bp, Homo sapiens
gccattggccatcgtcctgctgtcctacagccccgagaggccaggggctttgagaacacagtcagggacccggatctcgcagcaaactcccgtggccgacagggccttgtggaggcctgaccccgtcatgctggagcctggccggcagtgctggggagcgtgtggacctgaaaccaggcagccgcgtccaggccccactgcgctgcgcgtactatggccggggaagaacaggcggcttgtgtgcatgaagacaggacccagtgtcggggggacaaagctgccccgcaagctgcccatctctgtgggccgccgcgagggtctggctcggtcagcacggcccccagagctagataatgtcctgtctgctccagttgccctggccctggggccccggaagacaccccagaggcaggagggtgtggctgcagtggatgtcggtgctgcctccgcacacaggagcccccggctccgctgcagccacctcacccaccgatggcccaaacaccgagagaggaagtcggaagacgtgggtggaccccaggatgccccggaacagacccctgtctttggggtcttcgcctgttgtgccccctctgggaccctcacagatcagggaccagaccctgggcacaggtccaacgtgacaccacagaaactaaggctcagaggggactcgtacgttgtcaacgtgggtgtgggtgaagacctgagcctggcctcgatgcacagtcctgctccccagggaggactggctggggaatgccaggaaggggcagagctgcgcaatggatgtgtggacagagctagtcggcacgtggaggctctcctggttttcgagcaggaaacgtgctgtgagcaggaatcgcgaggagtggttactcaatttcttcccagccagagctttgtaaacctgcgcttctcacccctcagtgaagcctga

SEQ ID NO: 133767 - DNA, 697 bp, Homo sapiens
  misc_feature (1)...(697): n = a,t,c or g
gccccgcgccgcatttttntccccgctgcttccccttctcctgggcttcctgctcctctccgctccgcatggcggcagcggcctgcacaccaagggcgcccttcccctggatacggtcactttntacaaggggccccttgggaaggggaattagccccaaaagtccctggaacacccacttgctcagctctatacggcctcaggtcattcccaaaagcaagttcgtctttggtgaagttcgacaaccagtaaccctacggtgaggaagcaggatgagttcaagcgtcttgctgaaaactcggcttccagcgatgatctcttggtggcagaggtggggatctcaggtatggacaagtccaggacggctgggggggcagagagggaggaagctagaaatcgtttccctacttggaacaggaatacccagcatctttccttttgagccactctcaaggagtgtaagtaaacaggttcatggtctctaaaggaatctgctgcccacagtaggcttaacctgagcagattttgggaccatggaatctaagctcagctgtacaggtgcctgaagggaagggaacccctcttccttcacattccacccctctctgacattaaactgtgagaactttgagctctccttgcagggaacactgggcagagggggtgctatgtcccctaggggacagcatagtcagtt

SEQ ID NO: 133768 - DNA, 1018 bp, Homo sapiens
gagcctcctggggtgtccacgtgagcgcgcgtgagtccgcccccccagtcacgtgaccgctgactcggggcgttctccactatcgcttacctacctccctctgcaggaacccggcgatatggctgccgctgtgccccgcgccgcatttctctccccgctgcttccccttctcctgggcttcctgctcctctccgctccgcatggcggcagcggcctgcacaccaagggcgcccttcccctggatacggtcactttctacaagattatggtgacaagctgaacatggagctgagtgagaaatacaagctggacaaagagagctacccagtcttctacctcttccgggatggggactttgagaacccagtcccatacactggggcagttaaggttggagccatccagcgctggctgaaggggcaaggggtcttacctaggtatgcctggttgcctgcctgtatacgacgccttggccggggagttcatcagggcctctggtgtggaggcccgccaggccctcttgaagcaggggcaagataacctctcaagtgtgaaggagactcagaagaagtgggccgagcaatacctgaagatcatggggaagatcttagaccaaggggaggacttcccagcatcagagatgacacggatcgccaggctgattgagaagaacaagaggagctgtaaaaaggctgtctgtgattttccggggtttggtgggggtagggaggggagagttaacctgctggctgtgagtcccttgtggaatataagggggtagtgggaaaagtggtactaacccacgattctgagccctgagtatgcctggacattgatgctaacatgaccatgcttgggatgtctctagctggtctggggatagctggagcacttactcaggtggctggtgaaatgacacctcagaaggaatgagtgctatagagaggagagaggagtgtactgcccaggtctttgacagatgtaattctcattcaattaaagtttcagtgttttggtt

SEQ ID NO: 133769 - DNA, 723 bp, Homo sapiens
aattcccgggtcgacgatttcgtggcagggtggggggtgtggaaaaataaaaggaaaagtccttgcaccatgtagatcagcgtcccccactttggcatcccggccggccggggacctcccagtctgcggccatgaacgcgagcagcgagggcgagagcttcgcgggctcggtgcaaattccaggtggcacaacggtgctggtggagctgactcccgacatccatatctgcggcatctgcaagcagcagtttaacaacctggatgcctttgtagctcacaagcaaagtggctgccagctgacaggcacatccgcagcagcccccagcacggtccagtttgtatcggaggaaacagtgcctgccacccagactcagaccaccaccagaaccatcacctcggagacccagacaatcacagtttcagctccagaatttgtttttgaacatggctatcaaacttacctgcccacggaaagtaatgaaaaccagacagccactgtcatctctctccctgccaagtcacgcaccaaaaagcccacaacaccacctgctcagaaaaggcttaactgttgctatccaggttgccaattcaagactgcttatggcatgaaggacatggagcggcatttaaaaattcacacgggagacaaaccccataagtgtgaagtctgtggcaagtgctttagccggaaagacaagctgaaaactcacatgcggtgccaca

SEQ ID NO: 133770 - DNA, 2087 bp, Homo sapiens
atggctgcagaagccccaccatcacatttgcatccaaagccagaagaaaaggggcacattgctagccacatctgctcccttttcatcacaaatgccaaacttttcccagaaactcctccagctgtgtgctggagaagttcacaagtatgtagaggaccaagattatttagactattggttctcatagtatgtgttttgggtggcacaacggtgctggtggagctgactcccgacatccatatctgcggcatctgcaagcagcagtttaacaacctggatgcctttgtagctcacaagcaaagtggctgccagctgacaggcacatccgcagcagcccccagcacggtccagtttgtatcggaggaaacagtgcctgccacccagactcagaccaccaccagaaccatcacctcggagacccagacaatcacaggaagtcaccaagaaaaggtgaaaaccagaaaacccttaaaagtgggcctgtttccattgactggcagttcccagacctgcctatggaccaagatcccctgggagcttgttaaggataccggtgcccgggctccacctcctgaatctgaatgtctggagccgaggctcagcagcggctctgcacaccaagggcgcccttcccctggatacggtcactttctacaaggtcattcccaaaagcaagttcgtcttggtgaagttcgacacccagtacccctacggtgagaagcaggatgagttcaagcgttttgctgaaaactcggcttccagccgatgatctcttgggtggcggaggtggggatctcagattatggtgacaagctgaacatgggagctgagttgagaaatacaagctgggacaaagagagctacccagtcttcttacctcttccgggatggggacttttgaggaacccagttcccattacactgggggcagttaaaggttgggagccatccagcgctggctgaaagggggcaaaggggtctacctaggtgatggcctggagttggtctgcactgtataactgacgcccttggccggggaattcaatcaggggcttctggtgtggaggcccgccaggcccctcttgaagcaggggcacaagataacctctcaaagtgtgaaaggagactcagaaagaagtggggccgagcaatacctgaagatcatggggaagatcttagacccaaggggaggacttccccagcatcagagatgaccacggaatcgctagggctgattgagaagaaccaagatgagtgacgggaagaaggaggagctcccagaagagcttaaaccatcctgactgcccttcccagaagaaagggggccgagaaaagaggagctgtaaacaaggctgtctgtgattttcccagggtttggtgggagtatggacggggagagttaaccctgctggctgtgagtcccttgtggaatataagggggtagtgggaaaagtgggtactaaaccccccgattctgagccctgaagtatgcctggacaattgatgctaacatgcaccatgctttgggatgtctctaacctgggtctggggatagctggagcacttactcaaggttggctggtgaaatgacacctcagaaaggaattaagtgctatagagaggaggagaggagtgtactgcccaggtctttgacaggtgtaattctcattcaattaaagtttcagtgtttttggttaagtggacctgaagccattcttttttcttttcaaattatactttcgtctatgacctgctttcctctttgaatgtaagctggtatagactccactttcccagggtaacaaactatcctcataacactgtggaaagtggcatacctttgttattttccagtgatattcagactgacatggattgactgtcaatggtaaagtttgtctattttccagtccttaaaactcaatagcagtattgatgaatatattgaaccaacattgatggaccatggtgtaattattttccatgctttgtgagggtacacataggcaaattcttaggttttactgatatattctgtggacttgggatttacacaggctaaatggatataggtccgatttcaaaat

SEQ ID NO: 133771 - DNA, 799 bp, Homo sapiens
atggcccaacaacttcccatcgccccagtgggttggcttataaataatctgagggcttccaggtacaagccattactgaatataatgctggtgttcgcagcggagatgatcgtgctggtggcattggggctgatggtcgtcgtcgtattggagctgaccgtggtggtcgccctgacgatgacggtggtggtcatagtgcggatgatgggtggtgatattggggatgatggtggtggtggtagtggggatgatggtggtggtggtagtggggatgatggtggtggtgttatgtggcaattctttgactccatgtcaaagaatgactccatcatccccactaccaccaccaccatcatccccactacgaccaccaccatcactattagagcagaacaatttaccatcctgacctggaagcctgttgtgtcctctcaaaagaacacatcatcattccgtggcttgacataatgctgggcttctttactcatatgtgctacaaatggtaccccaatttactctgtccccaagggtattctcggttcacaactctgtctgacagtgaataacaataagtacgatcagttgttgcaaaaatagattttaccgttagatcaaaacttggcagcaagcgcatcaagaactcccgtgtgtccagcccactgctttagaactactgccttaagtatatttccactttgaaactcactcccctgatccttaggagctgtttacaaattaataagaatgagcccattagagtccacacgaaatcgtcggcccgggtattccgacccgatcg

SEQ ID NO: 133772 - DNA, 733 bp, Homo sapiens
atgaatctgagggacatccggccagcaggggaaggggaagagagctcagtgggtgcttttaagagtgtacatcgtctagtgaacacctaccacacggcaggccctgggctcataaaaacgaacgtttacggacagcttattgtacagcaaaagctgacctcatcctcaaatcagcccgacggggtagatgccactgttccccgcattttgcagacaaaggtaaatcatcagacagaaaagcctttcggcttctgccagaatgaacagacaagaggcatagcaacctccggagaccccaccagccgccgtttctccctctgtccaccgggctttgcttctgttgttcttcctgcccagaacggctttacctgtcaccaggttcgcccctcagccttcccacccgtcaccagccttccaagttctgctgcactgtcagttccatcagccgactcaccccgatttccccagcccgccggatgtacccttcgtctgggcccccaggccccctgccacctggacgttgcctgctggcttgcctgtttctgacactgggctctgggcttcctggaatagcaactgggtcctcggattccagtaccccaccatgactgccgccagccactcctatgtcagtcttggctgtctgccaggcactgctgatgattgcccccagaaccgtactattaatcccattacacagatgagcaaactgagacccacagaggctgagtaa

SEQ ID NO: 133773 - DNA, 438 bp, Homo sapiens
gctgcttccagctccaaagcacctaagaatggaggtaaagcgaaggattcagcaaagacaacagaggaaacttccaagccaaaagatgactaaagaaatacaagttaaggtgtgaggacttctgcatcttacagtcagcacagaacacactgagacttgaatcaagtcagcaacagagcaaaataaagatgcaaacttcgttttttaaaaacatgatatctaaaaagcagaatgtgcagagtcttttctttgccaagcaaaacagtttccaccacgtaagtgctgtctttctccatgggcctggccttgtatgttattatagaaacactgtggggaatgggattcttagcaagttatggcggtaagacccaaaccttgccattttttttatcctaatctacaattcatgtattgttgtctcaagaaaaatccacataa

SEQ ID NO: 133774 - DNA, 1036 bp, Homo sapiens
acaaaagaaaagctaagtgaatttttgcacattctacacacagtgcctgtaaatctcatttgtactttcagtttgcccttaattttttttgttagtgtttagaaaacaatgttttaaacattcttcagtgttctgatttcttattaccccctttcctcttgggcttttgaactgtatttgatgttgctttgggataatgtttataagtcttccagtatgaatcccacagaaaccaaggctgtaaaaacagaacctgagaagaagtcacagtcaaccaagctgtctgtggttcatgagaaaaaatcccaagaaggaaagccaaaagaacacacagagccaaaaagcctacccaagcaggcatcagatacaggaagtaacgatgctcacaataaaaaagcagtttccagatcagctgaacagcagccatcagagaaatcaacagaaccaaagactaaaccacaagacatgatttctgctggtggagagagtgttgctggtatcactgcaatatctggcaagccgggtgacaagaaaaaagaaaagaaatcattaaccccagctgtgccagttgaatctaaaccggataaaccatcgggaaagtcaggcatggatgctgctttggatgacttaatagatactttaggaggacctgaagaaactgaagaagaaaatacaacgtatactggaccagaagtttcagatccaatgagttccacctacatagaggaattgggtaaaagagaagtcacaattcctccaaaatatagggaactattggctaaacccatagggccagatgatgctatagacgccttgtcatctgacttcacctgtgggtcgcctacagctgctggaaagaaaactgaaaaagaggaatctacagaagttttaaaagctcagtcagcagggacagtcagaagtgctgctccaccccaagagaagaaaagaaaggtggagaaggatacaatgagtgatcaagcactcgaggctctgtcggcttcactgggcacccggcaagcagaacctgagctcgacc

SEQ ID NO: 133775 - DNA, 1774 bp, Homo sapiens
gaattcggggggagtctccctgacttccagcaacaatccttgagtctgggactgccctggcctaagatgggccagtttctatcttcgactttcttggagggctcaccggccacagtgtggcacgataagctttgtgacggtgaacgcagaggagcaagagaagcagttcgtatcttccaggaccaagcaaaagctaaagaagaaaaactagagaagtgtggtgaggatgatgaaacaatcccatctgagtacagattaaaaccagccacggataaagatggaaaaccactattgccagagcctgaagaaaaacccaagcctcggagtgaatcagaactcattgatgaactttcagaagattttgaccggtctgaatgtaaagagaaaccatctaagccaactgaaaagacagaagaatctaaggccgctgctccagctcctgtgtcggaggctgtgtctcggacctccatgtgtagtatacagtcagcaccccctgagccggctaccttgaagggcacagtgccagacgatgctgtagaagccttggctgatagcctggggaaaaaggaagcagatccagaagatggaaaacctgtgatggataaagtcaaggagaaggccaaagaagaagaccgtgaaaagcttggtgaaaaagaagaaacaattcctcctgattatagattagaagaggtcaaggataatgatggaaagccactcctgccaaaagagtctaaggaacagcttccacccatgagtgaagacttccttctggatgctttgtctgaggacttctctggtccacaaaatgcttcatctcttaaatttgaagatgctaaacttgctgctgccatctctgaagtggtttcccaaaccccagcttcaacgacccaagctggagccccaccccgtgatacctcgagtgacaaagacctcgatgatgccttggataaactctctgacagtctagaacaaaggcagcctgacccagatgagaacaaaccaatggaagataaagtaaaggaaaaagctaaagctgaacatagagacaagcttggagagagagatgacactatcccacctgaatacagacatctcctggatgataatggacaggacaaaccagtgaagccacctacaaagaaatcagaggattcaaagaaacctgcagatgaccaagaccccattgatgctctctcaggagatctggacagctgtccctccactacagaaacctcacagaacacagcaaaggataagtgcaagaaggctgcttccagctccaaagcacctaagaatggaggtaaagcgaaggattcagcaaagacaacagaggaaacttccaagccaaaagatgactaaagaaatacaagttaaggtatctggtatctgcatgtaaaatcttcagctggtggatggtgacttttgaagaacaaaaggctttggcaacagaaaacaattgttctgggtgatttctagaatggtttttgttgagtctctgaacatcctaaatattggtttgttattcttttccagaaagaaaatgaatttgactggttcacctgtgtactgagtattgataaactttgaatttttttaattgccttcaattgggagagaaagctttatatttgtgtgaggacttctgcatcttacagtcagcacagaacacactgagacttgaatcaagtcagcaacagagcaaaataaaggttagataagtccttgtgtagcaaatttcgagcataagaaataaaatctaattaattcttagggt

SEQ ID NO: 133776 - DNA, 4171 bp, Homo sapiens
  misc_feature (1)...(4171): n = a,t,c or g
agagtgagcccggcgcctacaacgcaacaccccgcgctcctctccggctcccccgccgtgcggatcggagccagccggttgttgccatggcattcgccagctggtggtacaagacgcatgtcagtgaaaaaaccagtgaatcgccttccaaaccatgagaaaagaaaggatcatatgagaaaaaagcagcaagcctcggcagcagtcaatcctccagaacctatgctggtggaacagcctctgtcaccaaggtgtcagctttctctggtgcaaccagcaagtcttacagtatgaatcccacagaaaccaaggccattccagtcagccaacagatggaaggaccacatcttcctaacaagaaaaaacacaaaaaacaggctgtaaaaacagaacctgagaagaagtcacagtcaaccaagctgtctgtgggttcatgagaaaaaatcccaagaaggaaagccaaaagaacacacagagccaaaaagcctacccaagcaggcatcagatacagggaagtaacgatgctcacaataaaaaagcagtttccagatcagctggaacagcagcccatcagagaaatcaacagaaccaaagactaaaccacaagacatgatttctgctggtggagagagtgttgctggtatcactgcaatatctggcaagccgggtgacaagaaaaaagaaaagaaatcattaaccccagctgtgccagttgaatctaaaccggataaaccatcggggaaagtcaggcatggatgctggtttgggattgacttaatagatactttaggaggacctgaagaaactgaagaagaaaatacaacgtatactggaccagaagtttcagatccaatgagttccacctacatagaggaattgggtaaaagagaagtcacaattcctccaaaatatagggaactattggctaaaaaggaagggatcacagggcctcctgcagactcttcaaaacccatagggccagatgatgctatagacgccttgtcatctgacttcacctgtgggtcgcctacagctgctggaaagaaaactgaaaaagaggaatctacagaagttttaaaagctcagtccagcagggacagtcagaagtgctgctccaccccaagagaagaaaagaaaggtggagaaggatacaatgagtgatcaagcactcgaggctctgtcggcttcactgggcacccggcaagcagaacctgagctcgacctccgctcaattaaggaagtcgatgaggcaaaagctaaagaagaaaaactagagaagtgtggtgaggatgatgaaacaatcccatctgaagtacagattaaaaccagccacggataaagatggaaaacccctattgcccagagcctgaagaaaaacgccaaagcctcggagtgaatcagaactccattgatgaactttcagaagattttgaccggtctgaatgtaaagagaaaccatctaagccaactgaaaagacagaagaatctaaggccgctgctccaggctcctgtgtcggaggctgtgtgtcggacctccatgtgtagtatacagtcagcaccccctgagccggctacctttgaagggcacagtgcccagatgatgctgtagaagccttggctgatagcctggggaaaaaggaagcagatccagaagatggaaaacctgtgatggataaagtcaaggagaaggccaaagaagaagaccgtgaaaagctttggtgaaaaagaagaaacaattcctcctgattatagattagaagaggtcaaggattaaagatgggaaagccactccttgcccaaagagtcttaaggaacagcttccacccatgagtgaagactttccttctggatgctttgtctgaggacttctctggtccacaaaatgcttcatctccttaattttgaagatgctaaacttgctggtggccatctctgaaagtggtttcccaaaacccccggttttccacgacccccaggctggagccccatccccgtgatacctcgcagagtgaccaaggccctcggtgattgcattggataaactctctgacagtctagggacaaagggcagcctgacccaggatgaggaacaaaccaatgggaaggttaaagttaaagggaaaaagctaaagctgaacatagagacaagcttgggagaaagagatggacattattcccacctgaatacagacatctcctggatgataatggacagggacaaacccagtgaagccaccttacaaagaaatcagaggattcaaagaaacctgcagatgaccaagaccccattgatgctctctcaggagatctggacagcttgtccctccactacagaaacctcacagaacacagccaaaggataagtgcaagaaggctgcttccagctccaaagcacctaagaatggaggtaaagcgaaggattcagcaaagacaacagaggaaacttccaagccaaaagatgactaaagaaatacaagttaaggtatctggtatctgcatgtaaaaatcttccagctggtgggatggtgacttttgaagaaccaaaaggcttttggcaaccagaaaacaattgttctggggtgatttctagaatggtttttgttgagtctctgaacaatcctaaatattggtttgttattcttttccaggaaggaaaatgaaatttgactgggttcacctgtgtactgagtattggataaactttgaatttttttaattgccttccaattggggagagaaagctttatatttggtaagaaatatatttgataaagtttcttaaagcaacaccaaaaaaaacaaaagaaaagctaagtgaatttttggcacattcctacacacagtgcctgtaaatctcatttgtattttcagtttgcccttaaattttttttgttagtgtttagaaaacattgttttaaacattcttcagtgttctgatttcttattaccccctttccctcttgggcttttgaactgtatttgatgttgctttggggataatgtttataaggtcaaacataggatatggtaccattgggcacatatctcctcttggggctgctaataataaattaataaccaggtaacctggacaaaccaggaagcaccaaaccccttttccagtttgaactcttctttgccaggtgtgaggacttctgcatcttacagtcagcacagaacacactgagacttgaatcaagtcagcaacagagcaaaataaaggttagataagtccttgtgtagcaaatttcgagcataagaaataaaatcttaattaattcttagggtactcatctgacttgaactctgttgggtttactgtggtagtaaaactgtgctttctattatctatacataaaacctgagcagcaactgtgtctttagagctattgccacattagcctttgcactgtatagcgtctggctttatggaacttaagtttaccaaatataaaaagaaacttctgcttttaaaaaaattatatatatatattaaatttgaaacctgcatttctcccacagcaatgtaagaagtaggctctgatgtcctaccactttgaatggttttctaatatcttaatgaatagttcctgaacattgcactgatatcatcgattagaattttgatatttaatttcatctttatttcctgggtagagaatgcagggaaaagatgtcaggtacataacataaaacaggattggggaatttattgtttcccaaaggggcatgggctttccttaggcatcagtttggaggcttttgttatggacttaggctgacttgtgggcagcgggggcaaggcaaaaaccattaacactgcttataaatggcaccacatcttgttaacctcccccccaaatactctctgaaagtcatgcacatacctatgggattttacacaccaccagcttaaaatgctatgtctctatccatcagaaatacgtcattattctatttttaaggcagcaacaagaaaagaaaaaacacttttcctgagggatttctaaccatgtatctaatcctcccatttgggcagtataggtgtttgcttttttgttttctttttttaagaaaaaccttgaaacctttgacactggacagatgtggtttgcaaggatacggctggcagtattactaattttccatgtgtantccgggaagtantttt

SEQ ID NO: 133777 - DNA, 1104 bp, Homo sapiens
ctcgggaggctgagctttcctcggcctgagcagccagaccccgggcaccgcgctcacccctcttcgccgccacgtccgcgaaggcctcacgcgcgaggcaggcgaggcccgaggcgccaccacttcacgacaccggagcgaaccgggcgccagaggtgcgacccccctgccccgaatcctgccggtgggagtggctgcatttgaaccaaacggccttcgcgggcagcagccgtcgccccgcagtcccggggctcccaagggcctgtgaccgacgccgccctccgcgtcttcgtccccgaagccccgggaaccatccgccctcgggagaccatgctgcagatgcgaggaaagccgtttcctggaacatcggaattctaaccccagggtgaaggactcacgacaggcgaggggcagacatgctgaattccacgggcgaactggagttttcgaacgaagaagatcccgagatcatctcccaactcacttccctgcctctgtccggtgggaaaagctcagctggtgtgcccgaaaaaacgggctatccggactccgtttatgtcatggcagccaacatttttcagggtattcgaatcgaaaagtcggcacagaaagtcttaatcaagtatgggaatgaacccctgcggtccttgtccgagtctgaggatcagtcctttcagcgtttgtcttatgagctggctttcagtgccctgaaatatcaagatattttgggaaactatattgatagacagctgtatcttcccaagtaccacaattaccaggatccatttgaggcagtctttatttatttgtggatggctattatggtttcccaggataggaaattttcaaactcgtgtcctttctgataatgaagagcccatatcagaagttcaagaagtagagaaccttcttaacagattagcagcagcattagattctcataggagcgtgaacctgattgtgaactgcacatgttcatggaaaaattgtcttccacgaaactggtccctggtaccaaaaaggttcgagactgctgagttaaagggactgtttaatgccacagaactggaaaggggagtagccagaattcacactcaggagtga

SEQ ID NO: 133778 - DNA, 1091 bp, Homo sapiens
caataagagctaactgccatcaagagccatcagtatgtcttcaagctgcatgcccagaaagctggattggttttcaaagaaagtgtttctatttttctgatgacaccaagaactggacatcaagtcagaggttttgtgactcacaagatgctgatcttgctcaggttgaaagcttccaggaactgaatttcctgttgagatataaaggcccatctgatcactggattgggctgagcagagaacaaggccaaccatggaaatggataaatggtactgaatggacaagacagttagtcatgaaagaagatggtgccaacttgtatgttgcaaaggtttcacaagttcctcgaatgaatccaagacctgtcatggtgagaacggtcagctcaggggctggtgcaaaggatgaactgcacattgttgaagcagaggccatgaatgacgaaggcagtccaattaaagtaacactggcaactttgaaaatgtctgtacagccaacggtttctcttgggggctttgaaataacaccaccagtggacttaaggttgaagtgtggttcagggccagtgcatattagtggacagcacttagtagctgtgaaggaaggtgcagagtcagaagatgaagaagaggaggatgtgaaactcttaagtatatctggaaagcagtctgcccctggaggtgggcagaaaaaagtaaaacttgctgctgctgctgatgatgatgatgatgaagatgatgatgatgatgatgacgaggaagctgaagaaaaagcgccagtgaagaaatctatacgagatactccagccaaaaatgcacaaaagtcaaatcagaatggaaaagactcaaaaccatcatcaacaccaagatcaaaaggacaagaatccttcaaaaaacaggaaaaatctcctaaaacaccaaaaggatctagttctgtagaagacattaaagcaaaaatgcaagcaagtatagaaaaacgtggttctcttcccaaagtggaaaccaagttcatcaattatgtgaagaatttcttctggatgactgaccaagaggctattcaagatctctggcagtggaggaagtctctttaa

SEQ ID NO: 133779 - DNA, 612 bp, Homo sapiens; identical to SEQ ID NO: 121709

SEQ ID NO: 133780 - DNA, 639 bp, Homo sapiens
atgggaaaacctgcccgcgtgattcagttacctcccaccaggtccctcccatggcacgtggggattatgggagctacaattcaagatgagatttggtgtgtgccgccacctgatggaagattcgatggacatggacgtgagccccctgaggcccagaactatcttttcagttgtgaactaaaggccgacaaagatgatcactttaaggtggataatgatgaaaatgagcaccagttatccttaagaacgccaacagtttcccttggggtctttgaaataacaccaccagtgcttttatggttgaagtgtggttcagggccagtgcatattagtggacagcatttagtagctgtggaggaagatgcagagtcagaagatgaagaggaggaggatgtgaaactcttaaggatatctggaaaaacaaagactttcatggccacaaatggcaaagaatacaagcattacaaaatcagttcagaaaagtcactagacaacaagtacaaaacacgaactccagggtttcaggcctttggattcgaggacttacacccgtggccccttggttctcaggccttctatctcagtctgagagttacaccaccagttttcctggttctgaggcttctggacttcgactga

SEQ ID NO: 133781 - DNA, 1692 bp, Homo sapiens
atggaagattcgatggacatggacatgagccccctgaggccccagaactatcttttcggttgtgaactaaaggccgacaaagattatcactttaaggtggataatgatgaaaatgagcaccagttatctttaagaacggtcagtttaggggctggtgcaaaggatgagttgcacattgttgaagcagaggcaatgaattacgaaggcagtccaattaaagtaacactggcaactttgaaaatgtctgtacagccaacggtttcccttgggggctttgaaataacaccaccagtggtcttaaggttgaagtgtggttcagggccagtgcatattagtggacagcacttagtagctgtggaggaagatgcagagtcagaagatgaagaggaggaggatgtgaacagggttttatttatgaaaccgaaaggcaggggcctcaagcatatgttcggggatttggtgtgcagttggaaattggcagccattgagacccagagcagcagttctgaagagatagtgcccagccctccctcgccaccccctctaccccgcatctacaagccttgctttgtctgtcaggacaagtcctcaggctaccactatggggtcagcgcctgtgagggctgcaagggcttcttccgccgcagcatccagaagaacatggtgtacacgtgtcaccgggacaagaactgcatcatcaacaaggtgacccggaaccgctgccagtactgccgactgcagaagtgctttgaagtgggcatgtccaaggagtctgtgagaaacgaccgaaacaagaagaagaaggaggtgcccaagcccgagtgctctgagagctacacgctgacgccggaggtgggggagctcattgagaaggtgcgtaaagcgcaccaggaaaccttccctgccctctgccagctgggcaaatacactacgaacaacagctcagaacaacgtgtctctctggacattgacctctgggacaagttcagtgaactctccaccaagtgcatcattaagactgtggagttcgccaagcagctgcccggcttcaccaccctcaccatcgccgaccagatcaccctcctcaaggctgcctgcctggacatcctgatcctgcggatctgcacgcggtacacgcccgagcaggacaccatgaccttctcggacgggctgaccctgaaccggacccagatgcacaacgctggcttcggccccctcaccgacctggtctttgccttcgccaaccagctgctgcccctggagatggatgatgcggagacggggctgctcagcgccatctgcctcatctgcggagaccgccaggacctggagcagccggaccgggtggacatgctgcaggagccgctgctggaggcgctaaaggtctacgtgcggaagcggaggcccagccgcccccacatgttccccaagatgctaatgaagattactgacctgcgaagcatcagcgccaagggggctgagcgggtgatcacgctgaagatggagatcccgggctccatgccgcctctcatccaggaaatgttggagaactcagagggcctggacactctgagcggacagccggggggtggggggcgggacgggggtggcctggcccccccgccaggcagctgtagccccagcctcagccccagctccaacagaagcagcccggccacccactccccgtga

SEQ ID NO: 133782 - DNA, 687 bp, Homo sapiens
atggacatgagtcccctgagaccccagaacaatcttttccgttgtgaactaaaggctgacaatcactttcaagtggataatgatgaaaatgagcatcagttatcttcaagaacggtcagctcaggggctggtgcaaaggatgaattgcacattgttgaagcagaggcaatgaattacgaaggcagtccaattaaagtcacactggcaactttgaaaatgtctgtacagccaacggtttcccttgggggctttgaaataacaccaccagtagtcttacggttgaagtgtggttcagggccagtgcatattagtggacagcacttagtcactgtggaggaagattcagaggcagaagatgaagaacaggaggatgtgaaactcttaagtggtagcaaggtgccacagaaaaaagtaaaacttgctgctgatgaagaagatgatgatgatgattttgatgatgaggaaactgaagaaaaagcacccgtgaagaaatctatacaagatactcgagccaaaaatgcacaaaagtcaaatcagaatggaaaagactcaaaaccatcaacaccaagatcaaaaggacaagaatccttcaaaaaacaggaaaaaattcctaaaacacctaaaggacctagttctgtagaagacattaaagcaaaaatgcaagcaagtatacaaaaagcatattga

SEQ ID NO: 133783 - DNA, 2584 bp, Homo sapiens
gtgattccgtcctgcgcggttgttctctggagcagcgttcttttatctccgtccgccttctctcctacctaagtgcgtgccgccacccgatggaagattcgatggacatggacatgagccccctgaggccccagaactatcttttcggttgtgaactaaaggccgacaaagattatcactttaaggtggataatgatgaaaatgagcaccagttatctttaagaacggtcagtttaggggctggtgcaaaggatgagttgcacattgttgaagcagaggcaatgaattacgaaggcagtccaattaaagtaacactggcaactttgaaaatgtctgtacagccaacggtttcccttgggggctttgaaataacaccaccagtggtcttaaggttgaagtgtggttcagggccagtgcatattagtggacagcacttagtagtgtaccgccggaagcaccaggagctgcaagccatgcagatggagctgcagagccctgagtacaagctgagcaagctccgcacctcgaccatcatgaccgactacaaccccaactactgctttgctggcaagacctcctccatcagtgacctgaaggaggtgccacggaaaaacatcaccctcattcggggtctgggccatggagcctttggggaggtgtatgaaggccaggtgtccggaatgcccaacgacccaagccccctgcaagtggctgtgaagacgctgcctgaagtgtgctctgaacaggacgaactggatttcctcatggaagccctgatcatcagcaaattcaaccaccagaacattgttcgctgcattggggtgagcctgcaatccctgccccggttcatcctgctggagctcatggcggggggagacctcaagtccttcctccgagagacccgccctcgcccgagccagccctcctccctggccatgctggaccttctgcacgtggctcgggacattgcctgtggctgtcagtatttggaggaaaaccacttcatccaccgagacattgctgccagaaactgcctcttgacctgtccaggccctggaagagtggccaagattggagacttcgggatggcccgagacatctacagggcgagctactatagaaagggaggctgtgccatgctgccagttaagtggatgcccccagaggccttcatggaaggaatattcacttctaaaacagacacatggtcctttggagtgctgctatgggaaatcttttctcttggatatatgccataccccagcaaaagcaaccaggaagttctggagtttgtcaccagtggaggccggatggacccacccaagaactgccctgggcctgtataccggataatgactcagtgctggcaacatcagcctgaagacaggcccaactttgccatcattttggagaggattgaatactgcacccaggacccggatgtaatcaacaccgctttgccgatagaatatggtccacttgtggaagaggaagagaaagtgcctgtgaggcccaaggaccctgagggggttcctcctctcctggtctctcaacaggcaaaacgggaggaggagcgcagcccagctgccccaccacctctgcctaccacctcctctggcaaggctgcaaagaaacccacagctgcagaggtctctgttcgagtccctagagggccggccgtggaagggggacacgtgaatatggcattctctcagtccaaccctccttcggagttgcacagggtccacggatccagaaataagcccaccagcttgtggaacccaacgtacggctcctggtttacagagaaacccaccaaaaagaataatcctatagcaaagaaggagccacacgagaggggtaacctggggctggagggaagctgtactgtcccacctaacgttgcaactgggagacttccgggggcctcactgctcctagagccctcttcgctgactgccaatatgaaggaggtacctctgttcaggctacgtcacttcccttgtgggaatgtcaattacggctaccagcaacagggcttgcccttagaagccgctactgcccctggagctggtcattacgaggataccattctgaaaagcaagaatagcatgaaccagcctgggccctgagctcggtcgcacactcacttctcttccttgggatccctaagaccgtggaggagagagaggcaatcaatggctcctttcacaaaccagagaccaaatgtcacgttttgttttgtgccaacctattttgaagtaccaccaaaaaagctgtattttgaaaatgctttagaaaggttttgagcatgggttcatcctattctttcgaaagaagaaaatatcataaaaatgagtgataaatacaaggccagatgtggttgcataaggtttttatgcatgtttgttgtatacttccttatgcttcttttaaattgtgtgtgctctgcttcaatgtagtcagaattagctgcttctatgtttcatagttggggtcatagatgtttccttgccttgttgatgtggacatgagccatttgaggggagagggaacggaaataaaggagttatttgtaatgact

SEQ ID NO: 133784 - DNA, 2305 bp, Homo sapiens
atgagaccaaggactctggtgttcctccagtcatcggagccatatcattttggtgcattggccgggaattcattcaacggattgggcatggtgtttttacaaaacccgtgcaagcattttaagatcaacccaggtcttttagcaatcacatcgggcaggcccagggagaacagttcccccaaattagaaaagcaacttccaggggaaccatctgaggatcccccttattttgggccccttcaagttcccttctcattacaagaccttaagcaaataaagcgaaacttaggccgattttctaacgacactgataggaaccaggaggaggcccaaaagaaagagagaaagctcaagagaaggacagaggctctagcagctgctttgcaggtttgcaaaatccaggatccccaaggcacaagtgctgaattagctgagctaatagctcttacaagagcacttaaattaagcaaggggaaggtagctgccatttatactaactccaagtatgctttcttaactctccatactcatgctgcgattcaaaaggaaaggcattttcttaccactaatgaatctcctataaaatattgccaggaaattggcaggttattatcctcagtttttcttccacaaaaaatagcagtcatgcgttataggggacatcaaaaggaaacagataagaaagggtacactcgccagcagttttgccaggagagtacactgaacaaaggagacagggtcatttataacctgacgcgtccaccctactgctgtgtccagtttccaatagctggaatgggatctaacattctgtatttgacccgattggctagcaacttagaactttttaaaagaggcaaaggtagaggaaaacaaaggaaggaggaagtaacttgtggaatgctgagaaagatatttaagaatgtcccctggtgtgattccgtcctgcgcggttgttctctggagcagcgttcttttatctccgtccgccttctctcctacctaagtgcgtgccgccacccgatggaagattcgatggacatggacatgagccccctgaggccccagaactatcttttcggttgtgaactaaaggccgacaaagattatcactttaaggtggataatgatgaaaatgagcaccagttatctttaagaacggtcagtttaggggctggtgcaaaggatgagttgcacattgttgaagcagaggcaatgaattacgaaggcaagtccaattaaacgtaacacttggcaactttgaaaatgtcctgtacagccaacggtttcccttgggggctttgaaataacaccaccagtggtcttaaggttgaagtgtggttcagggccagtgcatattagtggacagcacttagtagctgtggaggaagatgcagagtcagaagatgaaggaggaggaggatgtgaaacctcttaagtatatctgggaaagcgggtctgcccctggaggtggtagcaaggtttccacagaaaaaaagtaaaaactttgcttgcttgatggaaagatgatgacgatgatgatgatgaagaagatgatgatgattgaagatgatgatgatgatatgatttttggtgatgagggaagctgaaaggaaaagccgccagtgaccgaattttttacgggaatactccagcccaaaaatgcagcgaaagtcaaatcagaatggaaaagactccaaaaaccatcattcacacccaagaatcaaaaaggacaagaatcccttcaaagaaacaggaaaaaaactcctaaaacacccaaaagggacctaagttctgtagaagacattaaagcaaaaaatgcaagcaagtatagaaaaacgtggttctcttccccaaagtgggaagccaaattcatcaattatgtgaagaatttgctcccggatgactgaccaagaggctattcaagatctctggcagtggaggaagtctctttaagaaaatagtgtagacaatttggtaagagaatttaccgtcttatttcatttctgtaacagttgatatctggctgtccttttttataatgcagagtgagaacttttccctacccggggtttgataaatgtttgtccaggttctatttgccaaggaattgtgttgtcccaaaatgcctgtttaagtttttaaagatggaactccacccttctgcttggttttaagtatgtatggaatgttatgataggacatagtagtagcggtggtcagacatgggaaatggtgtgggagacaaaaatatacatgtgaaataaaactcagtattttaataaagtaaaaaaaaaaaaaaaaa

SEQ ID NO: 133785 - DNA, 687 bp, Homo sapiens
atgcggacgagacagacgcgcaggcggggagcggggctcggcgccgccgacgcgcgggtgcagcctgggccagctcccgaccacttccctcccatcccacctcctggctcccattcactccccactgccggaaccctagcctctccttccagctcagagccctttgtgcttggagatggcattcccggaggatctgagcacatgacattggctgccctgaagtctcccctctcgtccttgaagtggcgcgtgacgagggaccagcacacaggcccagattctcacactgatcctcgcattgctcccactgggggacgagccaaagggcagccccgcctccgtgtcacccctgcatccagaccacttggctggtgctgtcacggggcttggaggctgacccaaaaccaggtcaggcccaggcaaggacagatcctcgggagctgcttcctccttcccaggaggaagggtctgaattggttcagcatgtcgggatggccagtggggccccagaacccagcagggttcccttgtgtgtgctgtcaggcattttcccagccccggaaatcaatggtcgctgtgggactcagaggggagaaacgactggccgagtgagcaacatcatcacccggaggaataagaccaaagggcgctttctgtttccaccgcacgcgtggtcgaacgcgtggg

SEQ ID NO: 133786 - DNA, 2052 bp, Homo sapiens
atgggccgggcacggtggctcactcttgtaatcccagcactttgggagaccaaggtcccagttcagggccctgaatccccacaaccactgactgacggccctaccacctgctgtctctcctggcggccacagcagcagcagcagcagcaggaccatctctggtatcacatgagagctacagcgccgctacaagcggtggtgcccgggccttggcaggaggatgtggcagatgctgaagagtgtgctggtcgctgtgggcccttaatggactgccgggcgttccactacaatgtgagcagccatggttgccaactgctgccatggactcaacactcaccccacacgaggctgcggcattctgggcgctgtgacctcttccaggagaaaggcgagtgggggtacatgcccacgctccggaatggcctggaagagaacttctgccgtaaccctgatggcgaccccggaggtccttggtgccacacaacagaccctgccgtgcgcttccagagctgcggcatcaaatcctgccgggtggccgcgtgtgtctggtgcaatggcgaggaataccgcggcgcggtagaccgcaccgagtcagggcgcgagtgccagcgctgggatcttcagcacccgcaccagcaccccttcgagccgggcaagttcctcgaccaaggtctggacgacaactattgccggaatcctgacggctccgagcggccatggtgctacactacggatccgcagatcgagcgagaattctgtgacctcccccgctgcgggtccgaggcacagccccgccaagaggccacaagtgtcagctgcttccgcgggaagggtgagggctaccggggcacagccaataccaccaccgcgggcgtaccttgccagcgttgggacgcgcaaatcccgcatcagcaccgatttacgccagaaaaatacgcgtgcaaagaccttcgggagaacttctgccggaaccccgacggctcagaggcgccctggtgcttcacactgcggcccggcatgcgcgtgggcttttgctaccagatccggcgttgtacagacgacgtgcggccccaggactgctaccacggcgcgggggagcagtaccgcggcacggtcagcaagacccgcaagggtgtccagtgccagcgcggagcctggaaatggttgagactaccctgccacgacttcgctcccgctcccgcctcggttcacgtttacctccgaaccgcatgcacaactggaggagaacttctgccagacccagatggggatagccatgggccctggtgctacacgatggacccaaggaccccattcgactactgtgccctgcgacgctgcgaccaggtgcagtttgagaagtgtggcaagagggtggatcggctggatcagcgttgttccaagctgcgcgtggctgggggccatccgggcaactcaccctggacagtcagcttgcggaattggcagggccagcatttctgcggggggtctctagtgaaggagcagtggatactgactgcccggcagtgcttctcctcctgccatatgcctctcacgggctatgaggtatggttgggcaccctgttccagaacccacaacatggagagccaggcctacagcgggtcccagtagccaagatgctgtgtgggccctcaggctctcagcttgtcctgctcaagctggagaggtatgtggacaacctgggagggtggaccaagtgtgagattgcaggccggggtgagaccaaaggtacgggtaatgacacagtcctaaatgtggccttgctgaatgtcatctccaaccaggagtgtaacatcaagcaccgaggacatgtgcgggagagcgagatgtgcactgagggactgttggcccctgtgggggcctgtgagggtgactacgggggcccacttgcctgctttacccacaactgctgggtcctgaaaggaattagaatccccaaccgagtatgcgcaaggtcgcgctggccagccgtcttcacgcgtgtctctgtgtttgtggactggattcacaaggtcatgagactgggttag

SEQ ID NO: 133787 - DNA, 2296 bp, Homo sapiens
ccactctgcagggcagcgctcgccatcgaatgacttccaggtgctccggggcacagagctacagcacctgctacatgcggtggtgcccgggccttggcaggaggatgtggcagatgctgaagagtgtgctggtcgctgtgggcccttacttctctccagggcgttccactacaatgtgagcagccatggttgccaactgctgccatggactcaacactcgccccactcaaggctgtggcattctgggcgctgtgacctcttccaggagaaaggcgagtgggggtacatgcccacgctccggaatggcctggaagagaacttctgccgtaaccctgatggcgaccccggaggtccttggtgccacacaacagaccctgccgtgcgcttccagagctgcggcatcaaatcctgccgggtggccgcgtgtgtctggtgcaatggcgaggaataccgcggcgcggtagaccgcaccgagtcagggcgcgagtgccagcgctgggatcttcagcacccgcaccagcaccccttcgagccgggcaagttcctcgaccaaggtctggacgacaactattgccggaatcctgacggctccgagcggccatggtgctacactacggatccgcagatcgagcgagagttctgtgacctcccccgctgcgggtccgaggcacagccccgccaagaggccacaagtgtcagctgcttccgcgggaagggtgagggctaccggggcacagccaataccaccaccgcgggcgtaccttgccagcgttgggacgcgcaaatcccgcatcagcaccgatttacgccagaaaaatacgcgtgcaagtgaggtgggcgggggggcgggcgttgggacgtgctgctgcgggtgagacgggaggagggtagtcacgggcttagggctggaggctggcgggctagggctgagtggagcgcctgcttagagaccttcgggagaacttctgctggaacctcgacggctcagaggcgccctgttgcttcacactgcggcccggcacgcgcgtgggcttttgctaccagatacggcgttgtacagacgacgtgcggccccaggactgctaccacggcgcgggggagcagtaccgcgggcacggttcagcaagacccgcaagggtgtccagtgccagcgctggtccgctgagacgccgcacaagctgcagtgagtccctggtgctcccggccccgccagggccctaaccctggggcggcatgctttgatgtctgggaccagagcctggaaatggttgagactatccctgccacgatttcgctcccgctcccgcctcggttcacgtttaacctccgaaccacatgcacaactggaggagaacttctgccagacccagatggggatagccatgggccctggtgctacacgatggacccaaggaccccattcgactactgtgccctgcgacgctgcgctgatgaccagccgccatcaatcctggacccccccccagaccaggtgcagtttgagaagtgtggcaagagggtggatcggctggatcagcgtcgttccaagctgcgcgtggctgggggccatccgggcaactcaccctggacagtcagcttgcggaatcggtgaggcacaacggcctgtctcccacagagaggagctgaggttgtgtcctctgtggttatgccactgggggctgggaatctatccctgcccccagaggtcctagccagaagatggcaggtctagcatctctcccaggagtctgttccctgtcctaattccccactcctctaggcagggccagcatttctgcggggggtctctagtgaaggagcagtggatactgactgcccggcagtgcttctcctcctggtgagcctcccttgtgtttggggacccagtctcatcccaccttcccctttccccaggcaagctaacaagtgagccttggggcaacggactgagagtcacaaatgacctagcagagcttctctcccagccatatgcctctcacgggctatgaggtatggttgggcaccctgttccagaacccacaacatggagagccaggcctacagcgggtcccagtagccaagatgctgtgtgggccctcaggctctcagcttgtcctgctcaagctggagagatctgtgaccctgaaccagcgtgtggccctgatctgcctgccgcctgaatgatatgtggtgcctccagggaccaagtgtgagattgcaggccggggtgagaccaaaggtacgggtaatgacacagtcctaaatgtggccttgctgaacgtcatctccaaccaag

SEQ ID NO: 133788 - DNA, 5635 bp, Homo sapiens
atggggtggctctcactcctgctgcttctgactcaatgcttaggggtccctggtgagtgcccccaaccctgatccccatctgccttcaggagggggttggccccattctcctattctaggatgagaaaaaaagtcagggagccagaggctcagtgggcatggggcagtgacctcggcctcttgagcacagctgggaagccctaggaacacatagacatggcccacttaggcttctattagcacgtctgctctagcactgaagcagtgttaggaccacacagatgcacgcacacagcaggcagtgacccctcctgagcctgatctacccctctaacctagcgtatgctttcgtgcaagtgagagcccagatttggagtctgaatgcctaccgagggcccctggctgggtaatgtgatggctctgagccttagcattctcatttgagagatgagatggggcaagctccatcacccactgctctcacagagcgtatgtgttagatctgagcccggtgcctgggccactacacagaggcaccggtgataactaccaagtctgggcctgcttcccaggggaaatttttttgacaagtatctgtgcaggggggctagactggcccttgaaagtgcatacagggtccatcccagaagccttgtagctttgatcccctgaatgaacaaagtgtggacatgccaatacacattactgacatgtatgcccacctgacctgcacccactcatgcccactctgcagggcagcgctcgccattgaatgacttccaggtgctccggggcacagagctacctgctacatgcggtggtgcccgggccttggcaggaggatgtggcagatgctgaagagtgtgctggtcgctgtgggctcttaatggactgctgggcagcgctcgccattgaatgacttccaggtgctccggggcacagagctacagcacctgctacatgcggtggtgcccgggccttggcaggaggatgtggcagatgctgaagagtgtgctggtcgctgtgggcccttaatggactgccgggccttccactacaacgtgagcagccatggttgccaactgctgccatggactcaacactcgccccacacgaggctgcggcgttctgggcgctgtgacctcttccagaagaaagactacgtacggacctgcatcatgaacaatggggttgggtaccggggcaccatggccacgaccgtgggtggcctgccctgccaggcttggagccacaagttcccgaatgatcacaagtacacgcccactctccggaatggcctggaagagaacttctgccgtaaccctgatggcgaccccggaggtccttggtgctacacaacagaccctgctgtgcgcttccagagctgcggcatcaaatcctgccgggaggccgcgtgtgtctggtgcaatggcgaggaataccgcggcgcggtagaccgcacggagtcagggcgcgagtgccagcgctgggatcttcagcacccgcaccagcaccccttcgagccgggcaagttcctcgaccaaggtctggacgacaactattgccggaatcctgacggctccgagcggccatggtgctacactacggatccgcagatcgagcgagagttctgtgacctcccccgctgcgggtccgaggcacagccccgccaagaggccacaactgtcagctgcttccgcgggaagggtgagggctaccggggcacagccaataccaccactgcgggcgtaccttgccagcgttgggacgcgcaaatccctcatcagcaccgatttacgccagaaaaatacgcgtgcaaagaccttcgggagaacttctgccggaaccccgacggctcagaggcgccctggtgcttcacactgcggcccggcatgcgcgcggccttttgctaccagatccggcgttgtacagacgacgtgcggccccaggactgctaccacggcgcaggggagcagtaccgcggcacggtcagcaagacccgcaagggtgtccagtgccagcgctggtccgctgagacgccgcacaagccgcagttcacgtttacctccgaaccgcatgcacaactggaggagaacttctgccggaacccagatggggatagccatgggccctggtgctacacgatggacccaaggaccccattcgactactgtgccctgcgacgctgcgctgatgaccagccgccatcaatcctggacccccccagaccaggtgcagtttgagaagtgtggcaagagggtggatcggctggatcagcgttgttccaagctgcgcgtggctgggggccatccgggcaactcaccctggacagtcagcttgcggaattggcagggccagcatttcttgcggggggtctctagtgaaggagcagtggatactgacttgcccgggcagtgcttctcctcctggccatatgcctcttcacgggctattgaggtatggttggggcaacctttttccagaacccacagcatggagagccaagccttacagcgggtccagtaagccaagatgctgtgtgggccctcaggctcccagctttgtcctgctcaagctggagagatctgtgaccctgaacccagggtgtgggccctgatcatcctgcccgcctgaatggtatgtggtgcctccagggacccaagtgtgagattgcaggctggggtgagacccaaaggtacggggtaatgacacagtccctaaatgtggccttgctgaatgtcatctccaacccaggagtgtaacatcaagcaccgaggacgtgtgcgggagagtgagatgttgcactgaagggactgttggcccctgtgggggcctgtgagagtgactacgggggccccacttgcctgctttaccccacaactgctgggtccctggaaggaattataatccccaacgcgagtatgcgcaaggtcccgctggccagcgcgtcttcacacgtgtctctgtctgtgtttgtggactggattcacaaggtcatgagactgggttaggcccagcctttgacgccatatgctttgggggaggacaaaacttgtaagtacagtcaaggaccaagacttgtactcaaaagttgagattttaataaaaattaatattttttactacttcaccaagggactttccttaaatggaaaatgggtttttccccctaccaaggtaaaccaggtaattaaagaagagaattattcctagtgcagtttgttttcatggtcttaatttttgctaagactccactgtttttgccttaccaatacaagtgccaacacagtgaaaaggcaaatatcatcttagtattactctgaaaatagttctgagctaatggcctactgaaaggaaaagagtggctcctgctattctattagacttattacaattatcttaagtattctttctaccctcctttaattgaatggaaacaaggatggattggaagagctgtttttctcctttctttcccccggcaatatttaccatttaatgccacttactaacactcaaagaaacaaaaccaaacttctcaattgacagtgcagtgacccaacaaagacacgggttcttgaattcaaagtggagcaggagagacggtaaatacacatttactttaatatatatatatttattatttatgtgtttaaagcacaaattagtttggtaaaaaacatctcatgtctgttttatttccacatccctgagactgacaatgggatgcctatcaattaattcatttagagagccatacaccacaagaaacaaattatttgtcctctggagcttgtcacagggggatttttaaaaaaccattaaacagaaagacaactgtgcatcttagaaagataaaaggccaattcttcctctccggctgataggttcttaataatagtgatatctactaataaggtattttacatagtgtaaagcatgttcacatacaaattacttagcctctttgagcctcagttttcttaaatgtaaaactggattaatagtacattttgtgtttaaaaagataatgtatatgaagtgtttaccatttttgcttggcatctagttcagttctcagtaactgatgtggtggtggtggtggtcatagtagcagtaagatcccgtagtaatagtagcagcagttgttttagaaattagtaactgaggcctggcaaagttaaaggctcttttcattaacacccagagggaaagaaatgaagctggtcttcagaggcaggctattttcactctgtgtcccaatttttcccccctagaccatttttatacttctggggcctcagaaaatattctcagctattctgttagattcatctcctaccatctgagagggggcttccttcaaacaaccaaatttccaggtatttctaaactgcccttcccctacaccattctttgattcagtatttcaagacccctaagagaaatggtacatttacatgtaagcacaggatagtgaagtatttacaacaagtgctttggagccagcaaatatgaatcagaatccagctttcctttcctacatacatgacattgggcagctaatttctaagatttttacttctttatctatgaaagtggagtactagtacttgctctgtgcaactgtgatggttgttacatgaggtagcatctagaagcagcttgcacattgccagacacccagtggaaggtcaatgaatgactatttgaggactaactattacagaaatgtttactcttctgagtcctgatttctagtctcctggactaaataggttcactgttttcctcccggttcagtttccagacacatcacagaattataagaatattaaaaactcaggcttatacctacacaggattttctataaccctctttctgctttgagctcctaaagctatttcatagaaaaatgaccttatttttaaatagagggggcagttgaaaatcagtgaatgggcctaccccctaatgatttttttctcagacctaattataataattagcattataaagtgctaattatctttggacacagaggacctgcacaccagagacagaggtccgcattaagtaaagtggatttcactttcttcagttgtgagatttctcttttttcttctttgtaatgatgcaaagatatatcttccaccaagcctcatttaaaagctttttccagttaagggaaactatctcttgggccatccacagccagactgcatatttgaggattatgggatattccaaagaaattgtctttcctttgtatattgtcataactttttgtggaaatgtttgttttatagttccaggccagcacctagaacctggctagattaaaaaactgcagaaatcatgagtttcttgtttggatgaaagagcacacctattaacaaatgatagacggctatcctactgtgagtcctgaaaactggtgatgtgattgttgaatgggttaggggtatagcagagaaactcagtgtgggctacatacaatttcagcttgaatcacacttaacagatcctctgttccaaccatttaaatttacaaagaagaaactaaggcacagaactacttgagaagagaagcagaattgaaaactagagctcctgattgttctcaaaataatt

SEQ ID NO: 133789 - DNA, 529 bp, Homo sapiens
gccgctcatctgcacctgggagctcatcaagcccggcacttgcagggtcacaggcgtctgattgatggtgctcagcgtggcattcttggctcccacactcgccctctggaccagcagcttcttatcccccagctgcatgccgttcagccccgcaatggcctgatccgtgacgttgatgtccacgtactcacagaaggcgtagcccttggagagccccgtggcactgtccttgaccaggttgaaggccttgaggggcccaaaggatgtcagcagctctttgacctggtcatcgttcaggtagttgggtaagcccccgatgaacagcttgtgggcagagtcggggaccacagtggacacaaccccaggcacatagacggaggggttctctgacatgccaggaagcggctggtagtcgtgaggcctgcggatctttagtgactggccctggaagatgatgccatcaaaggccatagcctggggtagtttcgtccacttgagcggaattcacaaaaggccaaattctttgtcc

SEQ ID NO: 133790 - DNA, 500 bp, Homo sapiens
gcggccgcggcggcggtggtgtacggcgctgtgcccgtcccgctcctgggcgcccacccgctgctgctcggcggcgcggggaccagcggggcgggaggctcgggcgccagcgtcccaggaaagacgttctgctgcggcatctgcgggcgcggcttcgggcgccgcgagaccctgaagcgccatgagcgcatccacacgggcgagaagccccaccagtgccccgtgtgtgggaagcgcttccgcgaatccttccacttgagcaagcatcacgtggtgcacacgcgcgagcggccctacaagtgcgagctctgcggcaaggtcttcggctacccgcagagcctcacccgccaccgccaggtgcaccggctccagctgccctgcgccctggccggggcagccggcctcccctccacccaaggcacaccgggggcctgtgggcccggggcctcgggcacgtctgcagggcccaccgatgggctgagctacgcctgctcggactg

SEQ ID NO: 133791 - DNA, 3432 bp, Homo sapiens
atggaccttcttgccttcgacgatggtagcaaactttttgttgctacgagggatctcaccccacaatatttcactttaaagagaaatggaaacaactctttgatctcggattctcagggggtgccacaggaaggggttggggagaggggagagggaaaggagtggggttgtgtccactgtggtccccgactctgccacaagctgttcatcgggggcttacccaactacctgaacgatgaccagtgccacgggctctccaagggctacgccttctgtgagtacgtggacatcaacgtcacggtcagacaggagaaggcggcggcggccgcggcggcggtggtgtacggcgctgtgcccgcccgctcctgggcgcccacccgctgctgctcggcggcgcggggaccagcgggcgggaggctcgggcgccagcgtcccaggaaagacgttctgctgcggatctgcgggcgcggcttcgggcgccgcgagaccctgaagcgccatgagccatccacacgggcgagaagccccaccagtgccccgtgtgtgggaagcgctccgcgaatccttccacttgagcaagcatcacgtggtgcacacgcgcgacggccctacaagtgcgagctctgcggcaaggtcttcggctacccgcagacctcacccgccaccgccagagaagccatacggctgcgacgcctgcggaagaccttcggcttcatcgagaacctcatgtggcacaagctggtccaccggccgcccccgagcgcctgctcccgcccgcacccggcggcctgcagccccggacggctccagcggcacggatgcggccagcgtgctggacaacgggctgcgggggaggtgggggcggccgtggcggcactggcaggggtgtctggggtgaggacgcaggcggggcggcggtggcaggtgctggcgggggtgccagtccggccccgagcgcttcagctgtgccacgtgcggccagagtttcaagcattcctgggcctcgtgactcacaagtacgtgcacctgatgctgctgctgccgccctcctgcgaggccgtggcgccacgtggctggaggaggagctgcagctgccccgagtgctgccgcgtgtgcagctctccagtgcggctgcagcgccaccgcgcgttgctttcgacgccggagtccttcgcatgcgcagccagcgcccgggcctcaagtgccccaggactggcgcagcccgcgagcccgcatcaggcttccagtgggccccgtgggcatgccagcctttcccacctccgcatctggcaaagcctggccttcgctgcgttcggtgtcgccacatgccttctggaaatatcacacctccccacctgcgatgcagccgtctggccctctgtgggcctcggttcccgcatgtgccccgtgaaagaacataccttccccaactatctggcagcgtctggccttctccggcctcggcctccccatttgctgggtggagaatcacggcccggccacatcgagccaatggctggtctctggacctcggtctccacatttgctcagccggcggaacatcccttctcccgccctctacctcggtgggtggccacggccgagaggcagcgacggcccagtggaaagaggacaaaccctttccccgcgtccccggcgccgccgcccggagctgcccggaagtctcggttccgcctgccggcgctctgccaggtgaagccctggggcctgcccgggacctctggccctgttcctcctggacctgagcaggcctgcctgcactgggtgtactggcggtggggaggcgcctgcacctgggcggccgccgagccctcggaagacaccctgtaccagtgcgactgcgggccttctttgcgtcggccgcggccctggccagtcacctggaggcccactcgggcccggccacctacggctgcggccactgcggggctctgtacgcggcgctggccgccttggaggagcaccggcgggtcagccacggtgagggcggcggggaggaggcggcgaccgccgcccgggaaagggaaccggcgtccggggaacccccgtctggctccggccgcggcaagaagatcttcggctgctccgagtgcgagaagctgttccgctcaccgcgagacctggagcggcacgtgctggtgcacactggcgagaagccgttcccgtgcctggagtgcggcaagttcttccgccacgagtgctacctcaagcgccaccggctgctgcacggcaccgagcggcccttcccttgccacatctgcggcaagggcttcatcacgctcagcaacctctccaggcacctgaagctgcaccggggcatggactgactgccaggctgcgtgcgccctgccctccacccagcctcctggactcggcctggaccaggggacctcgggactgcgcgtgaggccccggccctccaaatccaaatccagacgcaggccctgaaatgaggggaccctgactggagaggtggaggccaccgaaaaacccacaaaggccccggagctgggggaccacaaacaaacagggtccttagctggggcaggggagcccaaatctagggagagactcctgagcctgaggtccctggaatgagtgtgggtagccgtaagtccccaagacatggggactttgcagtgagcaatgggtctccacaagtacctctcatcttgagagccctaatactaaaagatgggcacccacccccaccaagggaagactgccccattccctgagagccatcattcctaacgaccttgatctggagaatgtggagggagcatgtccctgaattttcctagatccctccaaatgccacccaccagagtcactgggtgaccccagaaaatggacaaaagccgaaatctgcctttcccctttttcattccctgtgctgaaagagggaccagggtagatgccccctgccctcgaatcccccctccccgactgtggaatggatcgaccctaacgatcttccccgccccaaacactagaatagactggcctgaaatccccttgcccagtagaatggactgatctatgtgcacacacccccatcacatggaatgggctggtctaggctgtggcctgcccaccttccttagagtgaatagggcggacactcctctcttttcctgtagcgtgtggaccggtcccacgcaaatctttatcctgtgaactcatctgagtgggaggtggtggacactggggtttccttccctctctccgtagcatccgttggtctttctctccatctctgttggtttgtctgtctctgtcttcctcccaatccctaggggaagggggcatttggctagggggtgcccctgtgagcctcgaccttgccccctcgtccctctccccagtgtttccaggacccccaataaaccttagtcctgtcagtcgctg

SEQ ID NO: 133792 - DNA, 411 bp, Homo sapiens
agacgatacccctgaggagattctggcgcggatcggtagtgttaagtatgccctttctgggggaaactgggactcgatatctgacgcagctaaagacgtcgtgtccaagatgctccacgtggaccctcatcagcgcctgacggcgatgcaagtgctcaaacacccgtgggtggtcaacagagagtacctgtccccaaaccagctcagccgacaggacgtgcacctggtgaagggcgcgatggccgccacctactttgctctaaacagaacacctcacgccccgcggttggagcccgtgctgtcatccaacctggctcagcgcagaggcatgaagagactcacgtccacgcggctgtagcgggtgggaccctggccccagcgtcccctgccagcatcctcgtgggctcacaa

SEQ ID NO: 133793 - DNA, 3252 bp, Homo sapiens
gcagctggcgagtcacgctgccatctcactgtggccggggccgcccccctggcagattgcaggaccacactgccacctcgccgtggctggggccaccgcctgtccccagcatcgcctgctgcccctttctcatggctcttgggcagacactgggtgctttcgtccagagcaagtgtgagtggataatgggcagtctggccataccagccccctggaagctcacacaagcatggagaatggctcacctcgggccaagatcgcccttcaaaccgtgtctaagtgagttatcatcaagctttcgaggaggctcaacatgaagaagctacagtcagaattaattgcccagcctttatccagggagggcgctggatttagttgcctgcggagctggagccaggtagtctgaaaaccccgctgggcagaaggaaatacagtgggtacaaaatgtgaaatagatcctccaaagaagtacagccaacaagttgccacacctgtgcgtgtaccagggcctctgaactggaacagaaactgcagcaagattccacggcccctcactccctgccccaccgctttcccgaacagtagtgcctccgtgaatgggcacgcttctgcagtcggtgagctgagctactgactaaaggccattaagcgccatcccttctttgtgaccatagactggaacgtaagttgcatgccacagtccccaccaccgttcaaaccagcagtgggcaggcctgaggacaccttccactttgaccccgagttcacagcgcggacgcccacaggtgtgtgccacagtggttccctctataacgctcatcacctgtttagaggattcagctttgtggcctcaagcctgatccaggagccctcacagcaagatctgcacaaagtcccagttcacccaatcgtgcaggtaactgtgtttgcctgcagtgggttcaccgatggctacgagatcaaggaggacatcggggtgggctcctactcagtgtgcaagcgatgtgtgcataaagccacagacaccgagtatgccgtgaaggtaaggcaggcctgctgagtgagcagtctggtttttccagctgggacaggggctcctggcattggtgaatacgggtcagggaagctggttagcatcctgtgtgcacaggacagcccccacaacctgctgccccaacgaaaggttgagaagcccagcctcagcatccttgtgggtgagagcaggtctcatgtagataaaggccaggaggttgatattttggagatggggatggagtttttcttcttcattgagtttctggtgagtcctttagcaacaggatgatgcttccctatggcacgttccccctgcatgggttgttcactgtctgtgtgcacggccctgtgagggcagccactccagggcaacacacccacattcaagtaccagcaagtgacatggccacaggccaagccacccacacccacagcagtgttgtcgcctgagacagcaaacgtgacttcccctcaggagcaaaccagatgtttgctgaaagaccgctggctctaccctgtggtgagaaacagcagcactcgtgggccctcggaagagattgagatcctcctgcggtacggccagcacccgaacatcatcaccctcaaggatgtgagtggtccccgtgcaacagcatccctggtaatggagctgatgcgtggtggggagctcctggaccgcatcctccggcagagatacttctcggagcgcgaagccagtgacgtcctgtgcaccatcaccaagaccatggactacctccattcccagggggtaggagccatgcctggggcagcctttaacatcctgtacagggatgagtcggggagcccagaatccatccgagtctgcgacttcggctttgccaagcagctgcgcgcggggaacgggctgctcatgacaccctgctacacggccaatttcgtggccccggaggtgagcattccccgactgcagacccaggcgtgtgacatctggagtttggggatcctgttgtacaccatgctggcagggtaagcagtcacctcaaacaggtgtcacgatacccctgaggagattctggcgcggatcggcagtgggaagtatgccctttctgggggaaactgggactcgatatctgacgcagctaaagtgagtacatgtcccagcgttgctttggaccctcatcagcgcctgacggcgatgcaagtgctcaaacacccgtgggtggtcaacagagagtacctgtccccaaaccagctcagccgacaggacgtgcacctggtgaaggtaccggcaggcgacagtgaggacagagtggtgggaatgggatctaaacagaacacctcaggccccgcggctggagcccgtgctgtcatccaacctggctcagcgcagaggcatgaagagactcacgtccacgcggctgtagcgggtgggaccctggccccagcgtcccctatgactcctcatggggaggtgaagcagcatcacgaccactccaactcagagccctgtgcgtgggtgtgtgcaggtgggtgagctcatgcatatgtgtgtaagccaggggtccctggtgacccttgtggggcctttaaggtgaggagctggaggtgcagaggagactgctggatgaggcgacaaaggaaggtgaaagaaagggtgtggagcagctactatgttaaacaacaacaacaacttcagcagctcttgttcttcaagagaaaaatcgaaaactctgggctctttggtccagcatacaaagcccctgtgaccttggccacatcagctctctttggtgaatctctaggcacacccaccttaaaggtatgctctcacgctgtgctgtctgagcctcctgagggacacctgctggatatcacctatccacttccgcctcctgagggacccctgctggatatcacctatccacttccgcctcctgagggacccctgctggatatcacctatccacttccgcctcctgagggacccctgctggatatcacctatccacttctgcctcctgagggacccctgctggatatcacctatccacttctgcctcctgagggacccctgctggatatcacctatccacttccgcctcctgagggacccctgctggatatcacctatccacttctgcctcctgagggacccctgctgggtacatcagctcgttggctgggcgagtccgagagcagcattttgtgaagggcaggcaggacactggggtcccc

SEQ ID NO: 133794 - DNA, 1827 bp, Homo sapiens
cttaaattacccactacgttgtccagtcgccgcctcagctaccgccgctgccgccgccgccgccgccgccgccaccgccagtggtgagaccccgacctggcgggtcagcgctgggcgtgcgtgcgggcaggcgggggcgctgacgagaagcaggaagagggtgcagtgccggcgtgggcggccggccgaggcggaggcgcaggaagggggcggcgagtcgtgcgaggctgcccttctcactcagcattatggatccaagcctgttgagagaaagggagctgttcaaaaaacgagctctttctactcctgtagtagaaaaacgttcagcatcttctgaggtcatcatcatcatcggtcaaagaagaagaaaacaaaggtagaacaatggaggatcgtcaggctctaaacaaaattctgatcatagcaatggatcatttaacttgaaagcctttgtcaggaagctctgggatataagtttggtgttcttgctaaggattgtgaattacatgaaggacacgggcattcagcgaggagatacgcatcctctaaccttagatgaaattttcggatgaaacacaacatttagatattggactccagcagaaacaatggctaatgactgagggctttagtcaacaatcccaaaattgaagtaatagatgggaagtatgctttcaagcccaagtacaacgtgagagataagaaggccctacttatgctcattagatcagcatgaccagcgaggattaggaggaattcttttagaagacatagaagaagcactgcccaattcccagaaaagctgtcaaggctttggcgggaccagattccaatttgttaatccggccccgttaggaggaaaatacttttccttccaatgataagagctgtcagttttctgtgggatgaaggattttcaggaaactgtgggaggagtgtcaactggtagattcccatgggaccgaggagaaaattggaagaatatctggaagccgacagggtattttcttcccatgccagggaatctgggaccaaaggaaagtgggcccctattccaggaggaagggaaaaagccctgctttcaccaggaaaaagccgacgtttttaaggacttcattaacgaaccacttggcctggaactgctgaagggattaactctgaacattaacttccagcaaaataggggaaccagtttttgcccccctggaacaggagtttaccaggttacacaatccaagagtgttcttgctcgattgctcgggggtctgaaagacctgtccttccctatctggcttctttgcgggcttgaggagaggagcagttccagtttaacaaaaacaagtgccaaattacccaaactcaaaagccttatttgaagtagaatgggcctcatgggcaatgtgatgttcccctgttaaccttctgttagctcccctgggagaaaggcgctgagcgtggcatgcaggtgtctttgctgtgtttttctccacttctaaatggttcctggttcctttcttcctcgtttgttactttagagcaagtttgcccatagtcttgaatgcaatatttgtttattccaaaaagaacatatttataataaaatcactgtagaaggatttttaagatgttagtgaattctgtttcttttcattctcggaaatggcaggaagcagctccagtctctgatttccatgggtcacgtgctggggatgtgatgaagcctgcagtctgcactgtgttgctgagcacatggatttcaccactggaacacaggtgtgctgcttgttagcaagcagagcaataaagatgtgctggatgtcaaaaaaa

SEQ ID NO: 133795 - DNA, 1765 bp, Homo sapiens
cccctcaggtgtgcagcaacagatctcacacagaaaaaggcccaggctaacttccaactggggtgggccaaccctgcccccatgcctcctgccccatacttgtcacccgtctgttcctagacagagaaagcagtgaatccactttctaagctcgtgtcgacgggagtcagccctgccactcaggggccgcggggctgaagctctgccccgggctgccctccatccacacccaagacgggaacttgtgaccaacgaggacaacgtccgctgttacccactgatgtgccgggatcccttctgtctcccacgtggagctggaggggctgcgtgctggcctccttctgccatgccacacagcagagtgttatacaagcaaagaattttggctaaaatccaaaaaaacattacccagaaaaaaaggcaaactgtgagtgatacccaatcgtgtggttcttctgtgagaggacttggaagtcgctgggctgtccgagttgcggtctttcccttcttgtggtttggcttttaattttaatgtcccttttttctaccctttctctatttttgctaccgcgacatctcatcagatgaaaaagttaataaacagaatggcgactccgatgttgaggcaagatcaccatgtccaccaggataggcgctgagcccgtactggacttgagctcatccccattctcctcgtcggactctagagcgacaggcaaggatttctggggcggggagaaggtcaagtcccaacgcagccaaccggggctcggccccgcccagccgcaggctcgccagtttctgcacggcgggctccgcggaggaggccggcctgaagttctccttgttctgggccttggaccgcagtctctgcaccccgaagccccggtcctcggggcggtggtcgtcccccaagccccggcaggcgccgcccttgctgtagcgtcttttctgggggtgcgtctccatcctcagcaagggtttcatctccatccggtagttgctcagcttctcctcctgcagctccagcagcctggagcctccggggctgtggttgctggcccggtggtgggaagtccacgtgaacacggggggtgactccgtccgccgctcccgcggcttggggttcccgggctgcttgcggcccgaacctcgggtgcggaagtcatccacgagcaggccgccgcgcagggcaccgctgcggacacccctggagcccccggcctgctcctcgccccagctgctgcgggcgcagtccccggcccggccctccaggagcatctggatgtccccgccccgctcctcgtccaccgacacctgcctcgagaagtgggcgaccttgttcctggcggcgggcgcgggcggcggggtggccgcggggctggtggggaagctctgcagggggctgtcgtcgggggtcaggtcggagggagtggtgcccttgcggtacagctcggggctctcctgctgcaggggtgtcccggtggacagcacctcgatgtcgtcacaggaggtctgacgcttcggcctctggtactccagcccgttttcccggtgctggaaggaaggggagaactctttggcagtgatcctggcgatccgcgcctcctcctgggctttctgagctgctgtgagggctgccctcggcctttgcccgagagtgggaggtccaaggctccgcttccttctgggtccacaccgcttccttccgggcgcacaccgcttccttccgggcgcagcccctccacacgccgcagcccttcat

SEQ ID NO: 133796 - DNA, 2562 bp, Homo sapiens
atccgcggcagcagcggctgcttgagatctgtttctggggcctctggcggtggcggcctggggcggcgcgacggctggtgcgcaggtacacttgatgctgaagtactatgagccttcggaacttgtggagagactaccaaagttttgggttgttatggtccctttagttgggctcatacatttggggtggtacagaatcaaaagcaggccttgttttccaaatacctaaaaacgacgacattcctgagcaagattagtctgggacttttcaaatccttcagaagagccaaaatccaggggaagtagcaggcttgcaatcttcaggtaaaagaagcagcttttgaatctgagcttcatatccgaaagaagagatgaaaaaataccaagttggattaagaaagaacttggcttcttgtaagctggggatatcctttccataggtgtccatctttggaacatactttttgcagaggtcttgcaaagcagtcttgtaaaatttcagtctccaaagcaaacaaaaagagtattgaaagagtgaagtaaaataaatattttgggattactaatttgtcattaaatcattctatgctgattagcttcataaacattgaactttttgattttatagccacaatgctgcatattcatactttaattcctaaagaataatttttaatgttaaaacgtgataatgcaataaatagaaaaatgtggtttacaaaataaaaacggtcttcactagttaccacctgaagtaagatgtctcgtttggaagctaagaagccatcattgtgtaagagtgaaccactgacaactgagagagtcaggaccacactttctgtcttgaaaagaattgtaacatcatgctatggcccctcaggtaggctgaagcagctgcacaatggctttggaggttacgtgtgtacaacctcacagtcctcagctctgctcagtcaccttttggtcacacatcccattttaaagatcctgacagcctccatacagaatcatgtgtcaagcttcagtgattgtggcttattcacagctattctttgctgcaacctgattgaaaatgttcagagattaggcttgacacccaccactgtcattagattaaataaacatcttttgagtctttgcatcagttatctcaagtctgagacctgtggttgtcgaatcccagtggactttagtagtactcagatcctcctttgtttggtgcgtagtatattaacaagtaaacctgcctgtatgctcaccagaaaggaaacagagcatgtcagtgctttgatcctgagagcctttttgcttacaattccagaaaatgctgaaggccacatcattttaggaaagagtttaattgtacctttaaaaggtcaaagagttatagattccactgtattacctgggatactcattgaaatgtcagaagttcaattaatgaggctattacctatcaaaaaatcaactgccctcaaggtggcactcttttgtacaactttatccggagacacttcgtgacactggagaaggaactgtggtggtcagttatggggtttctcttgaaaatgcagtcttggaccagctgcttaacctaggaaggcagctaatcagtgaccacgtagatcttgtcctgtgccaaaaagttatacatccatctttgaagcagtttctcaatatgcatccgtattattgccatagacagaattgggagtgactctgatgggaacccctggacttaaaatggacaggaacacagcctattggatccctaggctcaatatgtcctaatagttatggaagtgtgaaagatgtgtgcactgcaaaatttggctccaaacatttttttcatcttattcctaatgaagcaacaatctgcagcttgcttctctgcaacagaaatgacactgcctgggatgagctgaagctcacgtgtcagacggcactgcatgtcctgcagttaacactcaaggaaccatgggctttgttgggaggtggctgtactgaaactcatttggctgcatatatcagacacaagactcacaacgacccagaaagcattctcaaagatgatgaatgtactcaaacagaacttcaattaattgctgaagcattttgcagtgccctagaatctgttgttggctctttagaacatgatggaggtgaaattctcaactgacatgaagtatggacacctttggtcagttcaggcagattctcccctggggttgctgaactggccagatttgctttcacagtgtggctgtggattatacaatagccaggaagaactcaactggtctttcttaaagaagcacacgtccgtccatttgtgccacaaagcttgcctttccacatgaagctgtgggctcagccaggcaacctgaccttggacttgtttggctgcaaagctttagtgggcctacaaggtggctgtagagacagccaatttgattttgggtcttttcatattgttattgaagataaaaactaagagaatagcatgttcgtattacaagagaaacaaataaactagtctgttggcaattgagaaaaaaaaaa

SEQ ID NO: 133797 - DNA, 652 bp, Homo sapiens
cttatgccaaagcctggcagagacacaacaaaaaaagagaattttagaccaatatccctgatgaacatcaatgcgaaaatcctcaataaaatactggcaaaccaaatccagcagcacatcaaaaagcttatcaaccatgatcaagttggcttcatccctgggatgcaaggctggttcaacatacacaaatcaataaatgtaattcatcacataaagagaaccaatgacaaaaaccacatgattatctcaatagatgcaggaaaggccttcaacaaaattcaacagtgcttcatgctaaaaactctcaataaactaaatattcatggagtgtatctcaaaataataagagctatttatgacaacccccagccaatatcatactgaatggggaaaaactggaagcattccctttgaaaactggcataagacaaggattccactcctacgcaacatagtgtggaagttctggccagggcaatcaggcaagagaaggaaataaagggtattcaatcaggaaatgaggaagtcaaattgtccctgtttgcagatgacatgattgtatatttagaaaaccccatcgtctcagcccaaaatctccttaagctgataagcaacttcagcaaagtctcaggatacaaaatcagtgtgcaaa

SEQ ID NO: 133798 - DNA, 834 bp, Homo sapiens
atgggagactttaacaccccactgtcaacattagacagatcaacaagacagaaagttaacaaggatatccaggagttgaactcagctctgtaccaagtggacctaatagacatctacagaactcttcaccccaaatcaacagaatatacattcttctcagcaccacaccacacttattccaaaattgaccacatagttggaagtaaggcactcctcagcaaatgtaaaagaacagaaattataacaaactgtctctcagaccacagtgcaatcaaactagaactcacgattaagaaactcactcaaaaccgctcaactacatggaaactgaacaacctgctcctgaatgactactggaaatacaaacaaccatcagagaataaacacctctacgcaaataaactagaaaacctagaagaaatggataaattccttgacacatacaccctcccaagactaaaccaggaagaagttgaatccctgaatagaccaataacacgctctgaaattgaggcaataactaatagcttaccaaccaaaaaagtccaggaccagatggattcacagccgaattctaccagagtgttggaagttctggccagggcaatcaggcaggagaaggaaataaagggtattcagttagtaaaagaggaagtcaaattgtccctgtttgcagatgacatgattgtttatctagaaaaccccatcgtctcagcccaaaatctccttaagctgataggcaacttcagcaaagtctcaggatacaaaatcatgtgcaaaaatcacaagcattcttatacaccaataacagacaaacagagagccaaatcatga

SEQ ID NO: 133799 - DNA, 1521 bp, Homo sapiens; identical to SEQ ID NO: 121176

SEQ ID NO: 133800 - DNA, 1461 bp, Homo sapiens; identical to SEQ ID NO: 122738

SEQ ID NO: 133801 - DNA, 3441 bp, Homo sapiens; identical to SEQ ID NO: 118068

SEQ ID NO: 133802 - DNA, 1821 bp, Homo sapiens
atggataaattcctcaacacaaacaccctcccaagactaaaccaggaagaagttgactctctgaatagaccaataacaggatctgaaattgtggcaatagtcaatagcttaccaaccaaaaagagtccaggaccagatggattcacagccgaattctaccagaggtacaaggaggaactgagaataaaatacctaggaatccaacttacaaaggatgtgaaggacctcttcaaggagaactacaaaccactgctcaaggaaataaaagaggataaaaacaaatggaagaacattccatgctcatgggtaggaagaatcaacatcatgaaaatggccatactgcccaaggtaatttatagattcaatgccatccccatcaagctaccaatgactttcttcatagaattggaaaaaactactttaaagttcatatggaaccaaaaaagagccctcatcgccaagtcaatcctaagccaaatgaacagagctggaggcatcatgctccctgacttcaaactatactacatggctacagtaaccaaaacagcatggtactggtaccaaaacagagatatagatcaatggaacagaacagagccctcagaaataacgccgcatatctacaactatctgatctttgacaaaccggagaaaaacaagaaatggggaaaggattccctatttaataaatggtgctgggaaaactggctagccatatgtagaaagctgaaactggatcccttccttacaccttacacaaaaattaattcaagatggattaaagacttaaacgttagacctaaaaccataaaaaccctagaagaaaacctaggcattaccattcaggacacaggcatgggcaaggacttcatgtctaaaacaccaaaagcaatggcaacaaaagccaaaattgacaaatgggatctcattaaactaaagagcttctgcacagcaaaagaaactaccattagagtgaacaggcaacctacaaaatgggagaaaattttcgcaacctactcatctgacaaagggctaatatccagaatctacaatgaactcaaacaaatttacaagaaaaaaacaaacaaccccatcaaaaagtgggcaaaggacatgaacagacacttctcaaaagaagacatttatgcagccaaaaaacacatgaaaaaatgctcaccatcactggccatcagagaaatgcaaatcaaaaccacaatgagataccacctcacgccagttagaatggcaatcattaaaaagtcaggaaacaacagagccggtaggtgccaggaacagtcaggagcccagccccctaccgagttaatggggtgggagccccgtgctcccaagtgcagctgcagccgcctagccctggctcatgacccaagcatcccggcactctcagactttggcactgacaaggagggagaccaagtgttggaagttctggccagggcaatcaggcaggagaaggaaataaagggtattcaattaggaaaagaggaagtcaaattggccctgtttgcagatgacatgattgtatatctagaaaaccccatcatctcagcccaaaagctccttaagctgatagacaacttcagcaaagtctcaggatacaaaatcaatgtgcaaaaatcacaagcattcttatataccaataacagacaaacagagagccaaatcatgagtgaacttccattcataattgcttcaaagagaataaaatacctaggaatccaccttacaagggatgtgaaggacctcttcaagaagaactacaaaccactgctcaatgaaataaaagtggatacaaacaaatga

SEQ ID NO: 133803 - DNA, 1725 bp, Homo sapiens; identical to SEQ ID NO: 121179

SEQ ID NO: 133804 - DNA, 1719 bp, Homo sapiens; identical to SEQ ID NO: 119497
  misc_feature (1)...(1719): n = a,t,c or g

SEQ ID NO: 133805 - DNA, 2133 bp, Homo sapiens; identical to SEQ ID NO: 117579

SEQ ID NO: 133806 - DNA, 1317 bp, Homo sapiens
atgggagactttaacaccccactgccaacattagacagatcaacgagacagaaagtcaacaaggatacccaggaattgaactcagatctgcaccaagtggacctaatagacatctacagaactctccaccccaaatcaacagaatatacattcttttcagcaccacaccacacctattccaaaattgaccacatacttggacgtaaagctttcctcagcaaatgtaaaagaatagaaattataacaacgtgtctctcagaccacagtacaatcaaactagaactcaggattaagaaactcactcaaaaccactcaactacatggaaactgaacaacctgctcctgaatgactactggttacataacgaaatgaaggcagaaataaagatgttctttgaaaccaatgagaacaaagacacaacataccagaatctctgggacacattcaaagcagtgtgtagagggaaatttatagcactaaatgcccacaagacaaagcaggaaagatccaaaattgacaccctaacatcacaattaaaagaactacaaaagcaagagaaaacacattcaaaagctagcagaaggcaaaaaataactaaactcagagcagaactgaagggactagagatacagaaaacccttcaaaaaattaatgaatccaggcgctggttttttgaaagactaaacaaggaagaagttgaatctctgaatgggccaacaacaggctctgaaatcatggcagtaatcaatagcttaacaacaaaaaagagtccaggaccagatggattcacagccgaattctaccagaggtacaaggaggaactgcatataaacagaaccaaagacaaaaaccacatgattatcttaatagatgcagaaaaggcctttgatgaaattcaacaactcttcctgctaaaaactctcaataaagtagtgttggaagttctggccagggcaattaggcaggagaaggaagtaaaggttattcaattaggaaaagaagaagtcaaattgtccctgtttgcagatgacatgattgtatttctagaaaaccccattgtctcagcccaaaatctccttaagctgataagcaacttcagcaaagtctcaggatacaaaatgaatgtacaaaaatcacaaacattcttatacaccaataacagaccaacagagagccaaatcgtgagtgaactcccattcataattgcttcaaagagaataatatacctaggaatccaacttacaagggacgtgaaggacctcttcaaggagaactacaaaccactgctcaatgaaattaaagaggatacaaagtaa

SEQ ID NO: 133807 - DNA, 2001 bp, Homo sapiens
atggtaaagggatcaattcaacaagaggagctaactatcctacatatttatgcacccaatacaggagcacccagattcataaagcaagtcctcagtgacctacaaagagacttagactcccacacattaataatgggagactttaacaccccactgtcaacattagacagatcaatgagacagaaagtcaacaaggatacccaggaattgaactcagctctgcaccaagcagccctaatagacatctacagaactttccaccccaaatcaacagaatatacatttttttcagcaccacaccacacctattccaaaattgaccacatagttggaagtaaagctctcctcaacaaatgtaaaagaacagaaattataacaaactatctctcagaccacagtgcaatcaaactagaactcaggattaagaatctcactcaaagccgctcaactacatggaaactgaacaacctgctcctgaatgactactgggtacataacgaaatgaaggcagaaataaagatgttctttgaaaccaacgagaacaaagacaccacataccagaatctctgggacgcattcaaagcaaccgctagcaagactaataaagaaaaaaagagagaagaatcaaatagaccaataaaaaatgataaaggggatatcaccaccgatcccacagaaatacaaactaccatcagagaatactacaaacacctctacgcaaataaactagaaaatctagaagaaatggatacattcctcgacacatacactctcccaagactaaaccaggaagaagttgaatctctgaatagaccaataacaggctctgaaattgtggcaataatcaatagtttaccaaccaaaaagagtccaggaccagatggattcacagccgaattctaccagaggtacaaggaggaactggtaccattccttctgaaactattccaatcaatagaaaaagagggaatcctccctaactcattttatgaggccagcatcattctgataccaaagccgggcagagacacaaccaaaaaagagaattttagaccaatatccttgatgaacattgatgcaaaaatcctcaataaaatactggcaaaccgaatccagcagcacatcaaaaagcttatccaccatgatcaagtgggcttcatccctgggatgcaaggctggttcaatatacgcaaatcaataaatgtaatccagcatataaacagagccaaagacaaaaaccacatgattatctcaatagatgcagaaaaagcctttgacaaaattcaacaacccttcatgctaaaaactctcaataaattagtgttggaagttctggccagggcaatcaggcaggagaaagatataaagggtattcaattaggaaaagaggaagtcaaattgtccctgtttgcagatgacatgattgtatatctagaaaaccccattgtctcagcccaaaatctccttaagctgataagcaaattcagcaaagtctcaggatacaaaatccatgtgctaaaatcacaagcattcttatacaccaataacagacaaacagagagccaaatcatgagggaactcccattcacaattgcttcaaagagaataaaatacctaggaatccaacttacaagggatgtgaaggacctcttcaaggagaactacaaaccactgctcaacgaaataaaagaggacacaaacaaatggaagaacattccatgctcatggataggaagaatcaatatcatgaggagatcctcgagtgcaccgtcgggatgtcacctttgtccaccctccttgtaccttcattccccaaatgtggaactaaagcaagcgagttttagtgtagctggctttcagtggaagcttgggattacagcgcccacgcagccgagaggagtgggtgatgacttcgtgacctcaacgtctcccccgtccctcgacatgttcccgcgcctgaaaggtgcagaaaactccccccaccgctctggacgagactga

SEQ ID NO: 133808 - DNA, 3291 bp, Homo sapiens
atggataaattcctcgacacatacactctcccaagactaaaccaggaagaagttgaatctctgaatagaccaataacaggagctgaaattgtggcaataatcaataccttaccaaccaaaaagagtccaggaccagatggattcacagccgaattctaccacaggtacaaggaggaactggtaccattccttctgaaactattccaatcaatagaaaaagagggaatcctccctaactcattttatgaggccagcatcatcctgataccaaagactggcagagacacaatcaaaaaagagaattttagaccaatatccttgatgaacattgatgcaaaaatcctcaataaaatattggcaaaccaaattcagcagcacatcaaaaagcttatccaccatgatcaagtgggcttcatcccggggatggaaggctggttcaatatacgcaaatcaataaatgtaatccagcatataaacagagccaaagacaaaaaccacatgattatctcaatagatgcagaaaaggcctttgacaaaattcaacaacccttcatgctaaaaactctcaataaattagtgttggaagttctggccagggcaattaggcaggagaaggaaataaagggcattcaattaggaaaagaggaagtcaaattgtccctgtttgcagacgacatgattgtatatctagaaaaccccactgactcagcccaaaatctccttaagctgataaggaacttcagcaaagtctcaggatacaaaatcaatgtacaaaaatcacaagcattcttatacatcaacaacagacaaacagagagccaaatcatgagtgaactcccattcacaattgcttcaaagagaataaaatacctaggaatccaacttataagggacatgaaggacctcttcaaggagaactacaaaccactgctcaaggaaataaacgaggatacaaacaaatggaagaacattccatgctcatgggtaggaagaatcaatatcgtgaaaatggccatactgcccaaggtaatttatagattcaatgccatccccatcaagctaccaatgactttcttcacagaattggaaaaaactgctttaaagttcatatggaaccaaaaaagagcccgcatcgccaagtcaatcctaagccaaaagaacaaagctggaggcatcacactacctgacttcaaactatactacaaggctacagtaacaaaaacagcatggtactggtaccaaaacagagatatagatcaatggaacagaacagagccctcagaaatagcgccgcgtatctacaactatctgatctttgacaaacctgagaaaaacaagcaatggggaaaggattccttatttaataaatggtgctgggaaaactggctagccatatgtagaaagctgaaactggatccctttcttacaccttatacaaaaatcaattcaagatggattaaagacttaaacgttagacctaaaaccataaaaaccctggaagaaaacctaggctttaccattcaggacataggcatgggcaaggacttcatgtctaaaacaccaaaaggaacggcaacaaaacccaaaatttacaaatgggatctaattaaactaaagagcttctgcacagcaaaagaaactatcatcagagtgaacaggcaacctacaaaatgggagaaaattttcacaacctactcatctgacaaggggctaatatccagaatctacaatgaactccaacaaatttacaagaaaaaaacaaacaaccccatcaaaaagtgggtgaaggacatgaacagacaattctcaaaagaagacatttatgcagccagaaaacacatgaaaaaatgctcaccatcactggctatcagagaaatgcaaatcaaaaccacaatgagataccatctcacaccagttagaatggcaatcattaaaaagtcaggaaacaacagactaacccaggaagaagttgaatctctgaatagatcaataacaggagctgaaattgaggcaataatcaatagcttccaaccaaaaagagtccaggacccgatggattcacagccgaattctaccacagagaataaaatacctaggaatccaacttacaagggatgtgaaggacctcttcaaggagaactacaaaccactgctcaaggaaataaacgaggatacaaacaatggaagaacattccatgctcatgggtaggaagaatcaatatcgtgaaaatggccatactgcccaaggtaatttatagattcaatgccatccccatcaagctaccaatgactttcttcacagaattggaaaaaactgctttaaagttcatatggaaccaaaaaagagcccgcattgccaagtcaatcctaagccaaaagaacaaagctggaggcatcacactacctgacttcaaactatactacaaggctacagtaaccaaaacagcatggtactggtaccaaaacagagatatagatcaatggaacagaacagagcgctcagaaataacgccacatatctataactatctgatctttgacaaacctgagaaaaacaagcaatggggaaaggattccttatttaataaatggtgctgggaaaactggctagccatatgtagaaagctgaaacaggatcccttccttacaccttatacaaaaatcaattcaagatggattaaagacttaaatgttagacctaaaaccataaaaaccctagaagaaaacctaggctttaccattcaggacataggcatgggcaaggacttcatgtctaaaacaccaaaagcaatgacaacaaaagccaaaattgacaaatgggatctaattaaactaaagagcttctgcacagcaaaagaaactaccatcagagtgaacaggcaacctacaaaatgggagaaaattttcacaacctactcatctgacaaggggctaatatccagaatctacaatgaactcagacaaatttaccagaaaaaaacaaccccatcaaaaaaaaaccaaaaccaagaatacagttccaagattatcaccagcagtatccctgaactcaaatatgaagtggacgtagttcttggggccatagaaagggggaaaaaaaagcagaaggtagaagaattggactaccatgtccaaaacactcctcctccaaaactgctcagcatcaagctcgggaaaatttccttcccaactcatggtttctacaatgaaaagagtgagattgagacagacaaccagcctctccatcatcgtcaattccctggcaggagacagatcaattggaaacaataa

SEQ ID NO: 133809 - DNA, 1296 bp, Homo sapiens
atgttggaagttctggcctgggcagttaggcaggagaaggaaataaagggtattcaactaggaaaagaggaagtcaaattgtccctgtttgcagacaacatgactgtatatctggaaaaccccatcgtctcagcccaaaatctccttaagctgataagcaacttcagcaaagtctcaggatacaaagtcagtggacaaaaatcacaagcattattatacaccaataacagacaaacagagagccaaatcatgagtgaactcccattcacaattgcttcaaagagaataaaatacctaggaatccaccttacaagggatgtgaaggacctcttcaaggagaactacaaaccactgctcaaggaaataaaaaaggatacaaacaaatggaagaacattccatgctcatgggtaggaagaatcaatatcgtgaaaatggccatactgcccaaggacatcatccaggagaacttccccaatctagcaaggcaggccaacattcagattcaggaaatacggaaaacaccacaaagatattcctcgagaagagcaactccaagacacataattgtcagattcaccaaagttgaaatgaaggaaaaaatgttaagggccgccagagagaaagcatcacaccacacctattccaaaattgaccccatacttggaagtaaacctctcctcagcaaatgtaaaagaacagaaattataacaaactatctctcagaccacagtgcaatcaaactagaattcaggattaagaatctcactcaaaactgctcaactacgtggaaaccaaacaacctgctcctgaacgactactgggtacataacgaaatgaaggcagaaataaagatgttctttgaaaccaacgagaacaaagacacaacataccagaatctctgggacacattcaaagcagtgtgtagagggaaatttatagcaacaaatgcccataagaggaagcaggaaagatccaaagttgacaccctaacatcacagttaaaagaactagaaaagcaagagcaaacacattcaaaagctagcagaaggcaagaaataactaaaatcagagcagaactgaaggaaatagagacacagaaaacccttcaaaaaattaatgaatccaggagctggttttttgaaaggatcaacaaacttgacagacctctagcaagactagtaaagaaaaaaagagagaagaatcaaatagatgcaataaaaaatgataaaggggatatcaccaccaatcccacagaaatacaaactaccatcagagattattacaaacacctctag

SEQ ID NO: 133810 - DNA, 490 bp, Homo sapiens
acactcagcactgtgcattctgaagagtgggcctaaaagtactttaccatctcatagagaagagttctttcctagcagggtgtattgccaagccctctctgctttgtccttccctccatggtttgttaaccagcaggaatgctttttttttattattatactttaagttttagggcacatgtgcacaatgtaccggttagttacatatgtatacctgtgcaatgctggtgtgctgcacccattaactcgtcatttagcattaggtatatctcctaattgttttagcagtcttatacaccaataacagacaaacagagagccaaatcatgagtgaactcccgttcacaattgcttcaaagagaataaaatacctaggaatccaacttaacaagggatgtgaaggacctcttcaaggacaactacataccactggctcaaggaaatatgagaggacacaagcaaatggaagagcattccatgctcatggata

SEQ ID NO: 133811 - DNA, 1848 bp, Homo sapiens; identical to SEQ ID NO: 128387

SEQ ID NO: 133812 - DNA, 3147 bp, Homo sapiens; identical to SEQ ID NO: 124344

SEQ ID NO: 133813 - DNA, 1743 bp, Homo sapiens; identical to SEQ ID NO: 122766

SEQ ID NO: 133814 - DNA, 1500 bp, Homo sapiens; identical to SEQ ID NO: 118321

SEQ ID NO: 133815 - DNA, 3195 bp, Homo sapiens; identical to SEQ ID NO: 118082

SEQ ID NO: 133816 - DNA, 6143 bp, Homo sapiens
agaattcattgttctagcattcaggaagtgtctatatagggtgtggaggaaaaaaaaggagatgtgggacatttcagagcagacactgcccagactagatcttttatccttccatgcacatgcacatgtacaccttagttccattataagcttttggtgaaaaaagtaaagcattttattgaaaaagcctcacagttctgactctttgtcattttcatccaggtagtattcatcatctgtggttgtgtctgtgtcacaatctgagtccactgggtcatcctcatagatattaagcggttcacttggagataagccatcttctggcacctgactactgggagaatttgagcttaatgactctgaggggttgggagggttcctcaaatcatcttttaggaagccagggttcttaagaaaacttggtttccataatcttccttgtgtaagtgacctctttacattttctaagaaagctaactgttgttctttcccaaagatcccatagtcgataggtctgtatatagatattgcagacctgggacctgtttttgtcccgctgcgataagcccaactttcatttccatcacaggaggggagttcagaaaaagatctgaatcttcgactgtacccattgttgacagagaattcattcccaagggtcagtcgactcagggcattgtcaatagaagtgctttcagaaaaatggcgctccctgacttttggaggatggctttttcgtagtagatcgccatgaacattaatgctttttaaactctttgaacgatagaggtgtggctcaggttcccactccagagatgaagcactcctttgttgctgcagaaaactggccagtggactgcttactctagatttctgtgcaggctccagtggaaaaggagggctcagcctcctctgattgtcagagaattctgcttccctgaggctggtgaatgtgatgggtgatggggctcctgattctcttactaaattctgagctgctgtgacgtctttagaattctcatgctttgatggtgattctgagacgtttttaaactcattctgatgtcgttgtgaaatgctgttagacttctggttgctgacgtgtgtagaaggttctctgttgggtagtacagtaatggggagaaggttctcggatttcttcacatgctttctgttctcactcaacctgctttcgccaatggactctgcagattttggagtaggctcagggaacagtgggttgcactccactgtgccaagagataaatggtcaaagccagatctgcttccactttgggggaagatagtagctacatgtcttctggggcttacatctttagctgggaattttctgctggctttagacatggctgccaatctgtgtttaactgaagatctattttccccctttactaggtcatccaagttggttttatttttgtttccttcaggaagtgaaggttgatcccaagctgacttctgcatttcatcttcagccttcctgctctctgtcatatttgcctcctgacttctttgaggtaattctcttggttcagactgcagactctctaagtttggttcatctgactgagtctcctcaccaagctgtagtttatgcaatgctggagtaagggcaaagacttgactctctgagtgagaaagtgttttattagtcattttttggcagttggttccaatgtcccctctgccttccctaggctgtgatccactggagccatcacctacagctgtggatgtgtgatctttctggggacacttgccacttccagtaaatggaatggctctaccactccctgtacactcccaagaacttcttctagtttgggaatttccaatattaacttctgaaagagctggaagactagagggaccactgttacttgaattaatggattgttgacaattttcagatttttcttcggatacattttttctctgaagcatcaatgaagtatgcagggtttcactttgcaactttttgcctctttccttcttgttttctgaatcacctagaggtgttttagctaaattatctgaaaaaatctctctagctttagattcctcttcaggaagagaaacagctgcctcaacagaagccatttcctgtaatgtaggagctaggggccccctatttgataatcggaaggcagtcatattttcagtggtgagcgtctgatcagagttgacggacatctttagattttcacatgaaggtgttcctgactgctctcgtgtagaataattctgtttgtctttttctaaagcgttaggaaatgtttcagtctccacttgaggtgattctataagtaaattagtattttgtgtatactgttgaaggaggttacagaattttttgctgggtttcctcggtagagtgtaatatattgagaccacctccagacattttacattatcttcatcaccagaaacagaaaacgtactagtcgtcttaactttatgtaatgttttcccacgttcttttcctgacaagtctgagcaaaaaggtaaagggtcttcatttgaaagagcaaatacacttctcctggaggcagccattttaccctctttctcagtgtattcttggaagttttccttttggtgttgtcttttggttaaagaacaatctctaacagatgagtcactttccacagggctaatgattctctcccaagcccttggtgttagctcagaagcatccatgcctgaggtcaatggcttttttcttccttctcttccagttgaggcatgtggctcccctgagggacatgacatagccctgttgatgaggaatggaagtggtccttttctaacggaagtagatccactgctttttacatttgtcattctctctgtggcttcaggtgcttccagggctgagtctgaaaggactttggaacattcattcgctgactcaggagaactgggactaaatttgtttaacatatagttccccattgcatcttccacattatttttgatttggaagggaggtggcccattcctcaatgaagcagccattattttacttcctgactgcctgccatgtatgagaaaactgcttgattttcttggcaaggtacaataaattgtgtcaagttcagaaactttggaattgctttgatttgcttcaatgaggctcctgtgatcactggtgggtactgatatactttctgttttgcttaacttttcaatacaggatatatgatgccttatttttccttttcctctttcattcctaaaaggagagtgtgaatggcatttgacatcaaccacttcatcatgtgtaggcacaggactatcatttctctcttggttttctgagtggcttacaataaactgattcttttggttcttcccagcattgtctttttcttctctttctcctagcgatggatctttgtctgaaggacttctcctggagaacactgtagtagatggaaccacaggagcatcaagggaagaattctttgatggtgaggaatctggtagtgcagctgatgacagatctaaagaatcacacgaggtcttgtggccaggagttaacttgcattttgagtattgtgcattttgagtatcagtcagtgcagagctccagtggttatttgtaataattcttgaaatatcttcattatttacagttaattcctggtgacaaccttggtctgtcctggggaaagatggtggtgttctgtgttcctgaatgaaaggaagggaagctgttgagccaagttttctgttttcagtaaacctcttatcttgtttaatgtcattggatttatctgtgtgcggtatatacattttggaggtatctttcctggaaaagactctgggtgacttttttgaacttattatggtagatgcattaaaaccaaacccgttgctcttggctgagtcctgggataagggattttgaaaatcaggtaaagagtttgagatccctgtctgtgaaacaggttggggtatttcacctgccttgtttgtctggtccatcttgcttagctgtttgtcttcttctgaaatagattcatttaagtctttctcattatttacttctgtgaccaagatattgggctggcttttggcaagaggcagagagtcaactgaattgctgttggtcacagtgacttctgtatggcttctcattggatgagaggcaggcttatttggaaaaattttctgcaaagtgactgtgggattctgcaagttgggactctgaggattccttctgtcatcagaaatctgggaaaaggaagttttgaatgaggatgctagagtctgagcaattccaaatgaggaagcttctttgtttatatgtacttctacaggagaactgtcctgttgacttaccaactcactagatttgacgtgatagcttgaaccagtcatggagcaaacatttggtgtgccaaaatgaggagtcaactgggtctcattaccatgtgataccaccatgctatccagtgtggatctctgaaaatcaaactgccaaggatgtggctcttcttggcctctggaaacatctgttccataaccagaagaaaatgattcccagtgttcagaagaaacattatggccatgaatggctgatacactatttgcttccatggaaatcatttcaaagtctctgtcagaagaactgaatgatttcctgcttcgatgaaagtcagaccagaaagaatgtcctttctcttggccccaaaaaggaccttgtccaaatctcctctgttctccgcttcgtccaaaggtattgctgaagaaagatctggtaaatgtgttgctttgatggtagaatggcatgttctctgagttctcaaaagtgtcgggactcattgcattctccatgggagcatttaaactaacacgttggtaaacattctgtgaatggtacgattcatatctcttattctcctgaaaacccctgggatacacatacttgtcagcgggatcaatttccattggtgatggtgccctcaggaactcttcctggttctccctgtctctagaggaatctgatctgttccatatgatggatgataaaggagttctctttggactctgctggtgccttggtggtataaacccactcttgctctgagttgtggctggaaaatgtaagcttcttgctgtgaaatgccctgtggctggtaaggccgaccgttgcctgctgtcaaaacacagcgaagtactgccaaaagtattcttttgcacataatcttctttaaagactctgggctcccttgtcctatacatatcataaattgtgcttgtcctaggagaaaaggttttaaaaccttccctaggagttcctggtcttaggatgtcatagatagacatattggaagtttcattatagtgttttttgtgcctttctgtgatattaccatgtctgttaccactggaataaaagtgaccgaactgtgttcttgatccatagttgaggggtgttctggtattcactgagcttgcagactgttcctgagccaatttgctatccaagtcatctaaaacttggaaaaactcattctccagcagtgaagcatcccacggtggaggcatgccactctcctccctcatgactgctggctttgggacaaatgtactgtcaactagatgattttccagaggtgaattgtatatttttgcctgcacagcagctcccctcacaggcataggaggtcctgcatggccatcacatcctttctgtcccagtgatggaagctttgaagtctcctttccagatttcctgaatgagaacagggaagcaaatgacgatctgaagctcatccgggaagaaaaaggtgtcggctttttttgattagttacatttttagatcttgatgtaggtaattctatcggatcattttttgccatctccttacttagcctgtatgtaagtggttgttttaacatttggctaacatctgtttcattgcaaaacttttttctttgaatttcttcaaaccattcaccagtcactccctgaagccatctgatatccctctttgtcttctgaagtttgctgatcctgtccttctcggccctctgtaactcctcattcctttccagcacctgaaggatcttcctggcctcttcgtcatttaagaaacttaatgacatgtttc

SEQ ID NO: 133817 - DNA, 3214 bp, Homo sapiens
atggtaaagggatcaattcaacaagaagagctaactatcttaaatatatatgcacctaatacaggagcactcagattcataaagcaagtccttagagacctacaaagagacttagactcccacacaataataatgggagattttcacaccccactgtcaacattagacagatcaacaagacagaaggttaacaaggatatccaggaattgaactcagctctgcaccaagaggacctaatagacatctacagaactctccaccccaaatcaacagaatatacatttttttcagcaccacaccacacctattccaaaattgaccacatagttggaagtaaagctctcctcagcaaatgtaaaagaacagaaattataacaaactgtctctcagaccacagtgcaatcaaactagaactcaggattaagaatctcactcaaaaccgctcaactacatggaaactgaacaacctgctcctgaatgactactgggtacataacgaaatgaaggcagaaataaagatgttctttgaaaccaacgagaacaaagacactacataccagaatctctgggacacattcaaagcagtgtgtagagggaaatttatagcactaaatgcccacaagagaaagcaggaaagatctaaaattgacaccctaacatcacaattaaaagaactagagaagcaagagcaaacacattcaaaagctagcagaaggcaagaaataactaaaatcagagcagaactgaaggaaatagagacacaaaaaacccttcaaaacattaatgaatccaggagctggttttttgaaaggatcaacaaaattgatagaccactagcaagactaataaagaaaaaaagagagaagaatcaaatagatgcaataaaaaatgataaaggggatatcaccaccgatcccacagaaatacaaactaccatcagagaatactacaaacacctctatgcaaataaactagaaaatctagaagaaatggataaattcctcaacacatacactctcccaacactaaaccaggaagaagttgaatctctgaatagaccaataacaggagctgaaattgtggcaataatcaatagcttaccaaccaaaaagagtccaggaccagatggattcacagccgaattctaccagaggtacaaggaggaactggtaccattccttctgaaaccattccaatcaatagaaaaagagggaatcctccctaactcattttatgaggccagcatcattctgataccaaagccgggcagagacacaacaaaaaaagagaattttagaccaatatccttgatgaacattgatgcaaaaatcctcaataaaatactggcaaaacgaatccagcagcacatcaaaaatcttatccaccatgatcaagtgggcttcatccctgggatgcaaggctggttcaatatacgcaaatcaataaatgtaatccagcatataaacagagccaaagacaaaaaccacatgattatctcaatagatgcagaaaaagcctttgacaaaattcaacagcccttcatgctaaaaactctcaataaattagacgacatgattgtatatctagaaaaccccatcgtctcagcccaaaatctccttaagctgataagcaacttcagcaaagtctcaggatacaaaatcaatatacaaaaatcacaagcattcttatacaccaacaacagacaaacagagagccaaatcatgagtgaactcccattcacaattgcttcaaagagaataaaatacctaggaatccaacttacaagggatgtgaaggacctcttcaagggagaaccacaaaccactgctcaacgaaataaaagaggatacaaacaaatggaagaacattccatgctcatgggtaggaagaatcaatatcgtgaaaatggccatactgcccaaggtaatttacagattcaatgccatccccatcaagctaccaatgactttcttcacagaattggaaaaaactactttaaagttcatatggaaccaaaaaagagcccgcatcgccaagtcaatcctaagccaaaagaacaaagctggaggcatcacactacctgacttcaaactatactacaaggctacagtaaccaaaacagcatggtactggtaccaaaacagagatatagatcaatggaacagaacagagccctcagaaagaacgccgcatatctacaactatctgatctttgacaaacgtgagaaaaacaagcaatggggaaaggattccctgtttaataaatggtgctgggaaaactggctagccatatgtagaaagctgaaactggatcccttccttacaccttatacaaaaatcaattcaagatggattaaagacttaaacgttagacctaaaaccataaaaaccctagaagaaaacctaggctttaccattcaggacataggcatgggcaaggacttcatatctaaaacaccaaaagcaatggcaacaaaagccaaaattgacaaatgggatctaattaaactaaagagcttctgcacagcaaaagaaactaccatcagagtgaacaggcaacctacaaaatgggagaaaattttcgcaacctactcatctgacaaagggctaatatccagaatctacaatgaactcaaacaaatttacaagaaaaaaacaaacaaccccatcaaaaagtgggcgaaggacatgaacagacacttctcaaaagaagacatttatgcagccaaaaaacacatgaaaaaatgctcaccatcactggccatcagagaaatgcaaatcaaaaccacaatgagataccatctcacaccagttagaatggcaatcattaaaaagtcaggaaacaaccggtgctggagaggctgtggagaaataggaacacttttacactgttggtgggactgtaaactagttcaaccattgtggaaggcagtgtggcgattcctcagggatctagaactggaaataccatttgacccagccatcccattactgggtatatacccaaaggactataaatcatgctgctataaagacacatgcacacgcaggaaacagcttgactgtgcagagcccgtggagcccagaaaagtcggggatggggagtggtccctgaccaaatggacacgccctggctccagagctctgccctggcccccagagcaagccaagccttacccaccgaccctgccaactctagcccaggacttttag

SEQ ID NO: 133818 - DNA, 2610 bp, Homo sapiens
atgacaaatcactgtttcaagagacaatttcaaaagcatgagatgctgctgaaagaggattgtgaaccaggggacagctctttcattctgggagagcaacattgggagaatatgctctgtgagcccaaacagcatcctccccagcagggtgagggcagagctgcagggcaggcccagaacccactcaacacagacgtcagccctggagctggtgcaaaggagtctgaggagaaaatttaccagcatctgaattacacttatttcaaacaaaaatgcatgtcctgctctggattcaccttcagtagctatgctatgcactgggttcaccaggctccaggaaaaggtctggagtgggtatcagctattggtgctggtggtggcacatactatgcagactccgtgaagggccgattcaccatctccagagacaatgccaagaactccttgtatcttcaaatgaacagcctgagagccgaggacatggctgtgtattactgtgcaagagacacaattgatgcttacggagatgaaaagccctcaaccattgtcaccaggatcagagtattgaggaaactcagggatacctgccatatgggagaggctgataggactttcctctctcccattgctcagcaccctccagtgtgtcatgtggagactcacctgggaatgcaagtggccaacagtagtgaagaggatgagcttgtgtggtcaaaatgggatgtggatgtgaaatttatcctgtgctgtgcaaagtaccacagagagcagctgcaggagtcagccctggacctgaagagcctgcactgcccctctgcatcacctgcactgtttctggccactccatcacaaccagtccttactactgggcctggatctgccagctcccagggaggggctgaaatgggtgcccacttcctggtgcagctggtgcagtctggggctgagacccgggaatcctttgaccctgccctccctgaaatggagacacagaggacagatgagcaatgccgggcggtgcacccaggaccacaaaaagaaagacatggaaatatgtcccctcccctcctcatgaaaggcagctcatcccctgttccttcaggccccggtgaggagccatcccatagagagcctgtctctttcatctgtggcaggtgcatcctgctgacacttttacttggtgattgtttgtggggtgaaggggcttggacacagggggatgttctccaaccttctgaccgagcctccttcttagctatgggtgtcaacaccacagtacagcaggtgggtgacttgtctgggtatttccccaattctgtaggaaaagcctgcaagtgccgggagtttcacactctcacacccttagcacacacatcctcaacaactcatgaaacatttccaggtgcccagtgtgaggtgcagctggtggagtctgggggaggcttggtacagcctggggggtccctgagactgtcctgtccagactctggattcaccttcagtaaccactacatgagctgggtccgccaggctccagggaagggactggagtggatttcatacattagtggtgatagtggttacacaaactacgcagactctgtgaagggccgattcaccatctccagggacaacgccaataactcaccgtatctgcaaatgaacagcttgagagctgaggacacggctgtgtattactgtgtgaaacacacagcgaggggaaaactagagaagcaagagcaaacatattcaaaagctagcagaaggcaagaaataactaagatcagagcagaactgaaagagacagagacacaaaaaacccttcaaaaaatcaatgaatccaggagctggttttttgaaaagatctacaaaattgatagaccactagcaagactaataaagaagaaaagagagaaaaatcaaatagatgcaataaaaaatggtaaaggggatatcaccaccgatcccacagaaatacaaactaccctcagagaatactataaacacctctatgcaaataaactagaaaatctagaaggaatggataaattcctggacgcatacaccctcccaagactaaaccaggaagaagttgaatccctgaatagaccaataacaggccctgaaattgaggcaataattaatagactccaaccaaaaaaagtccaggaccagacagattcacagcggaattctaccagagtgtcggatgttctggccagggcaatcaggcagaagaaagaaataaagtgtattcaattaggaaaagaggaagtcaaattgtccctctttgcagatgacatgattgtatatttagaaatccccatcatctcagcccaaaatctccttaagctaataagcaacttcagcaaagtctcaggatacaaaatcagtgtgcaaaaatcacaagcattcttatacaccaataacagacaaacagagagccaaatcatgagtgaactcccattcacaattgcttcaaagagaataaaatacctaggaatccaacttacaagggatgtgaaggatctcttcaaggataactgcaaaccactgctcaacgaaataaaagaggatacaaacaaatggaagaacattccatgctcatga

SEQ ID NO: 133819 - DNA, 1254 bp, Homo sapiens
atgtgggactatgtgaaaagaccaaatctacgtctgattggtgtacctgaaagtgacggggagaatggaaccaagttggaagacactctgcaggatattatccaggagaacttccccaatctagcaaggcaggccaacattcaaactcaggaaatacagagaacgccacaaagatactcctcgagaagagcaactccaagacacataattgtcagattcactaaagctgtaatgaaggaaaaaatgttaagcgcagccagagagaaaggttgggttacccacaaggggaagcccatcagactaacagctgatctcttggcagaaagtctacaagccagaagagagtgggggccaatattcaatattcttaaaaaaaaagaactttcaacccagaatttcatatccagccaaactaagcttcaaaatctagaagaaatggataaattcctggacacatacactctcccaagactaaaccaggaagaagctgaatctccgaatagaccagtaacaggctctgaaattgtggcaataattaatgcttaccaaccaaaaaaagtccaggaccagatggattcacagccgaattctaccagagtgttgaaagttctggccagggcaatcaggcaggaaaaggaaataaagggcattcaattaggaaaagaggaactcaaattgtccctgtttgcagatgacatgattgtatactcagaaaaccccagcctctcagcccaaaatctcctgaagctgataggcaacttcagcaaagtctcaggatacaaaataaatgtacaaaaatcacaagcattcttatacaccaataacagacaaacagagagccaaatcatgagtgaactcctattcacaattgcttcaaagagaataaaatacctaggaatcaaacttacaagggatgtgaaggacctcttcaaggagaactacaaaccactgcttaatgaaataaaagaggatacaaacaaattgaagaacattccatgctcatggataggaacaatcaatatcgtgaaaatggccatactgcccaaggtaatttatagattcagtgccatccccatcaagctaccaatgactttcttcacagaattggaaaaaactactttaaagttcatatggaaccaaaaaacagcccacgttgccaagtcaatcctatgccaaaagaacaaagctggaggcatcatgctacctgtcttcaaactataccacaaggctacagtaaccaaaacagtatggtaa

SEQ ID NO: 133820 - DNA, 4116 bp, Homo sapiens
  misc_feature (1)...(4116): n = a,t,c or g
atggataaattccttgacacatacaccctcccaagattaaaccaggaagaagttgaatctctgaatagaccaataacagactttgaaattgaggcaataatcaatagcttaccaaccaaaaaaagtccaggaccagatggattcacagccgaattctaccagaggtacaaagaggagctggtaccattccttctgaaactattccaatcaatagaaaaagagggaatcctctctaactcattttatgaggccagcatcatcctgataccaaagcctggcagagacacaacaaaaaaagagaattttagaccaacatccttgatgaacatcgatgcaaaaatcctcaataaaatactggattcggcaaaccgaatccagcagcacatcaaaaagcttatccaacatgatcaagtgggcttcatccctgggttgcaaggctggttcaacatacgcaaatcaataaatgtaatccagcatataaacagaaccaaagacaaaaaccacatgattatctcaatagatgcagaaaaggcctttgacaaaactcaacaacccttcatgctaaaaactctcaataaattcggtgttgatgggacatatctcaaaataataagagctatctatgacaaacccacagccaatatcatattgaatgggccaaaactggaagcattccctttgaaaacgggcacaagacagggatgccctctctcaccactcctattcaacacagtgttggaagttctggccagggcaatcaggcaggagaaggaaataaaggcccaaaatctcctcaagctgataagcaacttcagcaaagtctcaggatacaaaatcaatgtacaaaaatcacaagcattcttatacaccaataacagacaaacaaagagccaaatcatgagtgaactcccattcacaattgcttcaaagagaataaaatacctaggaatccaacttacaagggatgtgaaggacctcttcaaggagaactacaaaccactgctcaatgaaataaaagaggatacaaatgaatggaagaacattccatgctcatgggtaggaagaatcaatatcatgaaaatggccatactgcccanagaattggaaaaaactgctttaaagttccaatggaaccaaaaaagagcccgtgtcgccaagtcaatcctaagccaaaagaacaaagctggaggcatcatgctacctgacttcaaactatactacaaggctacagtaaccaaaacagcatgtgtaacaggctctgggccagaaactctcaaaccaattgataataacaagctcaagttcaatgccattggctgtctgcagagccccagggtggacaaggagggccagctgtgtgcagcgtctgttgtgtacagcattcaggacaatgtcctcttggatcccgagctctccacacagacagagcagataaaggaagggcactgctgtgggaccgccttccccatgcccagcgagcctcttctgcatctctttctgctgtggcaaagtgggttaaacagcgcgcggatttgcgaggaacatagccaacaaatgagatatcaaacgcagcttcccatagaatactataagcgcgtgtgtgcaaataaactagaaaatctagaagaaatggataaattcctcgacacatacactctcccaagactaaaccaggaagaagttgagtctctgaatagaccaataacagactctgaaagtgaggcaataatcaatagcttaccaaccaaaaaaagtccaggaccagatggattcacagccaaattctaccagaggtacaaggaggaactggtaccattccttctgaaactattccaatcaatagaaaaagagggaatcctccctaactcattttatgaggccagcatcatcctgataccaaagcctggcagagacacaacaaaaaaagagaattttagaccaacatccttgatgaacatcgatgcaaaaaccctcaataaaatactggattcggcaaaccgaatccagcagcacatcaaaaagcttatccaacatgatcaagtgggcttcatccctgggttgcaaggctggttcaacatacgcaaatcaataaatgtaatccagcatataaacagaaccaaagacaaaaaccacgtgattatctcaatagatgcagaaaaggcctttgacaaaattcaacagtgcttcatgctaaaaactctcaataaattaggtattgatgggacgtatctcaaaatagacgacatgattgtatatctagaaaaccccattgtctcagcccaaaatctccttaagctgataagcaacttcagcaaagtctcaggatacaaaatcaatgtacaaaaatcacaagcattcttatacaccaacaacagacaaacagagagccaaatcatgagtgaactcccattcacaattgcttcaaagagaataaaatacctaggaatccaacttacaagggatgtgaaggacctcttcaaggagaactacaaaccactactcaaggaaataaaagaggatacaaacaagtggaagaacattccatgctcatgggtaggaagaatcaatattgtgaaaatggccatactgcccaaggtaatttacatgttcgctgcgcttccggtggggggcgtcgcggcctgctcggtggttcgtctgttgcgtcgtctcggcgcgagcggcctccgtgttggcgggttgggtgctcgtcgcctattgccgcggcgcttggcggatgttgatgagtgtgcagaaaacataaacctctgtgagaacggacagtgccttaatgtcccgggtgcatatcgctgcgagtgtgagatgggcttcactccagcctcagacagcagatcctgccaagatatagatgagtgcagcaatggtgataatctctgccagcggaatgcagactgcatcaatagtcctggtagttaccgctgtgaatgtgccgcgggtttcaaactttcacccaatggggcctgtgtagatcgcaatgaatgtttagaaattcctaacgtttgcagtcatggcttgtgtgttgatctgcaaggaagttaccagtgcatctgccacaatggctttaaggcttctcaggaccagaccatgtgcatggcggcacgcaaccccacactcacgacactcacgacacgacgaagagcacgcacactcaccagcctcgcgcaacaccgacacaccaccatcacgccacgcagcagcacctacacagcaccgcagacactacctaagggtcaagggggaatccaagaagtcaaaaaccgggccataaccacggggcccaaagcccccactcttgcaactgcacagcgaacacgccgacatataatccaaccacccagtccggaaaacacccccaatcaacagcccataacacacccccacacaattcacaacccaatcggaatggaggcacccagcatgaaacgggaccacaagcaagccatacaaccaaccgagatctccagcacgccgcaagacacccatacaatgttacagctgatgaaggaggcaggctgctataatggaatcacatccagggatgattttcctgtgactgaagtgctgaaccaggtttgcccttccacatggcgaggtgcctgcaagacggcggtgcagctgctgtttggccaggctggactgagctttatgtggaagatagctggtttcggtttcattaaagctgtattcagtcgcccaaagtttcataaggtggagggagagaagattgagaatggggagagctcctctgggctctatgttgatgaacttagcctttgctctctcctcagaaattatagaaaatggtctgtatctgaattccacggcctttgtagtagtggagtaggtatcactgtggatggaagagacatgagaaaaagcttttgctaccgaagctataatggaaccacttgtgagaatgagttgcctttcaatgtgacaaaaaggatgtgctgctgcacatataatgtgggcaaagcctggaacaaaccttgtgaaccatgcccaactccaggaacagggcctgacctcgttgctgctgtcaagcagagaaggtatgaagggatttctaaaccaaggtggggagagaagggcatgtga

SEQ ID NO: 133821 - DNA, 2628 bp, Homo sapiens
atgggagactttaacaccccactgtcaacattagacagatcaatgagacagaaagtcaaaaaggatacccaggaattgaactcagctctgcaccaagcagacctaatagacatctacagaactctccaccccaaatcaacagaatatacatttttttcagcaccacaccacacctattccaaaattgaccacatacttggaagtaaagctctcctcagcaaatgtaaaagaacagaaattataacaaactatctctcagacggcagtgcaatcaaactagaactcaggattaagaatctcactcaaaaccgctcaactacatggaaactgaacaacctgctcctgaatgactactgggtacctaacgaaatgaaggcagaaataaagatgttctttgaaaccaacgagaacaaagacacaacataccagaatctctgggacgcattcaaagcagtgtgtagagggaaatttatagcactaaatgcccacaagagaaagcaggaaagatccaaaattgacaccctaacatcacaattaaaagaactagaaaagcaagagcaaacacattcaaaagctagcagaaggcaagaaataactaaaatcagagcagaactgaaggaaatagagacacaaaaaacccttcaaaaaattaatgaatccaggagctggttttttgaaaggatcaacaaaatagatagaccgctagcaagactaataaagaaaaaaagagagaagaatcaaatagatacaataaaaaatgataaaggggatatcaccaccaatcccacagaaatacaaactaccatcagagaatactacaaacacctctacgcaaataaactagaaaatctagaagaaatggataaattccttgacacatacactctcccaagactaaaccaggaagaagttgaatctctgaatagaccaataacaggatctgaaattgtggcaataatcaatagcttaccaaccaaaaagagtccaggaccagatggattcacagccgaattctaccagaggtacaaggaggaactggtaccattccttctgaaactattccaatcaatagaaaaagagggaatcctcctgttggaagttctggccagggcaattaggcaggagaaggaaataaagggtattcaattaggaaaagaggaagtcaaattttccctgtttgcagacgacatgattgtatatctagaaaaccccattgtctcagcccaaaatctccttaagctgataagcaacttcagcaaagtctcaggatacaaaatcaatgtacaaaaatcacaagcattcttatacaccaacaacagacaaacagagagccaaatcatgagtgaactcccattcacaattgcttcaaagagaataaaatacctaggaatccaacttacaagggatgtgaaggacctcttcaaggagaactacaaaccactgctcaaggaaataaaagaggatacaaacaaatgcaagaacattccatgctcatgggtaggaagaatcaatatcgtgaaaatggccatactgcccaaggtaatttacagattcaatgccatccccatcaagctaccaatgcctttcttcacagaattggaaaaaactactttaaagttcatatggaaccaaaaaagagcccgcatcgccaagtcaatcctgagccaaaagaacaaagctggaggcatcacgctacctgacttcaaaccatactacaaggctacagtaaccaaaacagcatggtactggtaccaaaagagagatatagatcagtggaacagaacagagccctcagaaataacgccgcatatctacaactatctgatctttgacaaacctgagaaaaacaagcaatggggaaaggattccctatttaataaatggtgctgggaaaactggctggccatatgtagaaagctgaaactggatcccttccttacaccttatacaaaaatcaattcaagatggattaaagacttaaacgttagacctaaaaccataaaaaccctagaagaaaacctaggcaataccattcaggacataggcatgggcaaggacttcatgtctaaaacaccaaaagcaatggcaacaaaagacaaaattgacaaatgggatctaattaaacttaagagcttctgtacagcaaaagaaactaccatcagagtgaacaggcaacctacaaaatgggagaaaattttcacaacctactcatctgacaaagggctaatatccagaatctacaatgaactcaaacaaatttacaagaaaaaaacaaacaaccccatcaaaaagtgggcgaaggacatgaacagacacttctcaaaagaagacatttatgcagccaaaaaacacatgaaaaaatgctcatcatcactggccatcagagaaatgcaaatcaaaaccacaatgagataccatctcacaccagttagaatggcgatcattaaaaagtcaggaaacaacagtctattaattaccatcagagaatactataaacacctctatgcaaataaactagaaaatctagaggaaatggataaattcctggacacatacaccctcccaaaactaagtgaggaagaagttgaatctctggatatgctatccttttatacaactggcagcaaa

SEQ ID NO: 133822 - DNA, 2970 bp, Homo sapiens
atgactgacgagttgagagaagaaggcttcagacgatcaaactactctgagctacaggaggaaattcaaaccaaaggcaaagaagttaaaaactttgaaaaaaatttagacgaatatataaccagaataaccaatacagagaagtgcttaaaggagctgatggagctgaaagccaaggctcgagaactaccaccacaccacacctattccaaaattgacctcacagttggaagtaaagctctcctcagcaaatgtaaaagaacagaaattataacaaactgtctctcagaccacagtgcaatcaaactagaactcaggattaagaaagtcactcaaaaccactcaactacatggcaactgaacaacctgctcctgaatgactactgggtacataacgaaatgaaggcagaaataaagatgttctttgaaaccaatgagaacaaagacacaacataccagaatctctgggacacattcaaagcagtgtgtagagggaaatttatagcactaaatgcccacaagagaaagcaggaaagatccaaaattgacaccctaacatcacaattaaaagaactagaaaagcaagagcaaacacattcaaaagctagcagaaggcaagaaataactaaaatcagagcagaactgaaggaaatagagacacaaaaaacccttcaaaaaattaatgaatccaggagctggttttttgaaaggatcaacaaaattgataggccgctagcaagactaataaagaagaaaagagagaagaatcaaatagatgtaataaaaaatgataaaggggatatcaccacagatcccacagaaatacaaactaacatcacagaatactacaaacacctctatgcaaataaactagaaaatctagaagaaatggataaattcctcaaaacatacgccctcccaagactaaaccaggaagaagttgaatctctgaatagaccaataacaggctctgaaattgtggcaataatcaatagcttaccaaccaaaaagagtccaggaccagatggattcacagccgaattctaccagaggtacaaggaggaactggtaccattccttctgaaactattccaatcaatagaaaaaaaggaaatcctccctatctcatttgatgaggccagcatcatcctgttatcaaagccgggaagagacacaaccaaaaaagagaattttagaccaatatccttgatgaacattgaggcaaaaatcctcaataaaatactggcaaaccggatccagcagcacatcaaaaagcttatccaccatgatcaagtgggcttcatccctgggatgcaaggctggttcaatatacgcaaatcaataaatgtaatccagcatgtaaacagaaccaaagacaaaaatcacatgattatctcaatagatgcagaaaaggcctttgccaaaattcaacaacccttcatgctaaaaactctcaataaattaggtattgatgggacgtatctcaaaataataagagctatctatgacaaacccacagccaatatcatactgaatgggcaaaaactggaagcattccctttgcaaactggcacaagacagggatgccctctctcaccactcctattcaacatagtgttggaagttctggccagggcaatcaggcaggagaaggaaataaaggatgacatgattgcatatctagaaaaccccattgtctcaacccaaaatctccttaagctgataagcaacttcagcaaagtctcaggatacaaaatcaatgtacaaaaatcacaagcattcttatacaccaataacagacaaacagagagccaaatcatgagtgaactctcattcacaattgcttcaaagagaataaaatacctaggaacccaacttacaagggacgtgaaggacctcttcaaggagaactacaaaccactgctcaatgaaataaaagaggatacaaacaaatggaagaacattccatgctcatgggtaggaagaatcaatattgtgaaaatggccatactgcccaaggtaatttatagattcaatgccatccctatcaagctaccaatgactttcttcacagaattggaaaaaactactttaaagttcatatggaaccaaaaaagagcccgcattgccaagtcaatcctaagccaaaagaacaaagctggaggcatcacgttacctgacttcaaactacactacaaggctacagtaaccaaaacagcatggtactggtaccaaaacagagatatagatcaatggaacagaacagagccctcagaaataacgccgcatatctacaactatctgacctttgacaaacctgagaaaaacaagcaatggggaaaggaatccctatttaataaatggtgctggggaaactggctagccgtatgtagaaagctgaaactggatcccttccttatatcttatacaaaaattaattcaagatggattaaagacttaaatgttagacctaaaaccataaaaaccctagaagaaaacctaggcaataccattcaggacataggcatgggcaaggacttcatgtctaaaacaccaaaagcaatggcaacaaaagacaaaattgacaaatgggatctaattaaactaaagagcttctgcacagcaaaaggaactgccatcagagtgaacaggcaacctacagaatgggagaaaacttttgcaacctactcatctgacaaaaggctaatatccagaatctataatgaactcagacacatttacaagaaaaaaacaaacaaccccatcaaaaagtgggcaaaggacatgaacagacactgctcaaaagaagacatttatgcagccaaaaaacacatgaaaaaatgctcatcatcactggccatcagagaaatgcaaatcaaaaccacagtgagataccatctcacaccagttagaatggcgatcattaaaagtcaggaaacaacaggtgctggagaggatgtggagaaatag

SEQ ID NO: 133823 - DNA, 4142 bp, Homo sapiens
  misc_feature (1)...(4142): n = a,t,c or g
atgggagactttaacaccccactgtcaacattagacagatcaatgagacagaaagttaacaaggatatccaggaattgaactcagctgtgcaccaagtggacctaatagacatctacagaactctccaccccaaatcaacagaatatacattcttcttagcaccacatcgtacttattccaaaattgaccacatagttggaagtaaagcactcctcagcaaatgtaaaagaacagaaattataagaaattgtctctcagaccacagtgcaatcaaactagaactcaggattaacaaactcactcaaaactgctcaactacatggaaactgaacaacatgctcctgaatgactactgggtacataatgagatgaaggcagaaataaagatgttctttgaaaccaatgagaacaaagacacaacatacaagaatctctgggacacatttaaagcagtgtgtagagggaaatttatagcactaaatgcccacaagagaaagcaggaaagatctaaaattgacaccctaacatcacaattcaaagaactagagaagcaagagcaaacacattcaaaagctagcagaaggcaagaaataactaagatcagagcagaactgaaggagatagagacacaaaaaacccttcaaaaaatcaatgaatccaggagctggttttttgaaatgatcagcaaaattgatagaccgctagcaagactaataaagaagaaaagagagaagaatcaaatagacacaataaaaaatgataaaggggatatcatcaccgatcccacagaaatacaaactaccatcagagaatactataaacacctctatgcaattaaactagaaaatctagaagaaatggataaattcccatacacaaacaccctcccaagattaaatgaggaagaaattgaatccctgaatagaacaataacaggatctgaaattgaggcaataattaagagcctaccaaccaaaaaaagtccaggaccagatggattcacagccaaattctaccagaggtacaaagaggagctggtaccattccttctgaaactattccaatcaatagaaaaagagggaatcctccctaattcattttatgaggccagcatcatcctaataccaaagcctgtgttggaagttctagccagggcaatcaggcaggagaaagaaataaagggtattcatttaggaaaagaggaagtcaaattgtccctgtttgcagatgatatgattgtacatttagaaaatcccattttctcagcccaaaatctccttaagctgataagcaacttcagcaaagtctcaggatacaaaatcaatgtgcaaaaatcacaagcattcctatacaccaccaacaaacaaacagagagccaaatcatgagtgaactcccattcacaattgcttcaaagagaataaaatacctaggaatccaacttacaagggatgtgaaggacctcttcaaggagaactacaaaccactgctcaaccgaaataaaagaggacacaaacaaatggaagaacattccatgctcatggataggaagaatcaatattgtgaaaatggccatactggccaaggtaatttatagattcaatggcatccccatcaagctaccaatgactttctccacagaattggaaaaaactactttcaagttcatatggaaccaaaaaagagcctgcattgccaagtcaatcctaagccaaaagaacaaagctggaggcatcacgctacctgacttcaaactatactataaggctacagtaaccaaaacagcatggtactggtaccaaaacagagatatagatcaatggaacagaacagagccctcagaaataacactacatatctacaactatctgatctttgacaaacctgacaaaaagaagaaatggggaaaggattccgtatttaataaatgaaatacaaactaacatcagagaatatgataaacacctctacacaaataaactagaaaatctagaagaagtggataaattcctggacacatacaccctctcaagactaaaccaggaagaagttgaatccctgagtagaccaataacaagttctgaaattgaagcagtaattaatagcttaccaaccaaaaaaagtccaggaccaggcggattcacagctgaattctaccagagcatagtgttggaagttctggccagggcaattaggcaggagaaggaaataaagggtattcaattaggaaaagaggaagtcaaattgtccctgtttgcagacgacatgattgtatatctagaaaaccccatcatttcagcccaaaatctccttaagctgataagcaacttcagtaaagtctcaggatacaaaatcaatgtacaaaaatcagaagcattcttatacaccaataacagacaaacagagagccaaatcatgagtgaactcccattcacaattgcttcaaagagaataaaatacctgggaatccaacttacaagggatgtgaaggacctcttcaaggagaactacaaaccactactcangtactactcaggaagtctggaggctaagtcaacacatcatgaaactctaggactaattcacactgcaacaaaggggctgattagagcttttgaagatggggggatagattctgtgatggaatgggaagtggatgaagtgctgaactggacaaatacactgaactttgatgaaatacaagggaaaaaaatagcaaaggttataatgctgctgttggagagcagtcgggaaccacagattgcaaaagattttgcttcctttcccagcatcaatctccagcaaatgctaaaagaagtccccaaaaggtttggggatgagagaggtgccattgttcattacacgattctcaataaccatgtttaccggagatctttagggaaatacacagacttcaagatgttctctgatgagattttgttatcattgacaagaaaggtccttctcccagatttagaattttatgttaatcttggagattggcccttggagcatcgaaaagtcaatggaacccctagccccatacctatcatttcatggtgtggctctctggattcaagagatgttgtccttccaacgtatgacatcacccactccatgcttgaagccatgcgggggccttcctggatcaataaaacagagagagctttcttcagaggtagagacagccgagaggagaggctccagttggtacagctgtccaaagaaaatcctcagctactagatgcaggaattacaggatatttctttttccaagagaaagaaaaggagcttggaaaagccaagttgatgggtttctttggatttctttaagtacaagtatccaagtaaatgtggatggggaccgtggctggcttacaggtatccatatctcatggctgggcgacagtctggttttaaagcaggactcgccatattatgaacatttctacatggcactagaaccttggaagcattatgttccaattaaaagaaatctgagtgatttattagagaaagttaaatgggctaaggaaaatgatgaagaagccaagaagattgcaaaagaaggacagttgatggctagggacctactacagccacacaggctttactgctactattaccaagtactgcagggcacagacaaacaaaaagacagcagtaacctctgcagacttaaatgtccctgtctgacagctttgaagagagtagtggttctcccagcgacgcagctggagatctgagaacgggcacattgcctcctcaaaaatacaaactaccatcagagaatactacaaacacctctacgcaaataaactagaaaatctagaagaaatggataaattcctcgacacatacactctcccaagactaaaccaggaagaagttgaatctctgaatagaccagtaacaggagctgaaattgtggcaataatcaatagtttaccaaacaaaaagagtccaggaccagatggattcacagctgaattctaccagagtcaggtgccagaagatggcttatctccaagtgaaccgcttaatatctatgaggatgacccagtggactcaaattgtgacacagacacaaccacagatgatgaatactacctgcatgaaaatgacaaagagtcagaactgtga

SEQ ID NO: 133824 - DNA, 6309 bp, Homo sapiens
atgcacattgttgtagaaacagctctgtcagcttcatggcagaacaaggccaagcccccagctagggttctgcttcaggtggtccccaatgtgtggttccttgtggctgttgtgtgggaactgtatccatctttggatctcatggatcgttccatagaatgcagttcctcaccagcaacggaacaaagctggacagagaatgactatgacaagctgagagaagaaggcttcagacgatcaaattactctgagctacaggaggacattcaaaccaaaggcaaagatgttgaaaactttgaaaaaaatttagaagaatgtataactagaataactaatacacagaagtgcttaaaggagctgatggagctgaaaaccaaggctcgagaactacgtgaagaatgcagaagcctcaggagccgatgcgatcaactggaagaaagggtatcagtgatggaagatgaaatgaatgaaatgaagcaagaagggaagtttagagaaaaaagaataaaaagaaatgagcaaagcctccaagaaatatgggactatgtgaaaagaccaaatctacgtctgattggtgtacctgaaagtgatggggagaatggaaccaagttgaaaaacactctgcaggatattatccaggagaacttccccaatctagcaaggcaggccaaagttcagattcaggaaatacagagaatgccacaaagatattccttgacaagagcaactccaagacacataattgtcagattcaccaaagttgaaatgaaggaaaaaatgttaagggcagccagagagaaaggagcacccagattcataaagcaagtcctgagtgacctacaaagagacttagactcccacacattaataatgggagactttaacaccccactgtcaacattagacagatcaacgagacagaaagtcaacaaggatacccaggaattgaactcagctctgcaccaagtggacctaatagacatctacagaactctccaccccaaatcaacagaatacacatttttttcagcaccacaccacacgtattccaaaattgaccacatacttggaagtaaagctctcctcagcaaatgtaaaagaacagaaattataacaaactatctctcagaccacagtgcaatcaaactagaactcaggattaagaatctcactcaaaaccgctcaactacatggaaactgaacaacctgctcctgaatgactactgggtacataacgaaatgaagctagaaataaagatgttctttgaaaccaacgagaacaaagacacaacataccagaatctctgggacgcattcaaagcagtgtatagagggaaatttatagcactaaatgcccacaagagaaagcaggaaagatccaaaattgacaccctaacatcacaattaaaagaactagaaaagcaagagcaaacacattcaaaagctagcagaaggcaagaaataactaaaatcagagcagaactgaaggaaatagagacacaaaaaaccctttcaaaaaattaatgaattccaggagctggtttttttgaaaggatcaacaaaattgatagatagatcactagcaagagtaataaagaagaaaggagagaagaatcaaatagacggcaataaaaaatgataaaggggatatcacccaccgatccccacagaaatacaaactacccatccagagattactacaaacacctctacgccaaataaacttgaaaatctagaaggaatggataaattcctcgacacatacactctcccaagactaaaccaggaagaagttgaatctctgaatagaccaataacagggctctgaaattgtggcagtaatcaatagcttaccaacgaaaaaaaagtccaggaccagatggattcacagccgaattctaccagaggtacaaggaggagctggtaccattccttctgaaactattccaatcaatagaaaaagagggaatcctccctaactcattttatgagcccagcatcatcctgatagcaaagcctggcagagacacaacaaaaaaaagagaattttagaccaatatctttgatgaacatcgatgcaaaaatcctcaataaaatactggcaaaccaaatccagcagcacatcaaaaagcttatccaccatgatcaagtgggcttcatccctgggatgcaaggctggttcaatatacgcaaatcaataaatgtaatccagcatataaacagaaccaaagacaaaaaccacatgattatctcaatagatgcagaaaaggcctttgacaaaattcaacaacacttcatgctaaaaactctcaataaattagtgttggaagttctggccagggcaatcaggcaggagaaggaaataaagggtattcaattaggaaaagaggaagtcaaattgtcccctctttgcagatgacatgattgtatatgtagaaaaccccttcgtctcagcccccatatctccctcaagctgataagcaacttcagcaaactctcaggatacaaaatcaatgtacaaaaatcaccaagcattcctatacaccaacaacagacaaacagagagccaaatcatgagtgaactcccattctgttattgcttcaaagagaataaaatacctaggaatccaacttacaagggatgtgaaggacctcctcaaggagaactacaaaccactgctcaacgaaataaaaagaggacacaaacaaatggaagaacattccatgctccagggtaggaggaagaatcaatctcgtgaaaatggccatacttgcccaaggtaaatttatagattcaatgccatccccatcaagctaccaatgactttcttcacagaattggaaaaaaactactttaaagttcatatggaaccaaaaaagagcccacatcgccaagtcaatcctaagccaaaagaacaaagctggaggcatcacactacctgacttcaaactatactacaaggctatagtaactcaaaacagcatggtactgctaccaaaacagagatatagaccaatggaacagaacagagccctcagaaataatgctgcatatctacaactatctgatctttgaccaacctgagaaaaacaagcaatggggaaaggattccctatttaataaatggtgctgggaaaactggctagccatatgtagaaagctgaaactggatcccttccttacaccttatacaaaaatcaattcaagatggattaaagacttaaacgttagacctaaaaccataaaaaccctagaagaaaacctaggcattaccattcaggacataagcatgggtaaggacttcatgtctaaaacaccaaaagcaaaggcaacaaaagccaaaattgacaaatgggatctaattaaactaaagagtttctgcacagcaaaagaaactaccatcagagtgaacaggcaacctacaaaatgggagaaaattttcgcaacctactcatctgacaaagggctaatatccagaatctacaatgaactcaaacaaatttacaagataaaaacaaacaaccccatcgaaaagtgggtgaaggacatgaacagacacttctcaaaagaagacatttatgcagccaaaaaacatatgaaaaaatgctcatcatcactggccatcagagaaatacaaatcaaaaccacagtgagataccatctcacaccagttagaatggtgatcattaaaaagtcaggaaacaacagagcacctgggggaaggggtggctgtgggtgcagctttggcagacttaaacgttcctgcgtgccagctctgaaaagagtagcagatctcccagcacaacgctcgagctctgctaagggagagactgcctcctcaagtgggtccctgaaccccgtgccccctgactgggagaaacctcccagcaggggtcgacagacacctcatactggagaactccggctagcatctgacgggtgcctctctgggatgaagcttccagaggaaggaataggcagcagtctttgctgttctgcagcctctgctggtgatacccaggcaaatggggtccggagtggactgccagcaaactccagcagacctgaagctgagggtcccgactgttagaaggaaaactaacaaacagaaaggacatccacaccaaaaccccatctcaccacagtgcacttattccaaaattgaccacatagttggaagtaaagcactcctcagcaaatgtaaaagaacagaaattataacaaactctctcccagaacacagagcaatcaaactagatctcaggattaagaaactcactcaaaaccgctcaactacatggaaattgaacaacctgctcctgaatgactactgggtacataatgaaatgaaggcagaaataaagatgttctctgaaaccaaagagaacaaagacacaacataccacaatctctgggacacatttaaaacagtgtgtagggggaaatttatagcactaaatgcccacaagggaaaccaggaaagatctaaaattgacaccctaacatcacaattaaaagaacaagagaagcaagagcaaacacattcaaaagctagcagaaggcaagaaataactaacatcagagcagaactgaaggagatagagacacagaaaactcttcaaaaaatcaatgaatccaggagctggttttttgaaaagatcaacaaaattgatagaccgctagcaagactaataaagaagaaaagagagaagaatcaaatagatgcaataaaaaatgataaagcagatatcaccactaatcccacagaaatacaaactaccatcagagaatactataaacacctctatgcaaataaactagaaaatctggaagaaatggataatttcctcgacacatacaccctcccaagactaaaccaggaagaagttgaatctctgaatagaccaataacaggctctgaaatggaggcaataattaatagcctaccaaccaaaaaaagtccaggaccagacggattcacagccgatttctaccagaggtacaaggaggagctggtaccattccttctgaaactattccaatcaatagaaaaagagggaatcctccctaactcattttatgaggccagcatcgtcctgataccaaagcctggcagagacacaacaaaaagaattttagaccaatatcccagacgaacatcaatgcaaaaatcctcaatacaatactggcaaaccgaatccagcaacacatcaaaaagcttatccaccatgatcaagtgggcttcatccctgggatgcaaggctgtgttggaagttctggccagggcaatcaggcaggagaaggaaataaagggtattctgttaggaaaagaggaagtcaaattgtccctgtttgcagatgacatgatcgtatatctagaaaaccccatcatctcagcccaaaatctccttaagctgataagcaacttcagcaaagtctcaggatataaaatcaatgtgcaaaaatcacaagcattcttatacaccaataacagacaaacagagagccaaatcatgagtgaactcccattcacaattgcttcaaagacaataaaatacctaggaatccaacttacaagggatgtgaaggacctcttcaaggagaactacaaaccactgctcaaggaaataaaagaggatacaaacaaatggaagaatattccatgctcgtgggtaggaagaatcagtattgtgaaaatggccatactgcccaaggtaatttatagattcaatgccatccccatcaagctaccagtgactttcttcacagaattggagaaaactactttaaagttcatatggaaccaaaaaagagcccacattgccaagtcaatcctaaggcaaaagaacaaagctggaggcatcatgctacctgacttcaaactatactacaaggctacagtaaccaaaacagcatggttccagttaactctgggcttccgcctgggaacctgcagaaacaggagacgaatgcgattcctaaattaccccactgctggactcttcgaagccccacaatcgcgacccaaggctgtcttcttttcgggaagaaagggcaggatccgtgaaaagaaaacaacacggtctgaacttgcctctgagaacccgcagggccgtaaacctgaattccgcgggagagaacggcgtccgtttctctcgcgacacttcatggataacgtagatgcttcaagtccagttcggctctcattggctaccgcacgcagtgagggggcggggaaagtagcggcgaggccccgccctcacgcaggagccaatcctgagcaggctaggagacgaacccggaagtga

SEQ ID NO: 133825 - DNA, 450 bp, Homo sapiens
atgcgcagtcatgagtcgcttcaagtttatcgatattggtatcaacttgactgaccctatgttcagaggaatttatttgggggttcaaaagcatcaagatgacttacaggatgtaataaggagagctgtcgagattggtgttaaaaagtttatgattacaggtggaaatctacaagacagtaaagatgcactgcatttggcacaaacaaatggtatcctcatatttcttttaccaaaaaaaaaatgaattaagtaattttgaagaagtctttctgaaaactgcttcaggtatgtttttcagtacagttggatgtcatcctacaagatgtggtgaatttgaaaagaataaccctgatctttacttaaaggagttgctaaatcttgctgaaaacaataaagggaaagttgtgggcaataggagaatgcggacttgattttgaccgactgcaa

SEQ ID NO: 133826 - DNA, 1063 bp, Homo sapiens
atggggaggtcctccatgcgcagtcatgaggtcgcttcaagtttatcgatattggtatcaactttgactgaccctatgttcagaggaatttataggggggttcaaaagcatcaagatgacttacaggatgtaatagggagagctgtcgagattggtgttaaaaagtttatgattacacggtggaaatctacaagacagtaaagatgcactgcatttggcacaaacaaatggtatgtttttcagtacagttgggatgtcatcctacaagatgtgggtgaattttgaaaagaataaccctgatctttacttaaagggagttgctaaaatctttgctggaaaacattaaaggggaagttgtggcaattaggagaatgccggacttgattttgacccgactgcagttttgtcccaaagatactcaactcaaatattttgaaaaacagtttgaacctgtcagaacaaacaaaattaccaatgtttcctccattgtcgaaactcacatggctggaattttttggacataatgaaaagaaatagagatcggtgtgtagggggagtggtgcattcatttgatggtaccaaggaagcagccagctgctttgattgacttggatctttatataggatttaatgggtggcctcacctgaaaacctggaggctaatttgggaaggttttggaagtcaatttcctagtgaaaaattaatgattgaggccagatgcacccttggtgtggagtcaaaagtacacatgcttggatcaaaatatataagaactgcatttccttcccaaaaagaagtgggaaagtgggcactgcttaaaagacagaaatgaaccctgccatataattcaaatattggagataatgtcagcagtgagagatgaggatccactggaattagccaatacactatataacaatactattaaagtatttttttcctggaatataattggtatatgtcttccactttccatcatgtatgtaaaatttcatagtaaaacttcctgatagtttcaataaagagattatctgcaaaaaaaaaaatggtgtaagaagtcgg

SEQ ID NO: 133827 - DNA, 1679 bp, Homo sapiens
aggcacgaggcttgacaagagcatcttcagcgggcgagtccccggctcctccagctccttcctcctcttcctcctcctcctccacctccggcttttgggggatcactgtcctctctcggcagcagaatgagccggcaggtgggtccgctccagcaagttccgccacgtgtttggacagccggccaaggccgaccaagtgctatgaagatgtgcgcgtctcacagaccaccttgggacagtggcttctggtgctggtcaacccttaagttttgtgggccctgatctgtgaggccagcgggggaggggccttcctggtgctgcccctgggcaagatttggacgttgtgggacaagaatgcgcccacgggctgtggctcacacagccccctgtgctagacatcgcctggtgcccgcacaatgacaacgtcattgcccagtggctccgaggacttgcacagtcatggtgtgggagatcccggatgggggcctgatgctgcccctgcgggagcccgtcgttcaccctggagggccacaccaagcgtgtggggcattgtggcctggcacaccacagcccagaacgtgctgctcagtgcaggttgtgacaacgtgatcatggtgtgggacgtgggcccctggggcggccatgcttgacactgggcccagaggggccccccagacgcgaactaccggggggactgggagcccgaatggaggcctcatttgtacctcctgccgtgacaagcgcgtgcgcatcatcgagccccgcaaaggcactgtcgtagctgagaaggaccgtccccacgaggggacccggcccgtgcgtgcagtgttcgtgtcggaggggaagatcctgaccacgggcttcagccgcatgagtgagcggcaggtggcgctgtgggacacaaagcacctggaagaaagccctgtcccctgaggaagttgcacaccagaaacggtgtccctgtggccttttttggcccttgacaccaacatcgtctaccttcgtggcaaagggtaccggcccaatccgggtctttgaggatcacttccgaaggcccctttcctgcactatctcttccatgttcagtttcaaaggagtcccagcgggggcatgggctacatggcccaaacgtgggcggaaggtgaacaagttgtgagatcgcagggttctacaaactgcacgacgggagggtgtaagcccaatgccaaagccagtgcctcgaaagtcggacctgttccaggaggacctgggacccacccccccaagagggccggacccttgccctcacggcttgaggagtggctggggggtcgggatgttggtgcccctcttcatctccctcaaggatggctacgtaacccccaaagagccgggagcttgagggtcaaccggggcctggacccccgggcgcaggaggagcagcaccagaggccagtggcactcccagctcggatgccgtgtctcggctggaggaggagatgcggaagctccaggccacggtgcaggagctccagaagcgcttggacaggctggaggagacagtccaggccaagctatgactccgcagggcctccaaccaggtcaaccaattacaaccaacccattcccttccctttcccacccacttgccggggaaaaaaatcttattaaattggctttattttttggtaaaaaaaaaa

SEQ ID NO: 133828 - DNA, 475 bp, Homo sapiens
cggcggctgccaccagggccttgttacgttcccgcctagtcttccgacgacggacacgaccaggtttctcaggctgctgaaaaggctgggagactggtccctgggtatccatggtgtcctcctaagtgaaggcttccgtccctggagaggaggcggcgccctgtatcggccttcgtcctccgcgggtgtgctagcgttgggacggtcctttgttgccgcgaggggtaggagtgggcgtggcggagccagctccgttcggaacactcccgggccgacccgactcgctcatcctgcaggagctgcggcgccaagatgagtggagaggagaacccagccagcaagcccacgccggtgcaggacgtacagggcgacgggcgctggatgtccctggtgagcgttcccacctgggatattgaggagtccgggggcgcggggggtggctcaggagaacggctggttcgtgccactctcaccc

SEQ ID NO: 133829 - DNA, 1012 bp, Homo sapiens
  misc_feature (1)...(1012): n = a,t,c or g
tttggtcccgtgccgggtgcgcggcctgggagtcagcggcccgaggcgggaagcgccgggcgagcccactgtgcggccgtcgtgggggaagcgaaggttcctgattccacctacctcctaagtgaaggcttccgtccctggagaggaggcggcgccctatatcggccttcgtcctccgcgggtgtgctagcgttgggacggtcctttgttgccgcgaggggtaggagtgggcgtggcggagccagctccgttcggaacactcccgggccgacccgactcgctcatcctgcaggagctgcggcgccaagatgagtggagaggagaacccagccagcaagcccacgccggtgcaggacgtacagggcgacgggcgctggatgtccctgcaccatcggttcgtggctgacagcaaaagataaaggngggggnaaaaaaaaaaacccccccccccccgaagtcgtcttcatcggggactccttggtccagctcatgcaccagtgcgagatctggcgcgagctcttctctcctctgcatgcactttaactttggcattggtggtgacggcacacagcatgtactgtggcggctggagaatggggagctggaacacatccggccccaagattgtggtggtctgggtgggcaacccaacaaccacggacacacagcagagcagggcctgcttccgcgaggccaacatcccaacccacttcgggagaagaaccgacaggtgaacgagcttggtacgggcggcacttggcttggccaccctcgggcccacttcctagatgccgaccctggctttgtgcactcagatggcaccatcagccatcatgacatgtatgattacctgcatctgagccgcctgggctacacacctgtttgccgggctctgcactccctgcttctgcgtctgctggcccaagaccagggccaaggtgctcccctgctggagcccgcaccctaagcatcctgctgccttcccacaacattaaactctccttcctcagtg

SEQ ID NO: 133830 - DNA, 1088 bp, Homo sapiens
cccacgcgtccgccgtgaccggtgggtggtttctccctcctccccgcctcgggagctggatggtctcgcctctccctccccccaccccgtgccgggtgcgcggcctgggagtcagcggcccgagcgggaagcgccgggcgagcccactgtgcggccgtcgtgggggaagcgaaggttcctgattccacctacctcctaagtgaaggcttccgtccctcggagaggaggcggcgccctgtatcggccttcgtcctccgcgggagctgcggcgccaagatgagtggagaggagaacccagcccagcaagcccacgccgttgcaggacgtacagggcgaacgggcgctggatgtccctgcaccattcggtttcgtgggctgacagcaaagataaggaacccgaaagtcgttcttcatcgggggacttccttggtccatctcatcgctaccagtgcgagatctggcgcgattctttctgttcctctggcatggcatttaacttttgggcatttgggtggtgaacgggcacacagcatgtactgtggcggcttggaaaattggggatctgggaacacatcccggcccaagattgttggtggtcttgggttgggcacccaaccaaccacgggacacacagcaagagcaggtgtctgggggcatcaaggccattgtcacgtttggggggttggaaaaatgagccgacagcccccaggccccgggtttttgttgctgggcctgcttccgcgcaggcccaacatcccaaccccacttcgggagaaagaaccgaccaggtgagacgagctggtacgggcggcactggctggccaccctccgggcccacttcctagatgccgacccctggctttgtgcactcaagatggcaccatcagccatcatgacatgtatgattacctgcatctgagccgcctgggctacacacctgtttgccgggctctgcactccctgcttctgcgtctgctggcccaagaccagggcacaaagtgctcccctgctggagcccgcacccttaagcatcctgctgccttcccacaacattaaactctccttcctcagaaaaaaaaaaaaaaaaa

SEQ ID NO: 133831 - DNA, 1546 bp, Homo sapiens
  misc_feature (1)...(1546): n = a,t,c or g
actcatagccctngccgtttcgtgaactcnnnnnnnnnnnnnnnnnnnnaatacaatctctctttggtatggggtttctgttctgctgtatgcaccactccaggacctggaggtgagcccacaacccatcacaggcatccctgaggagctcatcacagcctgggccctgggtcctgtgcagggtctggagcagcctcttggctgactctaggctctggcagtgtgtccagcccaggagtacaagcaggcaactgaggggcctgaattctctatcaagtaggcagccaagatttgggaagtcttcttctttcaacaatgttagtgctgttaccagaatctgctcgaggaagtgtttgttgttgctcaggcagtagaaataggccactttccaagcctcggctgggttgggattggagaacagggctagcattgcccgctcaggatctagatgatccggtgagacttttcccgaggctgtagccctcggtggcttttctgtgaccttctctgcataggtatggccatacagggacagcaggccccggctggccttgtgcagcaggcagctgagcagccgctcctcccgcaggggactcccctcggtcctgcaggcctctagtaattcctcacacaggagatgcaactcaaccccaagtggttctgcggggcaacgcagagtccgcagggctccatagatggcatcgactaccccagggggcaccgaatcagggccctgcaaagcccgcaatgcctttcgaatgaggtccaccagtgcattctgcagaggccagtgacagaggccagtaccgtcatcctcctcaagcaggagctccagcagggcctgtgctggctggggagactgcctcaggagatcccagagcacagagacagcttcggagctgagacgaggagtccagctctccctccttggatttccgtcaggcacgtggcctactgcaccctgtgttaaggtctcatacagctcctcgaggatgttctctggaatgtcaccttggaggtcttctgacaataaaagaaactcaagctttctccggaaaacaactgggagtaacttctcagcagatttggacacaccaccaatgcctgaagtatgtcttctaccctctttgggatatccccttgtccctcctgtagctgaggtacacatgcctgtgccagctcccattctcccctccgcaggcattcgcagaaaaatccaaaaagctgcttctgcgaagcagcttcctcttttccaaatggatgattcattttcccagcacagagtgcagggagatacaaagaaatgagttatgccgaacacattctcaatgttctcattcgcggagtacctcctgggcctctgccggcctctgattggatacagtagccagaatgacgactcaatcagtgcttcggttgttgctttgcggcgttttccgcggggaaactgtgtaaagggtggggaaacttgaaagttggatgctgcagacccggtactggaaagtttcatgtggggtgccgttgtggggaagtggggttcgctcat

SEQ ID NO: 133832 - DNA, 318 bp, Homo sapiens
  misc_feature (1)...(318): n = a,t,c or g
cagcaagggcggcggtggcggcggcggcanctgcagtgacatgtccagcatgaatcccgaatatgattatttattcaagttacttcttaggtttgcagatgatacatatacagaaagctacatcagcacaattggtgtggatttcaaaataagaactatagagttagacgggaaaacaatcaagcttcaaatatgggacacagcaggccaggnaagatttcgaacaatcacctccagttattacagaggagcccatggcatcatagttgtgtatgatgtgacagatcaggggtccttcaataatgttaaacagtggct

SEQ ID NO: 133833 - DNA, 1193 bp, Homo sapiens
acttccaataagtacaatatttattaaacatatcttcagttgttttgttacatagtgtgcaacaaattacaatattctgcagccacaaattatatgcagagtatgaagaaactattaatcagatagtgtaatctttccatttataactctacaaggaagaactagcaaatcagatcttacatataacatctcactaaactttatgcatggaaagtgacagacactgcttgtgctgtttgatacaaaatggctgaacttcatcttcagaagactaaacctgacatctaaacatgccaatataaacatcaaaacaaaatatattctaaccaaccacgggaaacagtctggtatcaggaaagcaacaaggattacacacattattttataaaccagcacacaaaggtttaaaacagttctgaaaatgaagttagctgtcttgagtcaagggaataaaaaaaaagtcagtattgaccatttacaatctctgacctttgtggagacggtaagaatctgttgtagtgcagctacatacagtacaattcaggcaattttgttttttcacttgggttcagattgcaaattcattgctgtgagaaaaggatggaggcaaattttagcagcaacctccacctgactgcttgactggagtgctctgaattttaacattggacttctcagcaccaccagctgttgctccgggacccattcgctttttaatctcagctgccatcgtcatgaaagactgttctacattcgttgcattcttagcactggtttccaaaaacggaattccaagggaatcagcaaattctatttgaagcttgattgttttcccgtctaactctatagttcttattttgaaatccacaccaattgtgctgatgtagctttctgtatatgtatcatctgcaaacctaagaagaaggcaagactttccaacccctgagtcgccaatcagaagtaacttgaataaataatcatattcgggattcatgctggacatgtcactgcagctgccgccgccgccaccgccgcccttgctgccgcagccgccgccctgactctccgcgccacgggtaatcgaaagaaaggaatgagataggctgttccgggagagcaaacgtcttcccctactccgtcccctagaacacaatcagcagccgccgccactcagctatcgcttccaccccccc

SEQ ID NO: 133834 - DNA, 516 bp, Homo sapiens
atggatggcagagtgatggcagcaggaggcagacaggctcctgggcagaaaaaggcaggtaccagtgaagccccaccttcaagccaggaatggcctgaagcctggtacgggtgcctgcagcagaagctgcgtgcagtatatctggttcagtcacagccttgcacggggcctgtgctggcacctggagctgcttgccctgctgcagcagccagcacgcctggctgtgcacagtgggtggaccccgcgcttgctcacctacacaatcctcgcagctctgcgcctggtttgcgtttagcagccgatgccccgacttctgccccaaccctcctcgacccctttaagatcccccaagctggcccacggacccagccgaccggtgctctcctgaactcactattcgggattcatgctggacatgtcactgcagctgccgccgccgccaccgccgcccttgctgccgcagccgccgccctgactctccgcgccacgggtaatcgaaagaaaggaatgagatag

SEQ ID NO: 133835 - DNA, 737 bp, Homo sapiens
ctggttcgccggcggccattttgggtggaagcgatagctgagtggcggcggctgctgatttgtgttctaggggacggagtaggggaagacgtttgctctcccgggaacaagcctatctcatggcctgtctttcgattacccgaggcgcacagagtcagggcggcggctgcggcagcaagcggcggcggtggcggcggcggcagctgcaagttgacatgtccagcatgaatcccggatatgattatttatgcaagattacttctgattggcgacttcaggggttggaaaagtcttgccttcttcttaaggtttgcaggatgatacatatacaggaaaagctacatcagcacaattgggtgtgggatttcaaaataaggaactataggagttaggacggggaaaacaattcaagcttcaaatatgggacacagcaggccagggaaagatttccgaacaattcacctccagtttattacagaggagcccatggcattcattagttgtgtatgatgtgacaggttcagggagtccttcaattaatgtttaaacagtggctgcaggagatagatcgttaatgccagtgaaaatgtcaacaaattgttggtaggggaacaaatgtgatcttgaccacaaagaaagtagtggactacacaacagcgaaggaatttgctggttgccttggaataccgttgttggaaaccagtgctaagaatgcacgaatgtagaacagtctttca

SEQ ID NO: 133836 - DNA, 375 bp, Homo sapiens
ggcacgagatgtgtatggcttctcttctcaacaaggggcttcgctccaatgttatcttgaacttccgtgataagtcattccacagctctttcaaaataagtacttggaatttttgttgagtgtataattatttgtgcatcttgaaatctgcttattctcttctttctttttaaaaaaatcattctcactgtcatcttatgcttcttctcttcttagatatcaatgatgtcaaacggctgaaacctggctacttagaagctactgtggactggtttagaaggtataaggttcctgatggaaaaccagaaaatgagtttgcgtttaatgcagaatttaaagataaggactttgccattgatattattaaaagcactc

SEQ ID NO: 133837 - DNA, 1405 bp, Homo sapiens
ggatttcgtcaggcgtggggctctctccttgacagtttgcgctttgtgcgggctggtggctctgtggcaggggcgggggcaggactccggcgactatgagcggcttcagcaccgaggagcgcgccgtgcccttctccctggagtaccgagtcttcctcaaaaatgagaaaggacaatatatatctccatttcatgatattccaatttatgcagataaggatgtgtttcacatgggtagttgaagtaccacgctggtctaatgcaaaaatggagattgctacaaaggaccctttaaaccctattaaacaagatgtgaaaaaaggaaaacttcgctatgttgcggaatttgttccccgtataaaggatatatctgggaactatgggggccttccctcagacttggggaagacccaggggcacaatgataaaacattactgggctgttgtgggttgacaatggaccccaattgatgtgtgttgaaattgggaaggcaaggtatgtgcaagaggtgaaataattgggcgtgaaagttctagggcatattggctatgatttgacggagggggaaccgactggaaagtcattgccattaatgtgggatgatcctggatgccagcccattaataatgatatccaatgatgtcaaacggctgaaaacctggctacctttagaagctacctgtggactggtttaggaaggtataaggttcctgatggaaaaccagaaaatgagtttgcgtttaatgcagaatttaaagataaaggactttgcccattgatattattaaaagcactccatggacccttgggaaagcattagtgacttaagaaaaccgaatgggaaaaggaatcagttgcatgaataccaactttgtgctgagagcccccttcaaggtgtgcatcctggatgctgcccagagcccattgtgggatgctttacccacccacccctgtggaatctgcccctgccacagtacccaacagaccgtggataagggggtccccatcacccagaaaaacctaatgagatttcctctggaataccaagctgatattgcctacatccgtgttccatcctggatggtattagaggtaaaagtagtagccttttccaaagcctttaaatttgtagaacctcatcctaacctaaagtaaattcctgctgtgactaatcccaatatactcaggaatgttatccatcttaaagcatttttcatatctccaacttagggtaacttttaggcacatgctttaaatatcaaagcagttgtcatttggaagtcacttgtgaatagatgtgcaaggggagcacatattggatgtatatgttaccgatatgttaggaaataaaattattttgctgaaaaaaaaaaaaaaaaaaaagtcgacgcggccgcgaattta

SEQ ID NO: 133838 - DNA, 612 bp, Homo sapiens
gtcactcaagaggatgacataattgaggagcacaagcccaggacacccaggccgagtccaccgttgctggccccttctccagcctgccaggcttttggagagggccactcaccaggtcaccctgcgatttccacgggggcaggaccccgacccagtgcctccttctcccacccgcacctcagcggactgcatcgggagccgcccctgaattggtccgtgtgcccgggcctggtctggtccccgaaaccagctttggacgagactcaccctttcgtccagcaatttccacaccaggctactttggagtggggagtcttccacagagatgtgggaaggcgctggggcagacgccttgggaatttgcaaattggtagtgaagtggctaggaggaggcgtgtggggggaggtgggctgcagtgcagacggttgggggttggggcgtccccgggagctgattggctgccgcgggtggaggcggagcttggccgccgcccccggaccgcagaggcccggctttgtgtcagtttctaccccaagatgccgccccagatccgggatggagacccagacgcccgccctcagagtgcagcaggacgatttgtttcaaagtaa

SEQ ID NO: 133839 - DNA, 951 bp, Homo sapiens
atggaagaaggcatttcttcacagattggcaggagagagaatgagtgccagcagaagaaatgccagacgctaataaaaccatcagatcttgtgagaactcactcgtatcatgagaacagcatgggggaaaccatcctggtgattcagttacctccacctggtactgcctttgacatgtgggaattacaattcaagcttatcacacagactttcagccaccacaatcagctggcacagaagacccggcgggagaagagagcccggcaggaggcccgagcggcgggagaaggcggagcgggcggccagactggccaaggaagccaagtcagagacctcagggccccagatcaaggagctaactgaatgaagaggcagagaggctgcagctagagattgaccagaaaaaggatgcagagaatcatgaggccccagctcaagaacggccagccttgactccccagggaagcaggatactgaggaagatgaggaggaagatgagaaggacaaaggaaaactgaagcccaacctaggcaacggggaagacctgcccaattaccgctggacccagaccctgtcggagctggacctggcggtccctttctgtgtgaacttccggctgaaagggaaggacatggtggtggacatccagcggcggcacctccgggtggggctcaaggggcagccagcgatcatttgatggggagctctacaatgaagtgaaggtggaggagagctcgtggctcattgaggacggcaaggtggtgactgtgcatctggagaagagggggccagcagacgcgcactcgagggctctttctgttctgcaagcaagccgtttgttgggcgtccactgtgtaccaggcacggtgccaaacgccgagattcaggtggtggacttcgtgatctacttctggcagtctgtaattccccaggcttcgcccatctctgagg

SEQ ID NO: 133840 - DNA, 1901 bp, Homo sapiens
ggcacgaggctccgttgcggaaggcggccaacaaaagtcgtgggccccggcgcgacccgcaggagcgtagagagcgcgggacatagagtgcagagctccgggacgtggatcggagcgcggcgcgactgggcggagagcaggaggaggagcggttcgacggcatgttgctggccatggctcagcatgcacgagggcggcgtgcaggagcttgtgaacaccttcttcagcttccttcgacgcaaaacagactttttcattggaggagaagaagggacggcagagaagcttatcacacagacttttcagccaccacaatcagcttggcacagaagaccccggcgggagaaagagagcccccgcaggagagccgaagcggcgggagaaggcggagcgggcggccagacttgccaaggaagccaagtcagagacctcagggccccagatcaaggagctaactgatgaaaaggcacgagaggctgcagctagagattgaccagaaaaaggatgcagagaatcatgaggcccagctcaagaacggcagccttgactccccagggaagcaggatactgaggaagatgaggaggaggaagatgagaaggacaaaggaaaactgaagcccaacctaggcaacagggcagaccttgcccaataacgcttgaacccagacccctgtcgggagctggacctggcggtcccttttctgtgtgaacttccggctgaaagggaaggacatggtggtggacatccagcgcggcacccctcggggtggggctcaagggccagcccagcgattcattgatgggggagctctacaatgaagtgaaggtggaggagagcttcgtggctcattgaggacggccaaggtggtgactgtgcatctggagaagatcaaataagatggagtggtggagccgcttggtgtcccagtgaccctgagattaaccacccaagaaagattaaccctgagaattccaaagcggtcagaccttggacagttgagacttcgccagcatggtggaaaaagatgatggtatgacccagcgaacagaaagtcccatggggctgcccaacttccagacgaacagaagaaaacaggagattctgaaagaagttcatggaatcaacatcccggagatgggattttttccaaaggctaaatttccaactaacccctgtttttttcctccctgaaactctttggggcttagcttgcaaccaccccaactttctttccccactcttctcttgggacttgtgggcctcagggcttggggcagccattgggaacttggcccaggcacacagttcccggggcattcaggagaaaggctgggtcttgggacctttgtcctccccagtggccttacttgttacacattaaaacgattttccccagcttctttcggggtcttcttcttgcttctgccttttctttggggcacagccttcttacagcttgctgctggaaacttggaagtttggcttctagcccagattctgccatgtgaccttaggccacatccttggcccttcttctgggcctcagtttctcattacttaaagattaaaacaaggcttggccgggtgtgatggttcatgtctgtaatcccagcactttgggaggctgaggggagcagatcacctgatgtcaggagtttgagaccagcttggccaacatggagaaacccagtctctactaaaaatacaaaaattagccgggtgtggtggtgcacacctgtaatcccagctactcgggaggctgaggcaggagaatcgcttgaacccgggtggcggaggttgcagtgagccgagattgcactacttcactccagcatgggtgacagagactccatctcaaaaaaataaataaataaaacaaggcttttagtctaaaaaaaaa

SEQ ID NO: 133841 - DNA, 403 bp, Homo sapiens
agcgggaccaggaggaggagatggactatgcaccagatgatgtgtatgactacaaaattgctcgggagtacaactggaacgtgaagaacaaagctagcaagggctatgaggaagaggaagaggagatggagacagaagagaaagaagctgggggctcatatgaggagcaggagaagggcagcagcagtgagaaggagggcagtgaagatgagcactcgggcagcgagagtgaacgggaggaaggtgacagggacgaggccagtgacaagagtggcagtggtgaggacgagagcagcgaggatgaggcccgggctgcccgtgacaaagaggagatctttggcagtgatgctgattctgaggacgatgccgactcttatgatgaggacagaggacaggccccagg

SEQ ID NO: 133842 - DNA, 2113 bp, Homo sapiens
cgtgtgtggttccgagccggacttcatttcaccgaaggcgtcgcggcctgaggagacccgttgggtcctcagcgtcttggcggcagttggtggaaccggagcttcgagtccgtccccggtgctgcctgcgcgttcacctgagtctcgctggagctcttttcgcccgcccacctcatctcaacccactttccgcggggagcggcgccaagctgggccttcctcggatcaggcgtcccctgaagtcggcacgcccctctgcgtcccccttcggtcccgctaggaccccgttccgggctgccgtcgcctcgtcgctatggcgcccaccatccaaacccaggcccagcgggaggatggccacaggcccaattcccaccggactctgcctgagaggtctggagtggtctgccgagtcaagtactgcaatagcctccctgatatccccttcgaccccaagttcatcacctaccccttcgaccagaacaggttcgtccagtacaaagccacttccttggagaaacagcacaaacatgacctcctgactgagccagacctggggggtcaccatcgatctcatcaatcctgacacctaccgcatcgaccccaatgttcttctagatccagctgatgagaaacttttggaagaggagattcaggcccccaccagctccaagagatcccagcagcacgccgaaggtggtgccatgggatgcgaaagacagagtacatctccactgagttcaaccggtattgcatcttccatgagaaagcctgaggtcaagaaatggggttctgtgaagcagcagtttaccgaggaagaaatatacaaagacagggatagccagatcacagccattgagaagacttttgaggatgcccagaaatcagtaattgagggactgggatggggagaggcaaggatctcacagcattacagcaaaccccgagtcacaccggtggaggtcatgcctgtcttcccagactttaagatgtggatcaatccatgtgctcaggtgatctttgactcagacccagcccccaaggacacgagtggtgcagctgcgttggagatgatgtcctcaggcccatgattaggggcatgatggatgaggaagggaacccagtttgtggcctatttcctgcctgtagaagagacgttgaagaaacgaaagcgggaccaggaggaggagatggactatgcaccagatgatgtgtatgactacaaaattgctcgggagtacaactggaacgtgaagaacaaagctagcaagggctatgaggaaaactacttcttcatcttccgagagggtgacggggtttactacaatgagttggaaaccaggggtccgccttagtaagcgccgggccaaggcttggggttcagtcaggcaccaacgccctgcttgtggtcaaacatcgggacatgaatgagaaggaactggaagctcaggaaacacggaaggcccagctagaaaaccacgaaccggaggaggaagaggaagaggagatggagacagaagagaaagaagctgggggctcagatgaggagcaggagaagggcagcagcagtgagaaggagggcagtgaagatgagcactcgggcagcgagagtgaacgggaggaaggtgacaggcacgaggccagtgacaagagtggcagtggtcacggacgacagcagcgactactaggcccgggctgcccgtgacaaagaggagatctttggcagtgatgctgattctgaggacgatgccgactctgatgatgaggacagaggacaggcccaaggtggcagtgacaatgattcagacagcggtcgcaatcgggggtggccagcggaccaggagccacagccgcagcgccagtcccttccccagtggcagcgagcactcggcccaggagaatggccagtgaagctgcagcttctgattccagtgaagctgatagtgacagtgactgagtcccagggcattcagggctgggttcagacaccattattgtgagcagcaaagcacttttctagtggtctgtttgtgagcctttcacttgtttgttccccacccccaaacctttgctgttaataaagtcaacttctctttacttcaaaaaaaaaaaaaaa

SEQ ID NO: 133843 - DNA, 888 bp, Homo sapiens
atgccggcggatggtagagatgccgaccctaccgaggagcagatggcagaaacagagagaaacgacgaggagcagttcgaatgccaggaacggctcaagtgccaggtgcaggtgggggcccccgaggaggaggaggaggacgcgggcctggtggccaaggccgaggccgtggctgcaggctggatgctcgatttcctccgcttctctctttgccgagctttccgcgacggccgctcggaggacttctgcaggatccgcaacagggcagaggctattattcatggactatccagtctaacagcttaccagttgagaacgatatacatatccctgatgatttggggttcaactgaaaaggaacatgacaaacttcaagaagaaatacagaatttaattaaaattcaggctatagctgtttgtatggaaaatggcaactttaaagaagcagaagtctttgaaagaatatttggtgatccaaattcttatatgcctctcaaaagcaaattgcttatgataatctctcagaaagatacatttcattccttttttcaacacttcagctacaatcacatgatggagaaaattaagagttatgtgaattatgtgctaagtgaaaaatcatcaacctttctaatgaaggcagcagcaaaagtagtagaaagtaaaagaacaagaacaataacttctcaagataaagctaatgaaaattatgttgaaacggaaactgaagctaatttggatacaagaaaaaggtctcacaagaatcttttcttatctaagttacaacatgggacccagcaacaagaccttaataagaaagaaagaagagtaggaactcttcaaagtacaaaaaagaaaaaagaaagcagaagagccactgaaagctga

SEQ ID NO: 133844 - DNA, 361 bp, Homo sapiens
  misc_feature (1)...(361): n = a,t,c or g
attataatgacttggtttatggccttaatatactacttaattacttaagatgtttattaatagaatgataaatgtacagagtaacctataagcatgacatacttttgctttcagtagtttcatgtaaagaaaaaaacttgaaaatagtaatacctgagtacccatgggaataatagacactggggaggtnnnnnnnnnnnnnnnnnnnnnnnnnnnnnnnnnnnnnnnnnnnnnnnnnnnnnnnnnnnnnnnnnnnnnnnnnnnnnnnnnnnnnnnnnnnnnnnnnnnnnnnnnnnnnnnnnnnnnnnnnnnnnnnnnnnnnnnnnnnnnnnnnnnnnnnnnnatcgaaataattttttta

SEQ ID NO: 133845 - DNA, 637 bp, Homo sapiens
tgtccggttgttgaatttataatgcaacagtattttagaccagtttccctctccatatttcctcacgccagatctcaaattcttgtcttcttcccaaagccatgcctgtctttttctagctcgatgtttttcaggagttaccggctgactctttgaaacaggtattctgctttcagtggctcttctgctttcttttttcttttttgtactttgaggagttcctactcttctttctttcttattaaggtcttgttgctgggttccatgttgcaacttagataagaaaagattcttgtgagacctaaaataaaacaggaaagtttgtaattggctccagaaagatagtaaggcaatggaaaacaggtaaatgatttgccttaatctgttctaggatcttctattaatactttggcctacttcctttggtgctctccctgcttagtaccccatcttaacctgtggcctcttaagatttctgttgcctgtctcatctttctccatctcatctactccgcagaaatcaagatgttttttgatgtctcagaagaagcaggcaaaaaaaagaaaagacaagactctttcggccttccaattagatacatcaaggaaaaaaatccttaaactacaaagtattagc

SEQ ID NO: 133846 - DNA, 2700 bp, Homo sapiens
ccgggtcgaaccacgcgttcgatggcggaggatgttttcttatcggccccgatcccgcggggctgtgcggatggtagggatgccgaccctactgaggagcatatggcacaaacagagagaaacgacgaggagcagttcgaatgccaggaactgctctagtgccatgtgcaggtgggggcccccgaggaggaggaggaggaggaggaggacgcggtcctggtggccgaggccgaggccgtggctgccggctggatgctcaatttcctctgcctctctctttgccgagctttccgcgaagggcgctccgaggacttccgcaggacccgcaacagcgcagaggctattattcatggactatgcagtctaacagcttgccagttgagaacgatatacatatgtcagtttttgacaagaattgcagcaggaaaaacccttgatgcacagtttgaaaatgatgaacgaattacacccttggaatcagccctgatgatttggggttcaattgaaaaggaacatgacaaacttcatgaagaaatacagaatttaattaaaattcaggctatagctgtttgtatggaaaatggcaactttaaaggagcagaagaagtctttgaaagaatatttggtgatccaaattctccatatgcctttcaaaagcaaattgcttatgataatctctcagaaagatacatttcattccttttttccaacacttcagctacaaccacatgatggagaaaattaagagttatgtggaattatgtgctaagtgaaaaatcatcaacctttctaatgaaggcagcggcaaaagtagtagaaagcaaaaggacaagaacaataacttctcaagataaacctagtggtaatgatgttgaaatggaaactgaagctaatttgggatacaagaaaaagtgttagttgacaaacagtctgcggtaactgaatcctcagagggtacagtatccttattgagggtctcacaagaatcttttctatctaaagttgcaacatggaacccagcaacaagaccttaataagaaagaaagaagagtaggaactcctcaaagtacaaaaaagaaaaaagaaagcagaagagccactgaaagcagaatacctgtttcaaagagtcagccggtaactcctgaaaaacatcgagctagaaaaagacaggcatggctttgggaagaagacaagaatttgagatctggcgtgaggaaatatggagagggaaactggtctaaaatactgttgcattataaattcaacaaccggacaagtgtcatgttaaaagacagatggaggaccatgaagaaactaaaactgatttcctcagacagcgaagactgattgtgtttgtaaaagcttgatgaaaggacagttaagtattttgatcactgcattttgtttgaaacttgtgtcattgatgtaatttaaaacttttgtttaaagcattacagtatttttctgtgacccatcaaataaatgagggtttgtgctaccagagttaaagcatatgctatcattgtattctttaagaaccttattttgataaaatgtaaatttgttgaaccctgccacatttagtatccccacccccaaatcctgttccaatgaaaaaattaaaacctgatacgaaaaaaaaaaaattccagttaacctattttgtgtctgtaggctgacctcaaccctgtaacgtaacccattaaaatgaatttctttttttttaagacagagtttctctctgttgcccaggctggagtgcagtggcgcaatttcagctcactgaacctctgcctcccaggtcaagtgattctcctgcctcagcctctgagtagctgggattacaggcacacaccaccagccagctaatttttgtatttttagtagaggcggggtttcaccatgctggtcaggatgttctccaactcctgacttcatgatccacccacctcggcctcccaaagtgctgagattacagacgtgagccactgcgtcctgcctaaaatgaattttctagatgattgaataacagtagtagtcctttgatagaagataatgacttggtttatggccttaatatactacttaattacttaagatgtttattaatagaatgataaatgtacagagtaacctataagcatgacatacttttgctttcagtagtttcatgtaaagaaaaaaacttgaaaatagtaatacctgagtacccatgggaataatagacactggggaggtagggtggggagcgggacgaagagctgaaaaacttacctactggggactgtgctcactacctgggtgacaggatcatacgtaccccaaacctcaacatcacacagtatactcagctaacaaacctgcccatgtgtttcctgaatctaaaataaaaatcgaaataatttttttaaaaaagaaaaagacaatagtattacccatgggacaaaatttgtactattagcaagaatcattttgtgtctcatttagaaacaatttgacttttgttccagtgtttaaactttgacaaaaatggttttgaatagatctttataacctgatgcctaaatacaagattctctgataccttcatttaatatatcaatattggcctaaaacgtattctgtaaagcttaaattggtattaactatgatcatcttgatgtctatgatagataataaacaaggtcatacataccttaa

SEQ ID NO: 133847 - DNA, 3019 bp, Homo sapiens
  misc_feature (1)...(3019): n = a,t,c or g
attcccgggtcgacgatttcgtgcctgaaggggcagtacccaagcgagccatttaacatggcggaggatgtttcctcagcggccccgagcccgcggcggtgtgcggatggtagggatncccgaccctactgaggagcagatggcagaaacagagagaaacgacgaggagcagttcgaatgcccaggaactgctcgagtgccaggtgcaggtgggggcccccgaggaggaggaggaggaggaggaggaggacgcgggcctggtggccgaggccgaggccgtggctgccggctggatgctcgatttcctctgcctctctctttgccgagctttccgcgacggccgctccgaggacttccgcaggacccgcaacagcgcaaaggctattatttatggactatccatgctaacagcttgcccgttgagaacgatatacatatgtcaggtttttgacaagaattgcagcaggaaaaaccccttgaatgcacaggtttgaaaatgatgaaccgaattacaccccttggaatcagcccctgaatgatttggggttcaattgaaaaggaacatgacaaacttcatgaagaaatacagaatttaattaaaattcaggctatagctgtttgtatggaaaatggcaactttaaagaagcagaagaagtctttgaaagaatatttggtgatccaaattctcatatgcctttcaaaagcaaattgcttatgataatctctcagaaagatacatttcattccttttttcaacacttcagctgacaaccacatgatgggggaaaattaagagttatgtgaattatgtgctaagtgaaaaatcatcaacctttctaatggaaggcagcggcaaaagtagtagaaagcaaaaggacaagaacaataacttctcaagataaacctagtggtaatgatgttgaaatggaaactgaagctaatttggatacaagaaaaaggtctcacaagaatcttttcttatctaagttgcaacatggaacccagcaacaagaccttaataagaaagaaagaagagtaggaactcctcaaagtacaaaacaagaaaaaaggaaggcagaagagccactgaaagcagaatacctgtttcaaagagtcagccgggtaactcctgaaaacgatcgagctagaaaaaagacaggcatggctttggggaaggaaggacaagattttgagatcctggcgtgagggaatttgggagaggggaacttggtcttaaatactgttgcattataaattccaacaaccgggacaagtgtcatgtttaaaagccagatgggaggaccatggaaggaaacttaaaactggatttcctccaggacagcgaagactggattgtgtttgttaaaagctttgatggaaagggacagtttaagtattttgatcactgcattttgtttgaaacttgtgtcattgatgtaatttaaaacttttgttttaaggcattacagtatttttctgtgaccatcaattaatatgagggtttgtgctaccagagttaaagcatatgctatcattgtattctttaagaaccttattttgataaaatgtaaatttgttgaacccttgccacatttagtatccccaccgcggaaatccttgttccaatgaaaaaattaaaacctgatacgaaaaaaaaaaaattccagttaacctattttgtgtctgtaggctgacctcaaccctgtaacgtaacccattaaaatgaatttctttttttttaagacagagtttctctctgttgcccaggctggagtgcagtggcgcaatttcagctcactgcaacctctgcctcccaggttcaagtgattctcctgcctcagcctcctgagtagctgggattacaggcacacaccaccacgcccagctaatttttgtatttttagtagaggcggggtttcaccatgctggtcaggatgttctccaactcctggacttcatggatccacccacctcgggcctcccaaagtgctggaggatttacagacgtggggccactgcgtcctgcctaaaatgaattttctaggatgattgaataacagtagtagtcctttgatagaagataatgacttggtttatggccttaatatactacttaattacttaagatgtttattaatagaatgataaatgtacagagtaacctataagcatgacatacttttgctttcagtagtttcatgtaaagaaaaaaacttcgaaaatagtaatacctgagtacccatgggaataatagacactggggaggtagggtggggagcgggacgaagagctgaaaaacttacctactggggactgtgctcacctacctgggtgacaggatcataccgtaccccaaacctcaacatcacacagtatactcagctaacaaacctgcccatgtgtttcctggaatctaaaataaaaatccgaaataatttttttaaaaaagaaaaagaccatagtattaccccatggggcaaaattttgtcctattagcaagaatcattttgtgtctcatttagaaacaatttgacttttgttccagtgtttaaactttttngggacaaaaatggttttggaatagatctttataacctgatgccataaataccaagattcccctgataccttcatttaatatatcaatattgggcctaaaacagtattctgtaaagcttaaattggtattaactatgatccatcttggatgtcctatggatagataataaacaagggccataccatacccttacctaaacaatttttgggtttttcaccaacattttattccttaaaaagatttagacctaaccagaattatttagcatttcgagtcatgtgctttatttagcaagtgagtaaaaatattggaatattgaagtatttgcataaaaaatcaaatggtggtgttttgtaatctctattgtatttcctattaaggtttcatatatgactttcccattgttcctaaatttgttatcctatatataaacagaaacatggttgagtcccataaaa

SEQ ID NO: 133848 - DNA, 1023 bp, Homo sapiens
atggaggggctgttcttggctgtggatgaaattgtagatggaggggtgatcctagagagtgatccccagcaggtggtacaccgggtggcattaaggctcatcaaccaaggccccagctccattagccagggtgtgctggaactcagctgtccccaggctctggaaggtcagcagctcctatatgtgaccagagttacgggactcaactggcccaccaatcaccccattaacccaaagggcctggaggaccccatcatcccttcagttcccgttaccaccacaccccagtttcccctcccagtggacgaaagagaagggaggagggggcctgaggaacagctcatcaaccaaggccccagctccattagccagggtgtgctggaactcagctgtccccaggctctggaaggtcagcagctcctatatgtgaccagagttacgggactcaactgcaccaccaatcaccccattaacccaaagggcctggagggtctgaatgctccaagtgagccatcatttgagccccaagccccagctccataccttggacctccaccacccacaacttactgcccctgctcaatccacccagattctggcttcccacttcctccaccaccttatgagctcccagcatccacatcccatgtcccagatcccccatactcctatggcaacatggccataccagtctccaagccactgagcctctcaggcctgctcagtgagccgctccaagaccccttagccctcctggacattgggctgccagcagggccacctaagccccaagaagacccagaatccgactcaggattatccctcaactatagcgatgctgaatctcttgagctggaggggacagaggctggtcggcggcgcagcgaatatgtagagatgtacccagtggagtacccctactcactcatgcccaactccttggcccactccaactataccttgccagctgctgagacccccttggccttagagccctcctcaggcactgtgcagactgcataa

SEQ ID NO: 133849 - DNA, 1695 bp, Homo sapiens
ctagtccaagtctgggactgcagctgcagctgttgagaatttgccacaactccacaaggcggcgccaacgacccggaaaaggagtctaagcccgaggctaagccgctcctgtaatgtgtttcgagattccacgcagatgggtctagactcagtctcagacaaagaaaagaatccaggcttttgtgtgtcaactccttcagcatgaaaccagctccttagcacgatacacaaggtcccccttgaccctgcctgctcaactctccaagctcttctctgttgttctctactcatgccctttgtggcttttcccacgggtgccccgtggtgaagacctccaggaggtagtgcaaacttgctgaccctagcaggtgtagctctaacacctcttttcctttgacacaggtttctagagccatctgggctttccgggaacctggaccagactctggcccagtaggatgtccccgtgtcctccccagcagagcaggaacagggtgatacagctgtccacttcagagctccgcctgcccttggcaactgggcccgtttaccccaggtaacagagcagtagttcaggggcctcaggaaggggagtcggactatgccagggtcctctcctcctgctacttggacaaaggggtgtctgttggcttgacaatgatgcctttgtccccagctgggctggagcagggtggctccctgatgtaggttgggggccttgtttctagcatgttctctacttctcgctgcacccttgaggtgtttttgaagatacgcggttacttcacgccgtggtgaagatgctccaccacagtgcttgttgtcaaaagactgggttccttttacttccattctgaactgccctcctctgcccccgcaaacagggttgattctttgcatggaaccataaacctcctgaagcctcatgaggcaatttatgtttgtagaggctgcagtttctgggttcttggcaatgattttttcctcctcactcttggatatggtgctgtagttgctgaagaggccaagggtaggggctggctcgagtgggaagggcaggatctgcttgaggtccagtgggggctgcatgatcgggggctgccgtagcagaggcaggggccctgcccggctcaggctgctggtggatggtggaagactagaggggcagggagccaacagcagatagcccttcccactttttgccctaccctcccctcccccatcaaatggttctgttttgacagctgtctccactgctgttttctgtccccagagctgggctcggggccagggtcctccagggtgtccacagaggcccaggtcttcaccacgggctggttggtggttgtaaatctcgtggagattcaagccgaggctgtcaaaagcacggctaccactgattctcatcaaggttacgcagttccgagcaggaaacgggtcttcctcgtatagaacttcactcttgcttgcagacgtctggaggcttatgtagccctgactcgtttcactgcagcagttacatagctgtctgcagctcaagtccattttgtgaacggtttgtttgttaataagctgtatgtaacttagttctgcttgtgtcgtcctcctgtgtgatatgctcaccatctgttgcagaaggacataatggatttcatctttggcaaacaagttgggcttattggccagctgtctcat

SEQ ID NO: 133850 - DNA, 333 bp, Homo sapiens
cggcacgagtattgaggaagttcctgaacttcctttggtagttgaagataaagttgaaggctacaagaagaccaaggaagctgttttgctccttaagaaacttaaagcctggaatgatatcaaaaaggtctatgcctctcaccgaatgagagctggcaaaggcaaaatgagaaaccgtcgccgtatccagcgcaggggcccgtgcatcatctataatgaggataatggtatcatcaaggccttcagaaacatccctggaatctgtcttccctgactcggctcctcaggtctttagcctccaccttgtctaagctttggtctataaagtgcgct

SEQ ID NO: 133851 - DNA, 1801 bp, Homo sapiens
  misc_feature (1)...(1801): n = a,t,c or g
aggggctgtctgcttgcctctttccacaacttgttcttggggatcctcaagcatatactgtcatcatcttggaaagaaaaggctgagaacgtaaaactgaggacagaggaggaaaagcagggtgacccctgatgttgccctagaaaatggaaaacaaaacacagcaaaacagaaaaacagaagatctgactctgcctttagccagggaaaacagtttggggggagtaaaaagtattagggaaaagagtggggcattttgcctgggaaaaaaggttttctagagccatctggggcttttccggggaacctgggaccagactctgggcccagttagggatgttccccgtgtcctccccaagcagagcaaggaacagggtgatacagctgtccacttcagagctaggagagatggaactgacttgggcagggagatcatgtccatcaccgaggcttgcagggtcttgaatgctccaagtgagccatcatttgaagccccaaagccccagcttccatacctttggacctccaccacccacaacttacttgcccctgcttcaatccacccagattctgggtttcccatttccttccaccaccttatgagctcccaggcatccacatcccatgtcccagatcccccatactcctatgggcaacatggccataccagtctccaaggccactgagcctctcaggcctgctcagtgagcccgctccaagaccccttagccctcctggacattgggctgccagcagggccacctaagccccaagaagacccagaatccgactcaggattatccctcaactatagcgatgctgaatctcttgagctggaggggacagaggctggtcggcggcgcagcgaattatgtaggagatgttacccagtgggagtacccctactcactcatgcccaactccttggcccactccaactataccttggccagctgctgagacccccttggccttagagccctcctcagggccctgtgcgggctaagcccactgcacggggggagggcaagggagtcgggatgaacgtcgggcccttggccatgaagatttctttttcctacggacaagattgtcaacttcccggtagatgactttaatgagctattggcaaggtacccgctgacagagagccagctagcgctagtccgggacatccgacgacggggcaaaaacaaggtggcagcccagaactgccgcaagaggaagctggaaacccattgtgcacttggagcggaagctggagcggctgaccaatgaaccgggagcggctttctcagggccccgcggggaggcaagccgggaccctgaaggtcatgcgccaacagtttgcaagagctgtacccgtgaacattttcccagccaccttcgggaatgaaatccaggccaaacagcctactctccctgaaagaagtaacgcgcctgcaaacaggcctgcccgaatggggacccatccttcccttgtggcccccgggggacccaagatggaggcccacagactgagcttggccccanaggggtggaactgcctgatgggattttccttcattcccttctgataaaggtactccccaaccctgagtcccagaaggagctgagttctcttagaccagaagaggatgacaatggcaacaagtgttttggaagtttccaaggtgtgttcaaagaggcttgccttgagggagggctggaatctgtcttccctgactcggctcctcagggtctttagcctccaccttgtctaagctttggtctataaagtgcgctacagaaatggcaaaaa

SEQ ID NO: 133852 - DNA, 408 bp, Homo sapiens
ctgaacttgatgcgatgggaggctgtgcaggctcgcggcggcgcttttcggattccgagggtggacccaggcccaacgccgatcccccacaacagctcatcacgatttgactgcaactctgtctctacggctcccccgggttctcgtcagtgggatttgtgctgctggaagcttcgtcctggttgccttttctcattctgtggggaccagcctgtgtgctatttcttgttgctcacatctcctgaggcccaggaccctggaggggaagaagaagcagagagcgcagcccggcagcccctcataagaaccgaggccccggagtcgaagccaggctccagctccagcctctcccttcgggaaaggtggacagtgttcaagggtctgctgtggtacattgttcccttggtc

SEQ ID NO: 133853 - DNA, 762 bp, Homo sapiens
atgggaggctgtgcaggctcgcggcggcgcttttcggattccgagggggaggagaccgtcccggagccccggctccctctgttggaccatcagggcgcgcattggaagaacgcggtgggcttctggctgctgggcctttgcaacaacttctcttatgtggtgatgctgagtgccgcccacgacatccttagccacaagaggacatcgggaaaccagagccatgtggacccaggcccaacgccgatcccccacaacagctcatcacgatttgactgcaactctgtctctacggctgctgtgctcctggcggacatcctccccacactcgtcatcaaattgttggctcctcttggccttcacctgctgccctacagcccccgggttctcgtcagtgggatttgtgctgctggaagcttcgtcctggttgccttttctcattctgtggggaccagcctgtgtggctccagctccagcctctcccttcgggaaaggtggacagtgttcaagggtctgctgtggtacattgttcccttggtcgtagtttactttgccgagtatttcattaaccagggactttttgaactcctctttttctggaacacttccctgagtcacgctcagcaataccgctggtaccagatgctgtaccaggctggcgtctttgcctcccgctcttctctccgctgctgtcgcatccgtttcacctgggccctggccctgctgcagatggagtctcgctctgttgcccaggctggaatgtag

SEQ ID NO: 133854 - DNA, 1818 bp, Homo sapiens
atgaccgctcggcgaagacaaactagaactgacacacgaaacaacacccaccagcggaagatctttctccttgttttcggatttacacaaccgctgcggcgaggccatcgcacggcaacaaaaaccagggcacacctcagaaactccaagcgggaaccacccaacccagaaataaaaacccccacccgccccccccctcccattttattaaatccaaatcggcgctatacgatggcagtagtcagtagccacaagcagacgaaccaagcacgcacggaccacagcaccccgcaccgcccacacacaaggcgacacggacacaactcttttcaagtattcttggagtgcccccgcgcacccacgggggccaccctccaccgctccccccccgacgacacgcatacccgcgtactccaaaacggacccccccggcgcctctccaaaggccctatacaaggacacttgccgttttctttcctaggtatccaaagtgtactagcgtgggcacttcgggtagtgcccaaaaatcggcgctatacgatggcagtgctcttttcattacctgaaaatcggcgctatacgatggcagtaaccattggtcgagctatcgtggctgctgatttctttatcatctttcagctctggcagaatacggttcgccagctgtttacccagttccacgccccactggtcgaagggaagcttggctggcaaggtgtcggtgtgaccatcccagtgcttgtcctccccccaggtgtggtcttcgctagcatctcatcaggccttggggaggtcaccttcctctccctcactgccttctaccccagggccgtgatctcctggtggtcctcagggactgggggagctgggctgctgggggccctgtcctacctgggcctcacccaggccggcctctcccctcagcagaccctgctgtccatgctgggtatccctgccctgctgctggccagcaactcactctccccacggcaagtgaaaggcatgtcgatctgccgcgcgcaaatcggtcaacctgtcggctctccggaaatgtctcggagtagttcctcgcccagcgtatttaacgtcgtagttcgggttgcccctcgggtagctcccggaagaaacgaaagaggagctgtccacccccatgggttggaccataggatgcgcacttattcaggagatcatcgtgcttggttgaccaccctcaagttatacgggtgtgtgaaggcacaaagacagcgtaacggcattagaagtccaggaccagatggattcacagccgaattctaccagaggtacaaggaggaactggtaccattccttctgaaactattccaatcaatagaaaaagagggaatcctccctaactcattttatgaggccagcatcatactgataccaaagccgcgcacagacacaaccaaaaaagagaattttagaccaatatccttgatgaacattgatgcaaaaatcctcaataaaatactggcaaaccgaatccagcagcacatcaaaaagcttatccaccatgatcaagtgggcttcatccctgggatgcaaggctggttcaatatacacaaatcaataaatgtaatccagcatataaacagaaccaaagacaaaaaccacatgattatctcaatagatgcagaaaaggcctttgaaaaaattcaacaacccttcatgttaaaaactctcaataaattaggtattcacgggacgtatctcaaaataataagagctatctatgacaaacccacagccaatatcatactgaatgggcaaaaactggaagcattgcatgcgttgtga

SEQ ID NO: 133855 - DNA, 1131 bp, Homo sapiens
atgggaggctgtgcaggctcgcggcggcgcttttcggattccgagggggaggagaccgtcccggagccccggctccctctgttggaccatcagggcgcgcattggaagaacgcggtgggcttctggctgctgggcctttgcaacaacttctcttatgtggtgatgctgagtgccgcccacgacatccttagccacaagaggacatcgggaaaccagagccatgtggacccaggcccaacgccgatcccccacaacagctcatcacgatttgactgcaactctgtctctacggctcccccgggttctcgtcagtgggatttgtgctgctggaagcttcgtcctggttgccttttctcattctgtggggaccagcctgtgtgctatttcttgttgctcacatctcctgaggcccaggaccctggaggggaagaagaagcagagagcgcagcccggcagcccctcataagaaccgaggccccggagtcgaagccaggctccagctccagcctctcccttcgggaaaggtggacagtgttcaagggtctgctgtggtacattgttcccttggtcgtagtttactttgccgagtatttcattaaccagggacttgtaagtgaggggtgcctttttaggccatttcctttttctgccctcaatgtctgtgaagtgaaccttgttaaagtcagtcaacaccagggtggatgggttgccgttgtcacccaaggaaaaaagcatcccatttcctgccgccgtttgaatgttgacgggatgaacataataagcaatgacggcagcaataaactcaacaggagcaggaaagcgagggtatcctacaaagtccagcgtaccataaacgcaagcctcaacgcagcgacgagcacgagagcggtcagtagcaatccaaactttgttactcgtcagaaaatcgaaatcatcttcggttaaatccaaaacggcagaagcctgaatgagcctcggaatccgaaaagcgccgccgcgagcctgcacagcctcccatcgcatcaagttcaggtcccccgagggtccagggtcatagagtgtccaaagggggctcccacgggagggatgagggttgtttgttccagccaacacctgaggatagggccccat

SEQ ID NO: 133856 - DNA, 1858 bp, Homo sapiens
tggagcccccagcttccttgatggatcgcgggggcagctgccctagacaagccggagctgggaccggcaatcgggcgttgatccttgtcacctgtcgcagaccctcatccctcccgtgggagccccctttggacactctatgaccctggaccctcgggggacctgaacttgatgcgatggataggctgtgcaggctcgcggcggcgcttttcggattccgaggggggaggagaccgtccctgagccccggctccctctgttggaccatgagggcgcgcattggaagaacgcggagggcttctggctgctgggcctttgcaacaacttctcttatgtggtgatgctgagtgccgcccacgacatccttagccacaagaggacatcggggaaaccagagccatgtgggacccagggcccaacggcgattcccccacaacagcttattcacgatttgactgcaactctgtcttttacgggtgctgtgctcctgggcggacatcctccccacactcgtcatcaaattgttgggctcctcttgggctttcacctgctgccctacaggtctggcccccgggttctcgtcagtggggatttgtgctggtgggaagtttcgtcctgggtttgccttttctcattctgtgggggaccagcctgtgtgggtgttggtctttcgctagcatctcatcaggccttgggggaggtcaccttcctctccctcactgccttctaccccagggccgtgatctcctggtggtcctcagggactgggggagctgggctgctgggggccctgtcctacctgggcctcacccaggccggcctctcccctcagcagaccctgctgtccatgctgggtatccctgccctgctgctggccagctatttcttgttgctcacatctcctgaggcccagggaccctgaaaggggagaagaagcaaaaaggccaggccggccagcccttcataagaaccgagggcccggaagtggaagccaggctccagctccagcctctccccttcgggaaaggtggacagtggtcaagggtctgctgtgggtaccattgttcccttggttcgaggttacttttccgaagtatttcataacccagggactttttgaactccctcttttttctggaccacttccctgagtcacgctcagcaataccgctggtaccagatgctgtaccaggctggcgtctttgcctcccgctcttctctccgctcgatgtagtattggtttcacctggggccctggccctgttgcaatgccttcaacctgggtgttcctgctggcagacgtgtggttcggctttctgccaagcatctacctcgtctttcctgatcattcctgtatgagggggctccctggggaagcgcaagcctacgtgaaaaacctttccaacaacattcgcccttggagaccaagtgatgagcaccgggaagtttgcaaatggcggccaccctgccatctctgacacactggaggattcatcctgtcgggggcttccctggctttgcctctgcatgacttccttctgcccagctctcctgatactcgggatcctcaggacgcaggtcacattcacctgtgggcaagagggacaggttatcaatagtctggctgtctatcgtcatcgtgagactgactttggtgtaggagttcgagaccaccctggccaacatggcaaaaccccatctcccacgaaaaattggataatttgataattatcattattgggtttctgagacgttacacatttaacgttctcttctgcacaagttgcctttgtgtgagtatactaactttctgtagaggtatacttgtaatcacaaataagaataaattatataaaac

SEQ ID NO: 133857 - DNA, 1184 bp, Homo sapiens
atgacaattgtgggacatacggatgttgtaaaagatgtggcctgggtgaaaaaagatagtttgtcctgcttattattgagtgcttctatggatcagactattctcttatgggagtggaatgtagagagaaacaaagtgaaagccctacactgctgtagaggtcatgctggaagtgtagattctatagctgttgatggctcaggaacctaaattttgcagtggcctccctgggataagatgctaaagatcctggtctacagtccctacagatgaagaagatgaaatggaggagtccacaaaatccgaccaagaaagaaaccagaagaccagaacagttgggacttaaccaaggactccccatagtgaccctctctggccacatggaggcagtttcctcagttctgtggtcagatgctgaagaaatctgcagtgcatcttgggaccatacaattagagtgtgggatgttgagtctggcagtcttaagtcaactttgacaggaaataaagtgttaattggaatttcctattctcccactttgtaaacgtttagcatctggaagccacagataggcatatccagactgtgggatccccgaactaaagatggtttctttggtgtcgctgtcccctaacgtcacatactggttgggtgacatcagtaaaatggtctcctaccccatgaacagcagctgatttcaggatctttagataacattgttaagctgtgggataccaagaagttgtaaggctcctctctatgatctggctgctcatgaagacaaagttctggagtgtagactggacagacacagggctacttctgagtggaggagcagacaataaattgtattcctacagaatattcacctaccacttttcccaatgtttgggggcatggaaatgtgaacaattaatttgactaaatagagattattttctgtaaaatgaaattggtaagagaaccaatgaaattacatagatgcagatgcagaaagcagccttttgaagtttatataatgttttcacccttcataacagctaacgtatcactttttcttattttgtatttataataagataggttgtgtttataaaatacaaactgtggcatacattctctatacaaacttgaaattaaactgagttttacatttctctttaaaggtaaaaaaaaaaaaaaaaaa

SEQ ID NO: 133858 - DNA, 465 bp, Homo sapiens
  misc_feature (1)...(465): n = a,t,c or g
cggcatttccatcattgaactgcacgatgaacgggtggcccatcaattcttcaggtgctggcctttcttttggctgttttcgcatacactgagtgatgaaatgtacaaatggctccgagaactctccaactggaaggacgggcgaatcctcatcaacaatgcactgcagaagctggagaggcattaaagatccctggtttttctgaatctgaggatatggaaacctcccaagagcaagctccataaaagagattcctaagctccagacatcagaatgaattccatactgctcccctgaaatcctttcaggtgctactgcaattcttccaaggacatgttctggcattttcctatatacatccaaagatcccccatccatgaattctgtacatattgaaatcctgttttctacaaaaaatgctccataaaatccgaattcgnnngnnnggnctaatgtctaccaan

SEQ ID NO: 133859 - DNA, 413 bp, Homo sapiens
cagtatggaattcattctgatgtctggagcttaggaatctcttttatggagcctctccagcttctgcagtgcattgttgatgaggattcgcccgtccttccagttggagagttctcggagccatttgtacatttcatcactcagtggtgagcccgtttacaaacatgccatgccctcaatgtaaatgatacatgccattaactcggcagctccgtgagaccttatggctctccctgcatccttttggagacaggagggacttcggggccttgggcagatggggcagcaaagctgaagaaattgtttaaattatgtaaacgttatttacacaaagggtcataagcatacttcagagcctttttcctgatttaataaactgctgaaagtcatgatacttctttaagcacaaaaaa

SEQ ID NO: 133860 - DNA, 1717 bp, Homo sapiens
atgctgtggctagcccttggcccctttcctgccatggagaaccaggtgctggtaattcgcatcaagatcccaaatagtggcgcggtggactggacagtgcactccgggccgcagttactcttcagggatgtgctggatgtgataggccaggttctgcctgaagcaacaactacagcatttgaatatgaagatgaagatggtgatcgaattacagtgagaagtgatgaggaaatgaaggcaatgctgtcatattattattccacagtaatggaacagcaagtaaatggacagttaatagagcctctgcagatatttccaagagcctgcaagcctcctggggaacggaacatacatggcctgaaggtgaatactcgggccggaccctctcaacacagcagcccagcagtctcagattcacttccaagcaatagcttaaagaagtcttctgctgaactgaaaaaaatactagccaatggccagatgaatgaacaagacatacgatatcgggacactcttggtcatggcaacggaggcacagtctacaaagcatatcatgtcccgagtgggaaaatattagctgtaaaggtcatactactagatattacactggaacttcagaagcaaattatgtctgaattggaaattctttataagtgcgattcatcatatatcattggattttatggagcattttttgtagaaaacaggatttcaatatgtacagaattcatggatgggggatctttggatgtatataggaaaatgccagaacatgtccttggaagaattgcagtagcagttgttaaaggccttacttatttgtggagtttaaagattttacatagagacgtgaagccctccaatatgctagtaaacacaagaggacaggttaagctgtgtgattttggagttagcactcagctggtgaattctatagccaagacgtatgttggaacaaatgcttatatggcgcctgaaaggatttcaggggagcagtatggaattcattctgatgtctggagcttaggaatctcttttatggagcttgctcttgggaggtttccatatcctcagattcagaaaaaccagggatctttaatgcctctccagcttctgcagtgcattgttgatgaggattcggcccgtccttccagttggagagttctcggagccatttgtacatttcatcactcagtgtatgcgaaaacagccaaaagaaaggccagcacctgaagaattgatgggccacccgttcatcgtgcagttcaatgatggaaatgccgccgtggtgtccatgtgggtgtgccgggcgctggaggagaggcggagccagcaggggcccccgtgaggctgccgcagggcactgaaagcccaggaccagtaaccaaggagaacaacccacccgtcgcccttctccgtatgctgcctgcgccagaagagcttttgctgggccctgggcttccctgccctcgccttcacctctgtcagcaggtggccttgcctggggagccccatgtgtggcccaccccaccaggccatccccataccttctggtttgaaggcgctgacactggcagagaggtaaagggtggggcattgagaatggaggctcccagggtccctgcccacttctgttttcctaatgtttttctctataaagggtcaggcccgtcagcatcactgatgggaataaaagtattaatgctttgtgacagcc

SEQ ID NO: 133861 - DNA, 2949 bp, Homo sapiens
  misc_feature (1)...(2949): n = a,t,c or g
gactctgaaacctctgacgcccccgcgggacctgatgggcagccacgccgcaaccgcaccgggccacccaccaccattatcacttctccacttctcatcatcacacactccctttatgctgtgattcagaaaaaccagggatctttaatggattcgcccgtccttccagttggagagttctcggagccatttgtacatttcatcactcagtggggctgtgtcagcaaggatctttggttacaggtgacagaaacccaatttggacaatctaaaggaaacaagaaatgtgttaagaaggccctggcatgtgtcccgggacccatgctgagcatgcagcggcacctcagaggcttttcactggcatgggagagtgtgaataacaaattggatgcacctgagattcggatgattagtgtgttttgtgaatctccacgacttgaggggaactacaacacatttaaagatgctgcaagaaatcagaagggagcctgtgagtggacggatgctactcaggaaaacacatacaccaaaataagctcagctaagctttgcctctggaatactctcgctctaactctggggaaggcagatcggcaaccctggaatgctggtttatgcaaggcctgtggcaccagctctggactggaaagtgccttctccaaaacaagctttcctcccgtcaaggaggtcacaccagtcaccaccatcaaaaacgcatttcaggcttctgtacatttaattttcttcaacatcaccctggaaaccacaggaaaacaaaaaaagaacaacgaaaaaacccttactcaagaggccagtggcacaattctgccattcacaaggatcagcttcctccgacaaactcatgagtgtcggcaccccaagtgtctagccacctcaccatggcccactggagtcatcctgtgccccatccaacaccgtacaacactggtcctgcggctgctctctcagaccagggacaggagctgggtgggtctcctggcactggccaaagcgcggggagctgtccgtagcttggtgctgaacggggacgcagagtcgacgctgcacaccccctggagcggcggcatggaggctctcaccactcagctggggccggggcgcgagggcagttcctcgcccaactccaagcaggagctgcagccgtactcgggctccagcgctctcaaacccaaccagatctccaacaccctcctcaagaactacagctataatgagatccacaaccgccgcgtggccctgggcatcacgtgcgtgcagtgcacgccgagaagctgcggcatgatcactaagcgagaggccgaaagaatgtgcaagtcgttcctgggcgagcacaaaccacccaagctgcccgagaacttcgccttcgatgtggtgcacgagtgcgcgtggggctcgcgtgtgcatcaagggcggctacaacagtgtgtacccaagcccaacaagttcatcttccactcgcaccgaactccgcacgcaaagtacacgcagcccgacgccgccaacttcaactccgggcgtcctcacctcaaactcagtcacaagtcgcccacagacgaactgagccacgccccccagcaagaaaagcccatgtttaatggcggcacgcgcaagcgcaccttctccctacaaggaggcggcggaggcggtcccaatggcgggtcgggagggcccggtggcggcgccggcgtacgaagctacccggtgatcccggtgcccagcaaaggctttgggctcctgcaaaagctgcccccaccacttttcccccatccttacggcttccctacggccttcggcctatgccccaaaaaggacgacccggttttaggcgcgggcgagccaaagggcggtcctggcactgggagcggcggcggcggcgcggggacaggcggggccaagccaaggccgtggcggcagccgtggcggcggcagcggcggcggcagcggcagctgctggcagcggtgccccagagcccctggacggtgccgagccagccaaagagagtggcctcggcgcggaggagcgctgcccgagcgctctgtcccgcgggcccctggacgaagatcgcacggacgaggcgctgccaccgcccctggccccgttgcctgcgccgcccccgcccgcccgcacgcaaaggctcctacgtgtcggccttccggccggtggtcaaggacaccgagagcatcgctaagctctacgggagcgcccgggaggcgtacggcgcggggcctgctcgggggccgggacccggcgctgggagcggcggctacgtgagcccggactttctgagcgagggcagctccagctacaattccgcctcgcccgacgtggacaccgcggacgagcccgaggtggacgtggaatccaaccgcttccccgacgacgaggacgcccaagaggagaccgagcccagcgcacccagcgcagggggcggcccagacgctggccggcccgcatttggggacttggcagccgaagacttggtgcggagacctgagaggagcccgccaagcggcggcggcggctacgagctgcgagagccttgcgggcccctaggaggccccgcgccggccaaggtgttcgcgcccgagagggatgagcacgtaaagagcgcggcggtggcgctggggcccccggcctcctacgtatgcacccccgaggcccnacgaacccctcttacctgcccctgtatcccaggcgaagatgggcttaccttggatgtcacaggaactcatttggtggagaaagatatcgagaacctggccagagataccctgtgtaacgaactcgaccaggagcggaaggcgcgctatgccatccagcagaaattgaaagaagcccaagacgccctgcaccatttctcctgcaagatgctgacgccccgccactgcactggcaactgctccttcaagccaccgctgttgccctag

SEQ ID NO: 133862 - DNA, 2577 bp, Homo sapiens
tcctgaagagatgctatgttacctttgaatcagaccctgatggacactgagaagcaggttgctctgcaagcagcagagagatttggggatgagctttgtatcacacatagtgccagggaagggggtgaatattatccaaccagaagagaagcagtatcaatggatgaccctaaatgggatcccatgcccctatcctgggcctatataaacctgagaccctagtgggcagacacacgagcagctggatgtcatgaggaacacatcggcagaagaagatgtaagtggctggtcatagagaggacgtcgagaggagcactccagcaaaagagttagagccccatagcctgcccatctctatgctcccctagaggttttgagcagcaggacactgaagaagcgagctacacccccatcgcatgttctgcgaggtggatgagagaaccctccccacctaactccaaccttcttgcctctcttataaggacgcttctgataacatttcactcatctggacaatccagtcttgcaaatgagggcatcaggggttatcctgatgaacgacagttggcctaaagtggactggttcttggtgccccaggtggtgcacatggtgccaatggtagcagtcacagctctgggtggacaagtctttgggtgcccagatgccatgtgcaggcaccagaagtggcagtggaaggctgggaaggctggtatttgggtccccagacaacacacacaggccgtggtagtggcaatggcagtcgcagacattcagaggccttcatggtggtggcagtggggcctaagagaaccaatccctggattcccaagcagctcgtgcagcctcctaatgtgctggactgcctgttttctgagttgtagggcactcaggtgccagggatgtgcccgtcttctgaattcaactggtgtatcaatgctggctgggattgggctggcagtgggtcctctctcgtcacagggctggagtgggaagagagctgctggagccatggtttctctcgggtggtgagatttgcagccaggtctagcttggcaacctgggaccagttttgcagccataaaaaaggattacttcatgtcctttgtaggacatggatgaagctggaaaccatcaatgcaattcccatcaaaatatcaccataattcttcacagaactagaagaaacaatcctcaaatttatatggaatcaaaaaagagcctgcatatccaaagcaagagtgaatacaaacgataaatctggaggcatcacattacctgacttcaaactatacaacgaggctatagttgccaaaacaacatggtactggtataaaagcaggcacatagaccaagagaagagaagagaagagaagagaagagaaaagaaggatccttctgtgccagaaacccttaagaaaaagcaaaggaatttcacagagctaaagatcaagcgccttgagaaagaagtttgcccaacagatgctttcgaaaggcaaggcagcaagctaatctatgaaaaagcaaagcactatcccaaggaaatataggaaaatgtacagaacttgaatttcgaatgggcgaggatgggcaagaaaaagctggccaactttatttggtcctcaagaaccccaaattcgccgttgctcataagaaatcagaaggtatcaatgggagtgagccccacagcttcgaaaagttgttgtcagctttcttcgcccttcgtcaaaatcttcaaatgaaacctttgtgaaagccctcaaacaaaggccctccgattaaaccatgccctgaggattggtaagaggccccatataattgccatgggggtaccccccccaatcctgaagtccagtaaatgaaccctaatcctacaagccgtggttatggccaaaatccaataagaagcggaattgcctttgacagataacgctttgattgcctcgatctcttgggtaaattccgccttcatctgcatgcgacgatttgattcatgagatctatactgtttggaaaacgcttcaaaagaggcaaataacttcctgtggccccttcaaattgtccttctcccacgaggtggaaatgaagaaaaagaccacccattttgtagaaggtggagatgctggcacacagcggagtgaccagatcaacaggcttattagaagaatgaactaaggtgagagacctcatcctgagaaaggttgagttaatgttagagtataagtggtggtaatcttgaatacttttcccattaaatattgatgggggtttgaattttaatcagtgcttttgtggggagtgggggtcaactatcttaatgattacaggtgggtttgtttacgtgcttttgaggacctttctggaggaaaggaaaagcctgttttggggagtctttaaagatggaaattgggtggtcttaaaaatgtaaactcaatcattactttataactgcctagtttatgttaattgttagctgcctaaagtgttttctaatggttttcttttttcctttcaggtgtctaccatgattatttttctaagctggttggttaataaacagtacctgctctcaaattgaa

SEQ ID NO: 133863 - DNA, 361 bp, Homo sapiens; identical to SEQ ID NO: 115540

SEQ ID NO: 133864 - DNA, 428 bp, Homo sapiens
tatatggcttcctctcccccatcaccccttaatcctgaaacagctgtgaggtagataccattatctgcactttatataaatacttagtcttctacggctaagagcagggttcaaacccaggtattccaacctgtgctatttggagtatattaatccacctgtctttactaaaggtgaaaacttttgcatgtggttcaatagtcagggagaagttagaaaaaaagtaatggaagaataatcatgaatttgtatgcttctatacattaactagctctttctccctttttccagagttctcttggaacggttgattgtaaataggccacatccttggggtcttcttattaccttcattgagctgattaaaaacccagcgtttaagttctggaaccatgaatttgtacactgtgcccccggacgcgtgggtc

SEQ ID NO: 133865 - DNA, 2239 bp, Homo sapiens
atgagtttcctgtatgaattattaagacttttaaagtttgcgtttttaaagaagtttaaaggcatttatatgcagtatattgagtatggacaagcagtctagagatcctcctgtgaaaatgcaaggctctatcacaacccctggaagtattgcactggctcaggcccaggctcaggcccaggttccagcaaaagctcctcttgctggtcaagttagcactatggtaaccacctcaacaactaccactgttgctaaaacggttacggtcaccaggccaactggagtcagctttaagaaagatgtgccaccttctattaatactacaaatatagatacgttgcttgtggccacagatcaaactgagagaattgtggagcccccagaaaatatccaggagaaaattgcttttattttcaataatctctcacagtcaaatatgacacaaaaggaggagctggtgaacaacacagagttggtgcagagctaccggcagcagattgggaacgtggtgaaccaggccaacctgcagctcttctggaacatgtacaacagccgcagagacctggacattaaccggcctggaacggtgcccaatgccaagacgctccgctgccccgtgatgctggtggttggggataatgcacccgctgaggacggggtggtggagtgcaactccaaactggacccgaccactacgaccttcctgaagatggcagactctggagggctgccccaggtcacacagccagggaagctgactgaagccttcaaatacttcctgcaaggcatgggctacatgccctcagccagcatgacccgcctggcacgctcccgcactgcatccctcaccagtgccagctcggtggatggcagccgcccacaggcctgcacccactcggagagcagcgaggggctgggccagttaaacttgaagtttgaaatcgaggttctctgcaagaaccttgcattagacatcaatgagctaaaacctggaaacctcctaaaggataaagatcgcctgaagaatttagatgagcaactctctgctccaaagaaagatgtcaagcagccagaagaactccctcccatcacaaccacaacaacttctactacaccagctaccaacagcacttgtacagccacggttccaccacagccacagtacagctaccacgacatcaatgtctattcccttgcgggcttggtaccacacattactctaaatccaacagcccatccacagttgaagcagtgtgtgcgtcaggcaattgaacgggctgtccaggagctggtccatcctgtggtggatcgatcaattaagattgccatgactacttgtgagcaaatagtcaggaaggattttgccctggattcggaggaatctcgaatgcgaatagcagctcatcacatgatgcgtaacttgacagctggaatggctatgattacatgcaggaaccttgctcatgagcatatctaccaacttaaaaaacagttttgcctcagcccttcgtactgcttccccactacaaagagaaatgatggatcaggcagctgctcaaatttaagctcaggacaattgttttcttctttcaaggttggtggtgtggacccaaagcagttggctgtttacgaagagtttgcacgcaatgttcctggcttcttacctacaaatgacttaagtcagcccacgggatttttagcccagcccatgaagcaagcttgggcaacagatgatgtagctcagatttatgataagtgtattacagaactggagcaacatctacatgccatcccaccaactttggccatgaaccctcaagctcaggctcttcgaagtctcttggaggttgtagttttatctcgaaactctcgggatgccatagctgctcttggattgctccaaaagtcaatggagaatggcttaaactacatggctgtggcatttgctatgcagttagtaaaaatcctgctggtggatgaaaggagtgttgctcatgttactgaggcagatctgttccacaccattgaaaccctcatgaggattaatgctcattccagaggcaatgctccagaaggaatggatataacaactaggcagaaggtcaacaagaaaagagaaggcttcaacgataccataaatcaaccagctacacctaatagacaatctatagaacacttgacccaacaagagcagaatatgcagtcttctcaaatgcacatggaacattctccagagtag

SEQ ID NO: 133866 - DNA, 4071 bp, Homo sapiens
aagaatcctgaatttaacaagatggttctgaatgagacctacagaaacattaaagtgctcctgacctctgataaagctgcagccaatttctcagatcgttctttgctgaagaacttgggacattggctaggaatgatcacattagctaaaaacaaacccatcttacacactgacttggatgtgaaatcattgctgctagaggcttatgttaaaggacaacaagaattgctctatgtagtgccctttgttgccaaagtcttagaatctagcattcgtagtgtggtttttaggccaccaaacccttggacaatggcaattatgaatgtattagctgagctacatcaggagcatgacttaaagttaaacttgaagtttgaaatcgaggttctctgcaagaaccttgcattagacatcaatgagctaaaacctggaaacctcctaaaggataaagatcgcctgaagaatttagatgagcaactctctgctccaaagaaagatgtcaagcagccagaagaactccctcccatcacaaccacaacaacttctactacaccagctaccaacaccacttgtacagccacggttccaccacagccacagtacagctaccacgacatcaatgtctattcccttgcgggcttggcaccacacattactctgaatccaacaattcccttgtttcaggcccatccacagttgaagcagtgtgtgcgtcaggcaattgaacgggctgtccaggagctggtccatcctgtggtggatcgatcaattaagattgccatgactacttgtgagcaaatagtcaggaaggattttgccctggattcggaggaatctcgaatgcgaatagcaagcttatcacatgatgcgtaacttgacagcttggaatggctatgattacatgccagggaacctttgctcatgagcatatctaccaactttaaaaaaacagtttttgccctcagcccttcgtactgcttccccacaacaaagagaaatgatggatcaggcagctgctcaattagctcaggacaattgtgagttggcttgctgttttattcagaagactgcagtagaaaaagcaggccctgagatggacaagagattagcaactgaatttgagctgagaaaacatgctaggcaagaaggacgcagatactgtgatcctgttgttttaacatatcaagctgaacggatgccagagcaaatcaggctgaaagttggtggtgtggacccaaagcagttggctgtttacgaagagtttgcacgcaatgttcctggcttcttacctacaaatgacttaagtcagcccacgggatttttagcccagcccatgaagcaagcttgggcaacagatgatgtagctcagatttatgataagtgtattacagaactggagcaacatctacatgccatcccaccaactttggccatgaaccctcaagctcaggctcttcgaagtctcttggaggttgtagttttatctcgaaactctcgggatgccatagctgctcttggattgctccaaaaggctgtagagggcttactagatgccacaagtggtgctgatgctgaccttctgctgcgctacagggaatgccacctcttggtcctaaaagctctgcaggatggccgggcatatgggtctccatggtgcaacaaacagatcacaaggtgcctaattgaatgtcgagatgaatataaatataatgtggaggctgtggagctgctaattcgcaatcatttggttaatatgcagcagtatgatcttcacctagcgcagtcaatggagaatggcttaaactacatggctgtggcatttgctatgcagttagtaaaaatcctgctggtggatgaaaggagtgttgctcatgttactgaggcagatctgttccacaccattgaaaccctcatgaggattaatgctcattccagaggcaatgctccagaaggattgccccagcttgattggaagtagtgcggatccaactatgaagcaatgatttgatcgtgctcatggaggcccaaactttatgatgcattctgggatctctcaagcctcagagtatgatgaccctccaggcctgagggagaaggcagagtatcttctgagggaatgggtgaatctctaccattcagcagcagctggccgcgacagtaccaaagctttctctgcatttgttggacagatgcaccagcagggaatactgaagaccgatgatctcataacaaggttctttccgtctgtgtacttgaaatgtgtgttgaaatcagttaccgtgctcaggctgagcagcaggacaatcctgctggcaatcccaacatgatccgagccaagtgctatcacaacctggatgcctttgttcgactcattgcactgctcgtgaaacactcaggggaggccaccaacactgtcacaaagattaatctgctgaacaaggtccttggtatagtagtgggagttctccttcaggatcatgatgttcgtcagagtgaatttcagcaacttccctaccatcgaatttttatcatgcttctcttggaactcaatgcacctgagcatgtgttggaaaccattaatttccagacacttacagctttctgcaatacacttccacatgttgaggccctaccaaagctccctggctttgtatatgcctggcttgaactgatttcccatccggatatttattgcaagaatgctgggcacataccgccacaagcagaaggtgggtggcctatggtatgcacagctacctgattgatttaattccaaattatttaagcgcctttccttagaaatgtggaactcaccaaaacctatggcaaatcctctacaaggggcactttaagaagtgcctgctggttcttttgcatgatttcccagagttccttttgtgattaccattatggggttctgttgatgtgatcccacctaattgtatccagttaagaaatttgatcctgagtgtcctttccaagaaacatgaggctccccgacccattcactcctaatctaaaggtggacatgttgagtgaaattaacattgctccccggattctcaccaatttcactgggagtaatgccaccttcagttcaaaaaggatttggaggcctatcttaaaactcggttcaccagttcactttcctgtctgatctgcggcgaacccttacaggtattccatggaaccgggggattcggttacaacctccagcttcatcaatggcactgggtgcttctaatgtcggggactcaaggccattgcggcacatccacaacaaggggcaggcacacctttcaatggaggcaccattcactcacttcaggcacacatgggattatctttccaggaattttgggctgtgggatttgggacactggaggggtcgctattctcttttttggaatggcaatttggcaaatcagcttccgggtaccccaaataggcacactcactaccttcaggttggaaccatggcggaaccttttttgcagagggccaatacgggaagccatcccaagaacagatcacaagagtcctcttgggaacggttgattgttaaataggcccacatccttggggtcttcttattaccttcattgagctgattaaaaaccagcggtttaaggttctggaacccatgaaatttgttacacttgtgccccaggaaattcggaaaagttatttccagtcgggtcggcacagttgctggcatggggacaggaagggcagggccccagcaagttaattgggagggggacagggttgcccagttagggacggaaacttgcatctctgttgtacgtgttcagtcttggaggtctcacttgcaccgagttcataaaactgactgaagaatcctttcagctccttcctgaactttccccaggccctttggttttgtgggtaatctggcccaactaactggtggggatcagccctcctggcctaatgtgggcacggttcccaaggtttaaatgccatttttttgacccttggccaaaatttagaagatgctgtgaatatcattttgaaacttgtgtaaatacatgaaagagaaaaaaaaaa

SEQ ID NO: 133867 - DNA, 1817 bp, Homo sapiens
  misc_feature (1)...(1817): n = a,t,c or g
aggggctagaaaagagcgtcgatgccggcggcagtgatgagtcctaggaggcgctggctctttggcggctcggaggagccgctgcttgctgctgctgctgctgctgctggtggcccctttgcaagatgtattgctgtccttgaatattagcccatttgaaaacgcctcggaagttcagccatcagtatgtccaagtacaaacttattatgttaagacaatggagagggtgcttggaataaggagaaccgtttttgtagctgggtggatcaagaaactcaacagcgaaggaatggaggaagctcggaactgtgggaagcaactcaaagcgttaaactttgagtttgatcttgtattcacatctgtccttaatcgggccattcccaccgcccggcttgatcctgggaagagctaggccaggaatgggtgcctgtggaaagctcctggcgtctaaatgagcgtcactaatggggccttgaatcggtctcaacagggagcagaatggcttttgaatcatggtgaaagaacaagtgaggctcctggagaagaagctacaatgtaacccccgcctcccattgaggaagtctcatccttacctaccaagaaatctacaaccgacccggaggtataaaagtatgcgatgtgccctytggatcaactgccacggtcggaaagctttaaaggatgttctgggagagattccttccctattgggaatgaaaggattgctcccgaagtatttacgtgggcaaaaccattctgatatctgctcatgggaaataggcagtaggggcactcctaaaacacctgggaaggtatncttcaggattgaagacatccatcaacatttactctttcctactgggagtccccattcttctgggaattggatggaaaacctgcgtgctgttgggcctcactcaattcctgggtgaccaagaggcgatccaagcagccattaagaaagtagaagatcaaggaaaagtgaaacaagctaaaaaatagtctttctcaactgttggctaagaagaaatgcaaaagaagtggcataggagtgtgttatgggtgctgaactctctctctttttccccgattttccagagctaggctgtggagtaaagtccgcataggttacttagggaacctattgtgtcccaagataacgcttttaggatgcctcagtgcttatgtcatagccttatgagttagctttcttgctagcccccttagtcggtcacaacatagttacctagtggggcttaatgaaggtccataagtttctgagatgggagaagcaacaaagtagagatgacagttaaagggtatttatcattcaagaaattcattattgagtcaccaattgacaggcactattctaatccagtagtccacctttaatatttaataaaaatttttctgggataaccagtaagggatattgggataatatccccgtatgtatttattacctagtcctttccccctaggaaaagggatactttgataattaaggccagaggccccattagttgaggaaagtcacagattctattttctcccaagaaagcccaacaacccacccacccacaatgacagaaatgacaacaaggccctttaacttgtcttcctagtttagagacatcccttcatttgacatttagtagaattcctctttggccacaagaataaggcagcaaataaacaactatggctgttgaggttctcattttggtttgttttaattttttgaactttgggtacctgtaattagtttaaaaataaagttcctgataataaagtgactgaaaatggcatcccc

SEQ ID NO: 133868 - DNA, 1620 bp, Homo sapiens
atccgagactctgtctaaaaaaaaatagtattaaagatactctaaatttggaaagggaaatgaggttattacaatactaagcatctgacaggtcacttgtcatggctgaacaaagctgggataaaattacagcatttcaaatcccctcttcaagatggttgggtgtcaagttactttaagattttcttttcaaaattaaaatcactacatttcattgtttcaatactcacaggacacctgtaagctcttattcagaaatcaaatgacaatttctcaaatttttctatgtattttctctggtgttttaatggttttttttctaattattactacttcacaagtttctttcacaaacttcttcacagggttaaaaattttttttcttgttataaagttctgggtttcagaatttcttcaccaccagactggtacatatatccacatttatcttttattcatttctatgaagtcgttttttctatatgcttcacctttgacattcatgatcctgtcacattttcaggcctctctgtccagtatttttggcttttgtagctctctttttagacaaagcagcttcttcagtaatatcctcttcttctaagtatacactcagtcttacagggaattcagaacttactatgaaactatcccctgccaatttgatatcacattcgttatcttcaagatgtgttgcatcctcatcctctgctgttgacctcctcaataggagaaatggatccatcatcatccaaaaatttggtatctacggactggtcaaaatcttcattttctaaatcttcaccaacattcatttgcttcaatgattctttcaggtggtgttcatacttcagtttttcaatatagttaaaaaatccttcttgcaaccagctggctccaaacgttaaaaatttttctccaaggtgcggtttttttcatttctctgattctaaaaatgggaagccagatcctctgcttctaaattgtttcttcttatctattagtgagtatataggatttctccttccttctggtcttccccgtggtcttcctgttggctggtacctcctctttttcttttttttatatctctttttcctgttcttgaatctttcaaaaaatagcttttatagtcaatggtattggttcaaaagatgagtcaacttgatgaatcacttgcgtgaacaacttttcagggtgtacggaacaaaattttcgaatgggggtttcttttctccccgttaggtgagctaagggatacactgagttttaaataagctgctatcagaagagttatcacttcgatttgcaagttccacagcatcagatgtcacatgggtcaagagaatctattcctgatttatccgatcaattgctctttgttttaaacagttttctaaaacggcctcgcagtggccccaacccgcgcacttgctgcttgtaacccaggcctcggcccaaaaccccgccgactggcctggtgccgtgagtcctagagctctggtacacaccaccctccccgaccttccagcccctcccaactccccgataacccagccgacctcctccaaccggacgcgtgggcggacgcgtgggcggacgcgtgggcggacgcgtggg

SEQ ID NO: 133869 - DNA, 433 bp, Homo sapiens
  misc_feature (1)...(433): n = a,t,c or g
cgtccgtggctccatcttcacgggcgcccaggaccctggcctgcagagacgcccccgccacaggatccagagcaagcaccgccccctggacgagcgggccctgcaggagaagctgaaggactttcctgtgtgcgtgagcaccaagccggaggccgaggacgatgcanaagagggacttgggggtcttcccagcaacatcagctctgtcagctccttgctgctcttcaacaccaccgagaacctgtcccagagaactacttctatgtgccagacctgggccaggtgcctgagattgatgttccatcctacctgcctgacctgcccggcattgccaacgacctcatgtacattgccgacctgggccccggcattgccccctctgcccctggcaccattccagaactgcccacctttcacactgaggtagccgagg

SEQ ID NO: 133870 - DNA, 549 bp, Homo sapiens
cctgtaggccaaggcgccaggcaggacgacagcagcagcagcgcatctccttcagtgagagccacgagccaaggtgggcacttgatgtcggatctcttcaacaagctggtcatgaggcgcaagggcatctctgggaaaggacctggggctggtgaggggcccggaggagcctttgtccgcgtgtcagactccatccctcctttgccgccaccgcagcagccacaggcagaggaggacgaggacgactgggaatcgtagggggctccatgacaccttccccccccagacccagacttgggccgttgctctgacatggacacagccaggacaagctgctcagacctgcttccctgggagggggtgacggaaccagcagtgtgtggagaccagcttcaaggagcggaaggctggcttgaggccacacagctggggcggggacttgtctgcctgtacttcatggggggacggctccacccagcctgcgccactgtgttcttaagaggcttccagagaaaacggcacaccaatcaataaagaactgagcagaaa

SEQ ID NO: 133871 - DNA, 969 bp, Homo sapiens
ggggctcaggcatggcagggctgggagtaccagcaggcactcaagcggcttaagtgttccatgacagactggtatgaaggtggccacaattcagaaagaaaaaagaagagcaccatctcctttcaggttgtggcccgattcagcatgactgacttcacagcccacagaacaggatgtcaggccccatgcgatgttaaggctgaggctgaaactgatgaagccttggggatctcccagcaggtagagcagagccggagccaggtgcaggccattggagagaaggtctccttggcccaggccaagattgagaagatcaagggcagcaagaaggccatcaaggtgttctccagtgccaagtaccctgctccagagcgcctgcaggaatatggctccatcttcacgggcgcccaggaccctggcctgcagagacgcccccgccacaggatccagagcaagcaccgccccctggacgagcgggccctgcaggagaagctgaaggactttcctgtgtgcgtgagcaccaagccggagcccgaggacgatgcagaagagggacttgggggtcttcccagcaacatcagctctaagtatgtcttcctggaccccctggctggtgctgtaacaaagacccatgtgatgctgggggcagagacagaggagaagctgtttgatgcccccttgtccatcagcaagagagagcagctggaacagcaggtccctgagaactacttctatgtgccagacctgggccaggtgcctgagattgatgttccatcctacctgcctgacctgcccggcattgccaacgacctcatgtacattgccgacctgggccccgcattgccccctctgcccctggcaccattccagaactgcccaccttccacactgaggccaaggcgccaggcaggacgacagcagcagcagcgcgtctccttcaggtgggagcagctctttgaggccacctga

SEQ ID NO: 133872 - DNA, 436 bp, Homo sapiens
aactgagactgtcagagcatttctagcttttgggtccagctctgcagggtgggggctagagaggaagcagggagtatctgcacacaggatgcccgcgctcaggtggttgcagaagtcagtgcccaggcccccccacacagtctccaaaggtccggcctccccagcgcggggctcctcgtttgaggggaggtgacttccctcccagcaggctcttggacacagtaagcttccccagccctgcctgagcagcctttcctccttgccctgttccccacctcccggctccagtccagggagctcccagggaagtggtcgacccctccggtggctgggccactctgctagagtccatccgccgagctgggggcatcggcaaggccaagctgcgcagcatgaaggagcgaaagctggagaagaagaagcagaaggagcagga

SEQ ID NO: 133873 - DNA, 1666 bp, Homo sapiens
atgactcctgtgaggatgcagcactccctggcaggtcagacctatgccgtgccccctcatccagccagacctgcggtgagaggaggccgtccagcagatggcagatgccctgcagtacctgcagaaggtctctggagacatcttcagcaggagccagccacagggatgtctggggaaatggcgttccatgagatgcaagcacacaagaatgcacttggcacatctggggaacagcaggcagctgatatcactgggcccaccctgcaccagggaggatggaagcagatagcatgtacaggtggcagcatagggcctgtccctactgagagtgcagggaactcagcaccgtcaactcctcgaccctgcaggtcagattatccttgtagaggccccctggatggcaccaagatcggccctggcaagcaggtagagcagagccggagccaggtgacaggccattggagagaaggtctccttggcccaggccaagagttgagaagatcaagggcagcaagaaggccatcaaggtgttctccagtgccaaagtaccctgctccagagcgcctgcaggaatatggctccatcttcacgggcgcccaggaccctggcctgcagagacgcccccgccacaggatccagagcaagcaccgcccccgtggacgagcgggccctgcaggagaagctgaaggaatttcctgtgtgcgtgagcaccaaggccggagcccgaggacgatgcagaagagggacttgggggtcttcccagcaacatcagctctgtcagctccttgctgctcttcaacaccaccgagaacctgtatggccagagggcagggccgaggggtgtgggcgggaggcccggcctggcttagtggggacccagggcatcagacacaggtacaagaagtatgtcttcctggaccccctggctggtgctgtaacaaagacccatgtgatgctgggggcagagacagaggagaagctgtttgatgcccccttgtccatcagcaagagagagcagctggaacagcaggtccctgagaactacttctatgtgccagacctgggccaggtgcctgagattgatgttccatcctacctgcctgacctgcccggcattgccaacgacctcatgtacattgccgacctgggccccagcattgccccctctgcccctggcaccattccagaactgcccaccttccacactgggtaccgagctcgaattcgcgctgttgtaggagcaagggatacaatgatgatcaaggcagatgcagcccttaccttcaggtcgtggagtccggatacagactggaggcaggcagctgtaagatgtgtgacaaatgctgcgctggatcagcccatggtattaggagagcaggtggggcgtacacccccggcgatgtttgaagtaatatcaacttctccccctctggatgttagaaacaatatcacaggggggtgtacacccccctgcgatcctgggagtaacatcatcctctttcccccggatattaggaacaatatcacagaaggcatctctgggaaaggacctggggctggtgaggggcccggaggagcctttgcccgtgtgtcagactccatccctcctctgccgccaccgcagcagccacaggcagaggaggacgaggatgactgggaatcctag

SEQ ID NO: 133874 - DNA, 1567 bp, Homo sapiens
ggaggcaggaggaagacttgggggtcttcccagcaacatcagctctgtcagctccttgctgctcttcaacaccaccgagaacctgtatggccagagggcagggccgaggggtgtgggcgggaggcccggcctggcttagtggggacccaggtcatcagacacaggtacagcacataggccaggagccagggggtgactggggtggctcggcttgggaggcctgggaccccacagtgcacgctgtgcccctgatgatgtgggagaggaacatgggctcaggacagcgggtgtcatcttgcctgacccccatgtcgcctctgtaggtagaagaagtatgtcttcctggaccccctggctggtgctgtaacaaagacccatgtgatgctgggggcagagacagaggagaagctgtttgatgcccccttgtccatcagcaagagagagcagctggaacagcaggtcccagagaactacttctatgtgccagacctggggccagggtgcctgagattgaatgttccatcctacctgcctgacctgcccagcatttgccaaccgacctcatgtacattgccgacctggggccccggcatttgccccctctgcccctggcaccattccagaactgcccaccttccacactgaggttagcccgagccactcaaggcagaccttacaagatggggttacttaaacagcaccaccaccacccccaccgcccccaccacctcccccagctcctgaggtgctgggccagttgcaacccccacttcccacccttcaaccgcggcccctgttagggcaaggcgccagggagggacggacagcagcagcagcgcgtctccttcagtccagggagctcccagggaagtggtcgacccctccggtggctgggccactctgctagagtccatccgccaagctgggggcatcggcaaggcctagctgcgcagcatgaaaggaagcgaaacgtggagaagaagaagcagaaggagcaggagcaagtgagagccacgagccaaggtgggcacttgatgtcggatctcttcaacaagctggtcatgaggcgcaagggccatctctgggaaaaggaccctggggcttggtgaggggccccggaggagccttttgccccgtttgtcagactcccatccctccctctgccgccaccgcagcagccacaggcaagaggaggacgcaggacgactgggaatcctagggggctcccatgacacctttcccccccagacccagacttgggccgttgctctgacatggacacagcccaggacaagctgctcagacctgcttccctggggagggggtgacggaaccagcactgtgtggagaccagcttcaaggagcggaaggctcggcttgaggccacacagctggttcgggtgacttctgtctgcctgttgctccatggggggacggctccacccatgcctgcggccactgtgttcttctcttaagaggcttccagagaaaacggcacaccaatcaataaagaactgagcagaaaccaacagtgtgcttttaataaaggatctctagctgtgcagga

SEQ ID NO: 133875 - DNA, 600 bp, Homo sapiens
  misc_feature (1)...(600): n = a,t,c or g
atgcagaagtagatcaccgcctgggcgccagcacccatgaagatcaagatcatcgcaccnccagagcgcaagtactcggtgtggatcggtggctccatctggcctcaactgtccacctccagcagatgtggattagcaagcaggagtacgacgagtcgggcccctccatcgtccaccgcaaatgcttctaaacggactcagcagatgcgtagcatatgctgcatgggttaattgagaatagaaatttgcccctggcaaatgcacacacctcatgctagcctcacgaaactggcaagaaccagttgttttgtcttgcgggtctgtcagggttggaaagtccaagccgtaggacccagtttcctttcttagctgatgtctttggccagaacaccgtgggctgttacttgctttgagttggaagcggtttgcatttacgcctgtaaatgtattcattcttaatttatgtaaggttttttttgtacgcaattctcgattctttgaagagatgacaacaaattttggttttctactgttatgtgagaacattaggccccagcaacacgtcattgtgtaaggacccataaaagtgctgccgtaacc

SEQ ID NO: 133876 - DNA, 1013 bp, Homo sapiens
  misc_feature (1)...(1013): n = a,t,c or g
tttttttttttttttttttggttacggcagcacttttatttttccttacacaaagacgagcccgctggggccctaatgtgtctcacataactaggagaaaaccaaagatttgttgtcatctctttaaagaatcgagaattgcgtacaaaaaaaaccttacataaattaagaatgaatacatttacaggcgtaaatgcaaaccgcttccaactcaaggcaagttaacagcccaccggggttttggccaaagacatcagctaagaaaggaaaactgggtcctatcggcttggactttccaaccctgacagacccgcaagacaaaaacaactggtttcttgccagcctctagaggaaatcccaggaacactcagccctggacacgtttanttaccaagggggaacagtttaactttcaatacaagggtcaaatttcaggcaacaagtttcttacaatccagttgcttgattttcggatacaagctttcaagggacatttcttttcgaaggcttatttccagtttcgtgagggctagccatgaggtgtgtgcatttgcccaggggcaaatttccaatccccatttaacccatgcagcaaatggctacggcatctggctgagtccgtttagaaagcattttgcggttggacgaatggaggggccccgacctcgcgtacttcttgcttgctaatcccacatctgcctggaaggtggacagtgaggccaggatggagccaaccgatccacccaccgagtacttgcgcttcctgggggtgcaatgatcttgaatctcaatgttgcctgggcggcaggggcgtggatttctttctgcatccctgtcaacaatgcccccgatacctggtggttgccgcccggaagcaacgtgttggcgtaaaggtctttggcggattgccacgtcaaactttatgaatgggagtgaaaggtggtctcgtggatgccgcaagatttcataacccggaaagaaaggttggaagaggccttccggaaaccgggacc

SEQ ID NO: 133877 - DNA, 2009 bp, Homo sapiens
  misc_feature (1)...(2009): n = a,t,c or g
atccttaattaaattaatccccccccgctcagtcgccgctgccaactctcgcactctgttcttccgccgctccgccgtcgcgtttctctgccggtcgcaatggaagaagagatcgccgcgctggtcattgacaatggctccggcatgtgcaaagctggttttgctggggacgacgctccccgagccgtgtttccttccatcgtcgggcgccccagacaccagggcgtcatggtggggcatgggccaaaaaggactcctacgtgggcgacgaggcccagagcaagcgtggcatcctgaccctgaagtaccccattgagcatggcatcgtcaccaactgggacgacatggagaaagatctggcaccacaccttctacaacgagctgcgcgtggccccggaggagcacccagtgctgctgaccgaggcccccctgaaccccaaggccaacagagagaagatgactcagaattatgtttgagaccttcaacaccccggccatgtaccgtggcccatccaggccgtgctgtccctctaaagcctctgggcgcaccactggcattgtcatggactctgggagacggggtcacccacacggttgcccatcttacgagggctaccacactgctccacgccatttctgcgtctgggacctggcttggcccgggacctgaccgactacctcatgaagatcctcactgtagcgaggctacagcttcaccacccacgggccgagcgggaaaacgttccgcaacatcaagggagaagcttgtgctacgtcgcccctggacttcgagcagggagatgggcacccgncgcatcctcctcttctctggagaagagctacgagctgcccgatggccaggtcatcaccattggcaatgagcggttccggtgtccggaggcgctgttccagccttccttcctgggtatggaatcttgcggcatccacgagaccaccttcaactccatcatgaagtgtgacgtggacatccgcaaagacctgtacgccaacacgggcgctgtcgggcggcaccaccatggatccgggacattgccgacaggatgcagaagggagatcaaccgccctggcggccccagcaccatgaaaaatcaggaatcatcgcacccccagagcgcaagtaactcggtgtggatcggtggctccatcctggcctcactgtccaccttccagcagatgtggattagcaagcaggagtacgacgagtcgggcccctccattcgtccaccgcaaatgcttctaatcgaactcagcagatgcgtagcatttgctgcatgggttaattgaagaaatagaaaatttgcccctggcaaatgcacacacctcatgctagcctcacgaaaactggaataagccttcgaaaagaaattgtcccttgaagcttgtatcttgatatccagcactggattgtagaacttgttgctgattttgaccttgtattgaagttaactgttccccttggtatttgtttaatacccctgtacatatcttggagttcaaccctttagtacgtgtggcttggtcactttcgtggctaaggtaagaacgtgccttgtggaagacaagtctgtggcttggtgagtcctgtgtggccagcagcctctgatctgtgcagggtattaacgtgtcagggctgagtgttctgggatttctctagaggctggcaagaaccagttgtttttgtcttgcgggtctgtcagggttgaaaagtcccaacccgtaggacccagtttcctttcttagctgatgtctttggccagaacaccgtgggctgttaacttgccttgagttggaagcggtttgcatttacgcctgtaaatgtattcattcttaatttatgtaaggttttttttgtacgcaattctcgattctttgaagaagatgacaacaaacttttggttttctacatgttatgtgagaacattagcgccccacgcaacactgtcattgtgtaaggaaaaataaaagtgctgccgtaaccaaaaaaaaaa

SEQ ID NO: 133878 - DNA, 534 bp, Homo sapiens
ggcctcgtgccacgccttcccggtgaccccgcagtgggtgtgtgatgggaggacggacagacccaaacgccgccggaccaggaggacgctgacgaggcaccatgcgtgagatcgtgcacatccaggcgggccagtgcggcaaccagatcggcgccaagttttgggaggtcatcagtgatgagcatgggattgaccccactggcagttaccatggagacagtgatttgcagctggagagaatcaatgtttactacaatgaagccactggtaacaaatatgttcctcgggccatcctcgtggatctggagccaggcacgatggattcggttaggtctggaccattcggccagatcttcagaccagacaatttcgtgtttggccagagtggagccgggaataactgggccaagggccactacacagagggagccgagctggtcgactcggtcctggatgtggtgaggaaggagtcaaagagctgtgactgtatccagggctttcagctgacccactctcttgggggcggcacggggg

SEQ ID NO: 133879 - DNA, 1753 bp, Homo sapiens
tgggaggtctctgcgcagcccagcccggcggttccacgccgcgcaccgctccgagggctcagcgccacccgctccgcagccggcaccatgcgcgagatcgtgcacatccagggcgggccagtgcggcaaccagatcggcgccaagttttgggaggtcatcagcgatgagcattgggatcgaccccacaggcagttaccatggagacagtgacttgcagctggagagaatcaacgtgtactacaatgaggctgctggtaacaaatatgtacctcgggccatcctggtggatctggagcctggctctcatggactctgtcaggtctggacccttcggccagatctttagaccagacaacttcgtgttcggccagagtggagccgggaataactgggccaagggccactacacagagggagccgagctggtcgactcggtcctgggatgtggtgaggaaggagtcagagagctgtgactgtctccaggggcttccagctgacccactctctgggggggcggcacggggttccgggatggggcaccctgcttcatcagcaaggatccggggaagagtacccagaccgcattcatgaaacacctttcagcgttcatgcccttcacccaaggtgttcaagacacggttgttggagcccttacaacgccacacctctcggttccaccatctggtggaaaacacagatgaaaccctactccattgataacgaggccctgtattgacatctgcttgcccaccgctgaaagctgacccacccccacctacggggaccctcaacccacctgggtgttcggccaccatgagcggggttaccaccttgcttgcggtttcccggggccagctgaacgcagacctgcgcaagctggccggtgaacatggtgcccttccctcgcctgcacttcttcatgcccggcttcgcgcccctgaccagccggggcagccagcagtaccgggcgctcacggtgcccgaagctcacccagcagatgttcgactccaagaaaatgattgcccgccctgcgacccgccgcccacgggccgctaacctgacggtggctgccatcttccggggccgcatgttccatggaaggaggtgggacgaggcagatggttcaaacgttgcaggaacaaggaacaggcaggtaatttcgtgggagtgggttccccaacaacgtgaagacggcccgtgtgcgaacatcccgcccccgggggcctggaaaatgtcgggccaccttcatcggcaaccagccacgtccatccaggagactgttcaagcgcatctacgagccagttcaacggccatgtttccggcgcaaggcccttccctgcactggttacacgggcggagggccatggacggagatgggagttcacccgaggsccgagagcaacatgaacgaccctggtgtcccgagtaccagcagtacccaggaacgccacggccgacgaracaaggggagtttcgaggaggaggaggggcgaggacgaggcttaaaaacttcctcagatcaatcgtgcatccttagtgaacttctgttgtcctcaagcaatggtctttctacttgtaaactatggtgctcagttttgccactgttagaraattcacactgttgatgtaatgaatgtggaacttcctctaaaatattacaagtattgtgctgtgaagggtattctatactaaataaaaaaagcatgtgtagaaaaaaaaaaaaaaaaaaaaaaaaaaaaaagtcgtatcga

SEQ ID NO: 133880 - DNA, 386 bp, Homo sapiens; identical to SEQ ID NO: 114494

SEQ ID NO: 133881 - DNA, 455 bp, Homo sapiens
ggacgtgcatgaaatttggtgccgtgactcgatcgggggacctcccttgggagatcaatcccctgtcctcctgttctttgctccatgagaaagatccacctacgacctcaggtcctcagaccgaccagcccaaggaacatctcaccaattttaatcagaccatcacggatgccgagcttcgggtaactctcacagtggaaggaccatcacagatgctctgggtaactctcacagtggaagacataattcctcggtttagccttcccacctctatacagtctgataatggaccagcctttactagtcaaatcacgcaagcagtttctcaggctcttggtattcagtggaaccttcatatcccttacagtcctcagtcttcaggaaaggtagaacggactaatggtcctttaaaaacacacctcaccaagctcagccaccaatttaaaaaggactag

SEQ ID NO: 133882 - DNA, 309 bp, Homo sapiens
ctgaagctcggcgtccgtgatggtctagggggcttctgaggcgatcgggcagtgtcagtcttaagctgctaagctgatttaaaattggtgagatgttcattgggctggtcggtctgaggacctgaggtcgtaggtggatctttctcacggagcaaagagcaggaggacgggggattgatctcccaagggaggtcccccgatccgagtcacagcaccaaatttcatgcgcatctgtgtgaagagaccaccaaacaggctttgtgtgagcaacatggctgtttatttcacctgggtgcaggcgggctgagt

SEQ ID NO: 133883 - DNA, 667 bp, Homo sapiens; identical to SEQ ID NO: 117149
  misc_feature (1)...(667): n = a,t,c or g

SEQ ID NO: 133884 - DNA, 443 bp, Homo sapiens; identical to SEQ ID NO: 113129
  misc_feature (1)...(443): n = a,t,c or g

SEQ ID NO: 133885 - DNA, 436 bp, Homo sapiens; identical to SEQ ID NO: 129176
  misc_feature (1)...(436): n = a,t,c or g

SEQ ID NO: 133886 - DNA, 756 bp, Homo sapiens; identical to SEQ ID NO: 117157

SEQ ID NO: 133887 - DNA, 825 bp, Homo sapiens
atggtgtgtctggagtttgttccttcagatgttcagatgtgtccagagtttcttccttccagtgggtttgtggtctcactgacttcaggagtgaagccacagaccttcgcagtgagtgttacagctcataaaggtggcacacccagagttgtttgttcctcccagtgggttcgtggtctcgctgacttcaggaatgaagctgcagaccctcacgaccagggaatggatgagaatcctactgattttctggaacggctaagaggggccttggtaaagcacatgtctctatctcctgatttagtcgagggacaattaatcctaaaggataaatttattactcaggcagcccctgatattgagaggaagctgcagaaacagaatgggccatctctcagggacatatttttcagtccccagaatggctacaattggaggatggcaagcttttatctaccagttgcgaacaaatggaaaattcttaaaagcctttaccagatcttacacctaggcccagattgggagggaccttacactgtatttctttctactcctatggcagtggaggtcactggaatagactcttggattcattacacccaagtgaaggcctggaaagctgatggagccacctctgtcaacccagaagagcacccaaagtaccaaggtgaaataaacagccatgttgctcacagaaagcctgtttggtggtctcttcacacggacgtgaatgaaatttggtgccgtgactcggatcgggggacctcccttgggaaatcaatccccggtcctcctgctctttgctccatgagaaagatccacctatga

SEQ ID NO: 133888 - DNA, 942 bp, Homo sapiens
atggccatgggattgttcttcattccctttctcaactgcacccagcagcagtggtttttgctaggccttttgaagacagcaggaatctgggagaaggaacatcatcgtctttcacagcatggaaacatcaatcttattccagagaagggaagaagtccccaaagccaaaagctgggtctcttggatcgggttcgcctttctaatcctcgtggtagcaatactaaaggaaagctatttacccctctgaatgtagatgccatagaagaaagtccttctaaagaaccaaagcctgttggcttaaacaataaagagcgtttccgcacggccttccgcatgaaagcctacgctttctggcagagttctgaagatgccgggacaggtgaccccatggcggaagacaggggctatgggaatgacttccccatcgaagacatgatccccaccctgaaggccgccatccgagccgtcagaattctacaattccgtctctataaaaaaaaattcaaggagactttgaggccttacgatgtgaaggatgtgattgagcagtattctgccgggcatctcgacatgctttccaggataaagtaccttcagacgagctgtttaagttctttgaagtcaatttatcctgctcagaagatagggtgtagaagggagggagaagtggtgggcaaggcgcagaggaaggaggaacaagagaggagaggagcagtggaggaaaggatgcaggagaaggagaggaaaagaactcaggaacgccagggcaaaagtgggttcctgcggttgctggtgaggcgtgagaagcgcggggctacgccgggcctctgctgccccctcctggccaaagatgggctccgcaggctccctgcggatgggaatcggctgaaactgcattttggtggttggcgaaggcgaaattatcccttctcctggctctaa

SEQ ID NO: 133889 - DNA, 996 bp, Homo sapiens
tcattgaccccaggagcccacttggtgctctaccgccctgtactcatgctggtatctaaggtgcaagacaaagtctcctctacttttctctctgcttttctcaagcagaaggggtttcaccacatattcaccactgctggcaatttgctgagtctcacctttgaaacgtggatgaataatcagaaaggcgtccttgcaatgattaaacaccaaggaaaggctgccttcccagtccatgactggcgccagagttttgggtccacggataaaacatgtctcctttatctcagatttgaaattggtgagatgtttcttgggctggtcagtctgaggacctgaggtcataggtggatctttctcatggagcaaagagcaggaggaggggactgatctcccaagggaggtcccctgatccaagtcacggcaccaaatttcatgcgcgtccatgtgaagagaccaccaaacaggctgaagtacggtcatccaacagccaatcttctctatttctgtccccagccaaactccttgttcagatgctccttcttttctctccttctcagccatgccagtgtggtgctcgccccttcttctgctttttcctcctctgtttgtggagcttggtttccacatggccccaaaatggggtcgtggagccccatagtgttcttgaaaaccacaacttttggtgacgacaacaaaaccgcctgttctattttctacaccacccctccaccaacccgaggcagagcagcatggaaagagaatcagtatgctcaggaagggagagtgaagtgagtgtgggtctttgcactggaactcagtgtttcccaccagctgattaaggtgcccactggtccagaacaaatttgagtgataggccacaataactggagtttttggacaaacactcatgctgcactgatcttggagccagtggacttgggatgtgcatgacccagtgcgataccagttgtggcaagaaaagggagtacccat

SEQ ID NO: 133890 - DNA, 1320 bp, Homo sapiens; identical to SEQ ID NO: 123183

SEQ ID NO: 133891 - DNA, 1665 bp, Homo sapiens
atgactaatgcagagcattataagcatagtctccatgcttatggagcatgggccattatggcccagtgggaaatggagaattgtaaacatgaagagggaacttttccagtaagctcggggagggagcggcagagagggggagaagttactagaacccaatgctgcaatggcccccagcatatcctaagagtgtccaggttcttcacagaacctgacggtcttaatatcattggtgattattctgggcctgctcaagcagccacacaactacctatgagttggatgctgttgcatttgggctacccggaaaggaaagagatgcccttgggcaaagcagctgtctatggcaagcacactctgaaggagctgacagctggaggcaagtccttccctccagaaagggcatttgggcagtgcatctcctgtcctaccactttcttcatctgcaaaatggggatcatgatagtaccagcttgcagggttaaatgttcttccacactgactctgggcctagccatgtgtcctgttttggtccatgtgacatcagctaacataacccaagcagagacttgctgcccattttctctgaatggtggcccagcacctggagggacagagtacaaaggactctggcatgttgaattcctcaagcaacctgctggtaagcatggactctatgatgcgccagcaacacgttttgctttatccaacacatgtcctgttaagtcacggactagtgtggtctatgggctggcagaggtgaaaagatctcccttttcatgtagcttgcccacctacttacagcgttgcatcacagggtcaagtgtttctcctccacttcacgcagctcgggagccctcttgtctggaaaggctcttccctgctggtgcctccaggctgggctggttgttgctcctctatgctcccgaggtcctcagtgcctgcctttatcagaacagaggccacagcgcaccttggttaaatgtacagtctctgggaccagactgcctggactcacaactctggctccgccatttacagcccacctgcacccaggtgaaacaaccagccatgttgctcacacaaagcctgtttggtggtctcttcacacagacgcgcatgaaatttggtggatcaggggacctcccttgggagatcaatcccctgtcctcctgctctttgctccatgagaaagctccacctaccacctcaggtcctcagactgaccagcccaagaaacatctcaccaatttcaaatccgaagcgtttaggctgtttttcatcaaatataaaaatccagcccagttcacggctcgtttggcagcaaccctgagacgctttacagccctagaccctaaaagagaacaaccccctttgactgtaattttccattaccttcccaaatcctataaaacggccccacccccatctcccttcgctgactctcttttcggactcagcccacctgcacccaggcatttccctaaaaatgcactcccaagtccagggttaagccatgttttccagctcctagaagcagtgctggcagcagcagtggttgggtccatagtggtggtcaaggcaggacccacagcaggaagactctggtgctacagcagcagcagcaacgtggttctaatggcagcagcctctgtgatgaactga

SEQ ID NO: 133892 - DNA, 1384 bp, Homo sapiens
ttagggtctagagctgtaaagcatctcagggttgctgacgaacgagccatgaactgggctgggtttttcatatttgatgaaagagcctaaacactcactgatttgggagaggtctgataaagaaaaaggagcattaaccttgactatgcctttagcttcagccaccggatttgaaatggtgagatgtttcttgggctggtcggtctgaggacctgaggtcgtaggtggatctttctcatggagcaaagagcaggaggacagggtattgatctcccaagggaggtcccccgatatggcaggcagttgttgctgtttgttgacgaggaacacagctgtgtctgttgaccagcagaggcttgggcagtatggccattttcacgatattgattcttcctacccatgagcatggaatgttcttccatttgtttgtatcctcttttatttcattgcgcagtggtttgtagttctccttgaagaggtccttcacatcccttgtaagttggattcctaggtattttattctctgcaagtcacaggggatgcgatggcttggcttgggctcagaggcctgatattcctgccttcttatattaataagaaaaataacacaaaatagtgttgaagtgttggggcggcgaaaatttttgggcggtggtatggagagagaatgggtgatgtttctcagggctgcttcaagcgggattaggggcagcgtgggaaccaatttcaaatccgagtcacggcaccaaatttcatgtgcgtctgtgtgaagagaccaccaaacaggctttgtgtgagcaataaagctgtttatttcacctgggtgcaggtaggctttcagatttttgaaaagcctgaacccattgaagagatatgcaaggtatgttggaggccgatggcttagagaggattgggcctttgagaggctaaggtaagcttttatttgaattgatattctaatacaaagagttagatgctcagttattaaatcaaattctggattagcctgatgagaatggagtttttttaataagcaatcttccagttgatcgcatcggctcctgaggcttctgcattcttcacatagttctcgagccttggttttcagctccatcagctcctttaagcacttctctgtattggttattctagttatacattcttctaaatttctttcaaagttttcaacttctttgcctttggtttgaatgtcctcccgtagctcagagtaatttgatcgtctgaagccttcttctctcagctcgtcaaagtcattctccatccagcttttttccgttgctggtgaggaactgcgttcctttggaggaggagaggtgctctgctttttagagtttccagtttttctgttctgttttttccccat

SEQ ID NO: 133893 - DNA, 2580 bp, Homo sapiens
tcaggctgcctgcagctgcgataaggaggacaggatggggctctgcaaaggacatcctgcagcagccaggggagctttccatgcagaagcacatgtggaaacccacagcctgagggattcctggcctgcatactgcacagagtccttgggatggtggggcttggcagtgtcccagactgtgagggcaggtgcattgacagcaagtaccccagaatggtgaagcacagctgtcgttttgccctgactagtgcttcttaaaactgttaaggtcattaaaaacaaggacaacctgagaaactggcagagcacgtaggagtctaacgggacaggatgactcaatttgatatagttttcaggtaaaaacggatttgaaattggtgagatgttccttgggctggtcggtctgaggacccgaggtcgtaggtggatctttctcatggagcaaagagcaggaggacaggggattgatctcccaagggaggtcccccaatccgagtcacggcaccaaatttcatgcgcgtccatatgaagagaccaccaaacaggctttgtgtgagcaacaagactgtttatttcacctgggtgcaggcgggctgagtctttgtcaaaaatcagttgaccataaacatatgaatttatttctggactttcaatgtcattctgttgatcaatgtatctgtccttatgccagtaccacatagttttgattactgcaaatttgtggtaagttttgaaatcaagaagtgtaaattctccaacttcattcttttccaagattgttttggttattctgggtcccttgcatttccacatgaattttggaatcagcttgtcagtttttctctcccgctctcggtttgttattgggaaggtgctgaaggatgctggggctgccaacctggtgcctaattccccaaagcagaggcagctgtggtccagaagccccagggcctgtttccactgtcctccctggggaaatgcgggtattaggcccagagaggcccaggacttatctcgacactctcctttccccggccaagaaaatgcttcctcttcttggaggatggagatgcaaacactccctttctggagcaggtagtaagaatccaggagagcatagcctggggattctgcagtgtggaatactgcaagggcttttatcagggagccagccaaggccttggtgactgatatctcccctagtaacatcatggggtggataggcaaaacaatttggttgataaggcgcagattctgaactaacttgtaagccttgtctggttttaggacaggtaaaatgggggaatggtaaggagagtttataggttttagaagcccatgctgtagcaggcgagtgataacaggctttaatccttttaaagcgtgctgagggattggatattggcgttgagtggggtaagggtgattaggttttaatgggatggtaatgggcatgtgatcagttgccagggaaggagtagagatgtcccatacttgtgggttaaggtagggggatatgagaggaagacgcgaaggaggctttgggttggggagaaggacggcaatgagatgtggctgtagtccaggaatcgtcagggaagcagataatttagttaaactgtctcggccttccactgtgagagttacccgaagctcggcgtctgtgatggtcttgactatgcctttggctccagccacctttttaagagtaaattgctgggcaggtgggggagggctagtcacagaacgaaactgtaagccggaccaggtgtgaggaggggaggtgataaaaagattatagggtggaggagcagaggctgaggaagaattgggacctagctcggcctggcgaggagcagcttgcccctgccccaggaaagcgggacttgtcgctaaggctgaaggaccaaggcaggcgtccctgcgtggtctgacacccttgaaacgtgagtgtataatcagagaggcgtccctgcaatgattaaacaccaagggaaggctgccttcccagtccgtgaccggcgctggagttttgggttcacggataaaacatgtctcttttgtctcggatctgaaattggtgaggtgtttcttgggctggtcggtctgaggacctgaggtcgtaggtggatctttctcatggagcaaagagcaggaggacaggggattgatctcccaagggaggtcccccgatccaagtcagggcaccaaatttcactcgtgtccatatgaagagaccaccaaacaggatttgtgtgagcaataaagctgtttatttcacctgggtgcaggcgggctgagtccgaaaagagagtcagcaaagggagataagcgtggggccatcttataggatcctccacttgagagtcacctgaagttgggcatctgtgatggtccagggggcttctgaggtgatcaggcagcattaatcttcagtcgctaagctgagcagatcagatttgaaattcgtgagatgtttcttgggctggtcagtctgaggacctgaggtcataggtggatcgttctcacagagcaaagagcaggaggacaggggattgatctcccaagggaggtccccca

SEQ ID NO: 133894 - DNA, 4154 bp, Homo sapiens
gacccgcgcgggatgtgaccccctgaccccctgcctggcctcccctgccccccagggggcccgcctttgcctgcttttgggggtgggtggggaggggcgcgcggatcatggcattggagttcccgggcttgcagccgccgccgccgcctcgttcacgcaccccgagcgccccttcttcccagagcagcagcggagaaggcgaagcggccggcgggggcgaggcagatggggctcaaggcgcgcagggcggcgggggcggctggcggcggcggcgacgggggcggcggaggcggcggggcggctaacccagccggaggggacgcggcggcggccggcgacgaggagcggaaagtggggctggcgcccggcgacgtggagcaagtcaccttggcgctcggggccggagccgacaaagacgggaccctgctgctggagggcggcggccgcgacgaggggcagcggaggaccccgcagggcatcgggctcctggccaagaccccgctgagccgcccagtcaagagaaacaacgccaagtaccggcgcatccaaactttgatctacgacgccctggagagaccgcggggctgggcgctgctttaccacagcgttggtgttcctgattgtcctaggggtgcttgattctggctgtcctggaccacattcaaggagtatgagactgtctcgggagactggcttctgttactggagacatttgctattttcatctttggagccgagtttgctttgaggatctgggctgctggatgttgctgccgatacaaaggctggcggggccgactgaagtttgccaggaagcccctgtgcatgttggacatctttgtgctgattgcctctgtgccagtggttgctgtgggaaaccaaggcaatgttctggccacctccctgcgaagcctgcgcttcctgcagatcctgcgcatgctgcgggatggaccgggagaaggtggcacctggaagcttctggggctcagccatctgtgcccacagcaaagaactcatcacggcctggtacatcggtttcctgacactcatcctttcttcatttcttgtctacctggttgagaaagacgtcccagaggtggatgcacaaggagaggagatgaaagaggagtttgagacctatgcagatgccctgtggtggggcctgatcacactggccaccattggctatggagacaagacacccaaaacgtgggaaggccgtctgattgccgccaccttttccttaattggcgtctccttttttgcccttccagcgggcatcctggggtccgggctggccctcaaggtgcaggagcaacaccgtcagaagcactttgagaaaaggaggaagccagctgctgagctcattcaggctgcctggaggtattatgctaccaaccccaacaggattgacctggtggcgacatggagattttatgaatcagtcgtctcttttcctttcttcaggaaagaacagctggaggcagcatccagccaaaagctgggtctcttggatcgggttcgcctttctaatcctcgtggtagcaatactaaaggaaagctatttacccctctgaatgtagatgccatagaagaaagtccttctaaagaaccaaagcctgttggcttaaacaataaagagcgtttccgcacggccttccgcatgaaagcctacgctttctggcagagttctgaagatgccgggacaggtgaccccatggcggaagacaggggctatgggaatgacttccccatcgaagacatgatccccaccctgaaggccgccatccgagccgtcagaattctacaattccgtctctataaaaaaaaattcaaggagactttgaggccttacgatgtgaaggatgtgattgagcagtattctgccgggcatctcgacatgctttccaggataaagtaccttcagacgagaatagatatgattttcacccctgggacctccctccacgccaaaacacaaggaagtcttcagaaagggtcagcatttcaccttcccatcccagcaatcttcccggggattgaaccatatgtaggccagaccatccacattcagaaattcgaagaccaaaggcattgatgggggaagtttgttaaaagtttgaaaggacaggtttcagggactggggaggaagctggacttcctcgtggatatgcacatgcaacacatggaacggttgcaggtgcaggtcacggagtattacccaaccaagggcacctcctcgccagctgaagcagagaagaaggaggacaacaggtattccgatttgaaaaccatcatctgcaactattctgagacaggccccccggaaccaccctacagcttccaccaggtgaccattgacaaagtcagcccctatgggttttttgcacatgaccctgtgaacctgccccgagggggacccagttctggaaaggttcaggcaactcctccttcctcagcaacaacgtatgtggagaggcccacggtcctgcctatcttgactcttctcgactcccgagtgagctgccactcccaggctgacctgcagggcccctactcggaccgaatctccccccggcagagacgtagcatcacgcgagacagtgacacacctctgtccctgatgtcggtcaaccacgaggagctggagaggtctccaagtggcttcagcatctcccaggacagagatgattatgtgttcggccccaatggggggtcgagctggatgagggagaagcggtacctcgccgagggtgagacggacacagacacggaccccttcacgcccagcggctccatgcctctgtcgtccacaggggatgggatttctgattcaactgtacctttatttctgagctctgaaattctgcagaaacaggtgggccagagtatcacaagcatgctgggcttcctgtcacgtggtccttcaatgaagctgtgcatgggcctggcatgtgtcttgtccctttggaacacagtgtctggcatcaaaggagaagccaagaaagagaagggaatgacctttttacctacaacagatagcaagaagttcttctccttgctgagtgtcacttcctacagttccttcgccttccacaagttttctgtagctgtttacaacatttctaacctgaagacagtggaccccgccaaattccccacaaggtattgctactgtttaaacaatcggaccaatgacttatcagattttacagctctactggtagatatcattggcaattctaccagctacctcacagagatttttaagtcaacctccatcctctcagtgaatcaaagcaatgaatcagattgcatcttcatctgtgtgatgacaggaaagtcaggaaggaatctttctgacttctgggagatagaagaaaaatatcccattatcaattacacatttaccagcggcttgtctggtgttctggctttattgctcacacaaagcctgtttggtggtctcttcacacggacgcgcatgaaatttggtgccgtcactcggatcgggggacctcccttgggaaatcaatccccgtcctcctgttctttgctccatgagaaagatccacctacgacctcaggtcctcagacagaccagcccaagaaacatctcaccaatttcaaatccgcggcacgtcccactttcctggggcaggggcaagtacccctcaaccccttctccttcacccttagcggcaagtcctgctttcctaggcggcaagaaccccccaatcgcttatttccacaccccaacctcttatctctgtgccccaatcccttatttctgtgccccaaccccttctctacttttctggagggcaagaaccaccacccccaccccttctctgtgtctcaagtcttttctctaggcttgcctccttcactatgggagcattcacccatggcacacagactccgagtccaaccaaggcaacagcccccagatatccacaaacaggtgatctctctgcagagtggccattcactgctggtgaagagccagtcctggtcccaagaccccatcaagtttcaattgcctcatcatcataaaaacacggcatctgtgtgcattaatccatctgtatacgagaaagaagaagaaagatatggagacctttttatgaggaaaaaccaaaagacttcctag

SEQ ID NO: 133895 - DNA, 1068 bp, Homo sapiens
ctaagccaagaagatctgggaaggagtcagagagccttgggccagagttccaggggctctgggagtggctgccaggtgagttggacagtccgatttccagtggggtcccacacagatgggatgtggcttaggaggaatcctgggctgcaggcattccttggcccggtggccagatttctggaacttgtagcaagctcctcggggaggaggttctggaggaacacctggctgctgcagttcaggcgtttggaagttcttgtgtgctggagatgtggctggggtttgtctcacagtggaggcaaggaactgcaacttttttctattattgtacaccttgaaggtgaggttaattaaatccttgactatgtctttagctccagccacctttttcagagtaaattgctgggcaggagggggagggctagtcacggaacgaaactgtaagccggaccgggtgtgaggaggggaggtgataaaaggattatagggtggaggagcagaggctgaggaagaattgggacctagctcagcctggcaaggagcagcttgctccttccccagaaaagcgggacttgccgctaagggtgaaggaccaaggcaggcatccctgcatggtctgacacccttgaaatgtggctgaatgatcagagaggccgtccctgcaatgattaaacaccaagggaaggctgccttcccagtccgtgaccggcgccagagttttgggttcatggataaaacatgtctcttttgtctcggatttgaaattggtgagatgtttcttgggctggtcggtctgaggacctgaggtcgtaggcggatgtttctcacagagcaaagagcaggaggacaggggattgatctcccaagggaggtcccccgatccgagtcatggcaccaaatttcatgcgcgtccgtgtgaagagaccaccaaacaggctttgtgtgagcaataaagctgtttatttcaccaggctccatcacataaaggggaggctgttgttcctggcctgggccctgttcatcaggcctgagcaccacctgatgaatgctcatgctcagcgggtccat

SEQ ID NO: 133896 - DNA, 458 bp, Homo sapiens; identical to SEQ ID NO: 116103
  misc_feature (1)...(458): n = a,t,c or g

SEQ ID NO: 133897 - DNA, 432 bp, Homo sapiens
  misc_feature (1)...(432): n = a,t,c or g
tttcgtgccgggagtnnnncctgggcgtgcgcggctgcggtacggcgtgttggtcccagcggttcagctgaggtagggacgtgctgtaggccggaatgttaccggctgttggatctgtggatgaggaagaggatcctgcggaggaagattgtcctgaattggttcccattgagacgacgcaaagcgaggaggaggaaaagtctggcctcggcgccaagatcccagtcacaattatcaccgggtatttaggtgctgggaagacaacacttctgaactatattttgacagagcaacatagtaaaagagtagcggtcattttaaatgaatttggggaaggaagtgcgctggagaaatccttatctgtcagccaaggtggagagctctatgaagagtggccttagagctattgagaatttgatgcanaagaagggg

SEQ ID NO: 133898 - DNA, 881 bp, Homo sapiens
  misc_feature (1)...(881): n = a,t,c or g
ttggaaaagtttctgttctttagctgattttttagctataaaaatgtatttgaaaagctcataaatttcaggattgaaaagataattggaagtttaaaaaaaacctaattcattgaagtaataaccaaataattttcaatcttgattcaactgtgattcaaatcttacaccatttgcccacttctatgaattttatgtataaaattttttaagagtcagagtttttttttcttgattaattggatgtatttcacagaatttccaactgctcacgttagttttcttccttttagagttgatctctctaatgtattagatcttcatgcctttgatagtctctctggaataagtttgcagaaaaaaacttcagcatgtgccaggaacacaacctcaccttgatcagagtattgttacaatcacatttgacgtaccaggaaatgcaaaggaagaacatcttaatatgtttattcagaatctcctgtgggaaaagaatgtgagaaacaaggacaatcactgcatggaggtcataaggctgaagtttgaactgaggctgatcaatgttcagtcaattctcctttgagcagggattggtgtcaatcaaagacaaatcacaacaagtgattgtccagggtgtccatgagctctatgatctggaggagactccagtgagctggaaggatgcactgagagaccaaancgattggtcctcattggcagaaatttagataaggataccttaaccactgtttatantctgtgccagaacagaaagcagtggcaccattcaagaagtcagttgtcatacctagtgcattcttncaaaggntgatataaatngttctctggaaaaaaaaaaaattggccggantttcctnaggggt

SEQ ID NO: 133899 - DNA, 545 bp, Homo sapiens
tgctttaagatctccattattgagttatcctcatctttgtttttttttggctaatggacataagctaaagagtgctgtttgttaattattctaggaagtgcgctggagaaatccttagctgtcagccaaggtggagagctctatgaagagtggctggaacttagaaacggttgcctctgctgttcagtgaagtgaggaatgtgtttactgtgtacatggtttactagaaatgtttattgattatatttccagctttaattttcttgagtaatttaactgaatttacacagtttgcttcattgtattttcaaacaaatagaaaataaacttattaggaagcattttcttaaagtgtttcttgctgtcttttctatctgctctaatgttttggtccttttattgagtttttattgcttttgatgtcagggcttatttaatctctagtgcatgaaagtctcatatgtaaaaaatgattattctgaatttaatctgtcattggtcatacttctaagcgcccaaccttataaaaaaaataaatgactatc

SEQ ID NO: 133900 - DNA, 536 bp, Homo sapiens
aagaaagaatttctcaagtagagactgagtggaactagactgccagctgtgagcctcagagctcctggctgcctgttgctgagtctatcagctgctgagccttgatctttgtgtttctaagatttgtcctagtccatttatggatctaattgttgttcttaatttctttacatcttcttctggaaccaagtctgttttattaatgagaacgatatctgccaaagcaacttgcctagtagcttcattgataaggccatcaggtttctcttctgttaaatgtgctttgggccctatccatatgctcagattgggaacgggtcagtgggtgggatgatttcattctcttctgcctttagtggtatttcacttttaatccatattttgaatccacaatagttatgataccatcaaggtaaatatcactccctaattcagcatcaacccaaaacatagaagccactgcaccttcccctcatgggccttctgccggacgcgtgggtcgacccagggttctcgacggtaccacgggcgtctat

SEQ ID NO: 133901 - DNA, 1801 bp, Homo sapiens
  misc_feature (1)...(1801): n = a,t,c or g
tacgtgcggtggaattccaggccccggccaggccgggagtggcgtgctgggcgtgcgcggctgcggttctgcgtgttggtccccagcggttcagctgaggtagggacgtgctgtaggcccggaatgttacccggctgttggatctgtggatgaggaagaggaatcctgcggaggaggattgtcctgaattggttcccattgagacgacccaaaagcgaggaggaggaaaagtctggcctcggcgccaagatcccccatcacaattatcaccgggtatttaggtgctgggaagacaacactttttgaactatattttgacagagcaacataggtaaaagagtagcgggccattttaaattgaatcctggggggaaggaagttgcgcctggagaaatccttaggctgtgcagcccaaggtggaggagctctattgaagagtggctggaacttagaaacggttgcctctgctgttcaagtgaaggacaatggcctttagaggctattgagaatttgatgcaaaagaaggggaaattttgattacatactgttagagaccactggatttgcagacccaggtgcagtggcttctatgttttgggttgatgctgaattagggagtgatatttaccttgatggtatcataactatagtggattcaaaatatggattaaaacatttagcagaagagaaacctgatggccttattcaatgaagctactagacaagttgctttggcaggatgccatttctcattaataaaacagaccngggtttccagaagaagatgtaaagaaattaagagcgacaattagatccataaatggactaggacaaatcttagaaacacaaagatcaagagttgatctctctaatgtattagatctttcantgcctttgatagtctctctggaataagtttgccagaaaaaaacttcagcatgtgcccaggaaccacaacctcaccttgatcagagtattgttaccaatcacatttgaagttaccaggaaatgcaaaggaagatccatccttaatatgtttattcaggaatcttcctgtgggaaaagaaatgtgagaaacattgacaatcactgccatggaggtccataaggcctgaagggattggtgtcaatcaaagacaaatcacaacaagtgattgtcccagggtgtcccatgagcctctatgatctggaggagactccagtgagcctggaaggatgacactgagagaacaaatcgattggtcctcattggcagaaatttagataaggatatccttaaacagctgttttaaagctactgtggacaaaaaccggaaaagccagtggaccaacacgtttcccaagaagatccaagtttgtacataaccactagaggcatttccttatccaaaaggattgggttaataaaaattaagttttctactgggtatattttcaagcatttatttattactttagttaccgaattccaatatactttaaaatggtatttgttttacagcatacctaaaatggtagcaaatccggtactgtaaaacatttaacattcatacaattatatataatatccttttttttaaagaatggtatttcacaaaaatatcttttgaaattggctttggagtttacatatactgaacatgaaagtttataataatgatgatacaactttcaacattgtcattttttcttagaacttcagctgattgcagagatataatgattacattgttattaaatttttttaacacaagtaagtgtcaccattttatgacatgaaataaaaggttatgactgttaa

SEQ ID NO: 133902 - DNA, 543 bp, Homo sapiens
tcagctccagccaatcggcttcggacaagtcggaggggagggagacgcagaggcggacaagatggcggcggcagctgtacagggcgggagaagcggtggtagcggaggctgtagtggggctggtggtgcttccaactgcgggacagcaacgtggccgtagcggcttgttggataaggtgaggagccggttcttgggaacagttgaatcctggggaggcctgggaggcggcgagcccacctacccatcccggtctcccttattttctacggccttttgaggggagcccttgtgtgaccactatcacaaccctacgcacgcttggagcctgcccttgccctcatcacacttcaaacctggacccagtcctctttagaacttcttcttttctcgcaagtgttctggtcctggtcgccacacctttttcgcggaagatagatgataagcctgtcaaaattgacaagtgggatggatcagctgtgaaaaactctttggatgattctgccaaaaaggtacttctggaaaaatacaaatatgtggagaat

SEQ ID NO: 133903 - DNA, 597 bp, Homo sapiens
atgacccctggggaggataaggaactagaaattaagttcaatcaggtggccagtgagcctccaataaaagctctggactctgaggtgtgggtgagcttcctggttggtgagcacatcaatgtgctgggagggagacatgccctgattccacagggagggggcatgaaagctctcagacctcaccttatatgccttttcatttggctggtcctgattcgtgtcatttatagctggggtcccaaccctcgagccacaaaccggtgccagtccctggcttgttgggaactgggccgcacagcaggaagtgagcagtggtggaagatagatgataagcctgtaaaaattgacaagtgggatggatcagctgtgaaaaactctttggatgattctgccaaaaaggtacttctggaaaaatacaaatatgtggagaattttggtctaattgatggtcgcctcaccatctgtacaatctcctgtttctttgccatagtggctttgatttgggattatatgcacccctttccagagtccaaacccgttttggctttcccagaacttttcccgttagacgtggctgcttcaagccactcattctag

SEQ ID NO: 133904 - DNA, 1747 bp, Homo sapiens
  misc_feature (1)...(1747): n = a,t,c or g
tttcgtgggagacgcagaggcggacaagatggcggcggcagctgttacagggcgggagaagcggtgtgtatcggaagctgtaatgcggctggcggtgcttccaactgcggtacaggaagtggccgtagcggcttgttggataagtggaagatagatgataagcctgtaaaaattgacaagtgggatggatcagctgtgaaaaactctttggatgattctgccaaaaaaggtacttctgtgaaaaatacaaatatgttgagaattttgggtctaattgatggtcgcctcaccatcttgtacaatctcctgtttctttgccatagtggcgttttgatttgggattatatgcacccctttccaagagtccaaacccgtttttggctttgtgtgtcatatcctattttgtgatgatggggattctgaccatttatacctcatataaggagaagagcatctttctcgtgggcccacaggaaagatcctacagggaatgggatcctgatggatatttgggcagctgtcctcccagtcttaaaagggttttgatggaccaaatacaccttgaaggctggaccttccatcagtggggaggaacaaaggcaggcagcggggaagccgagtttcacaaagtcccatttgctaaagttttttggaccacagtggggacacctggtccatggatgcatatgagccctgaaatatcccaggctcccatngacagtcttgccatcagaaagaaaaataaagtagcccaattctaaaaagtagccctctttctcctggatcttgctgaattagtggcttggggggtggggggagataaaaagaacttaaaatgggtaaagtaaagaaatgtttaaaaagtcccctgttttgtcctggaaattttagtctaattcctggggtaaaatagggattttcctgacaccagatatggagaagttgtagctctgatgtctagctggagcccccttggatctgctggattgcattatttcaatctggcttttctggggaaagcagttttgctaaaaggctgtacagactttttccttttgtaccctagccagtactttatatagtatagctttgggcccatgtagccattttaaggactccaattttaaaaaattattaatcctgttgcctgactccttaattccctatttccaatatgtggtttccttgaagaattcggggatacaacgttcttgtgtatggacagctttccctcacacacctatttttggtgggtgtggtatataccggatttgggaaggaatttaaaaaaccaccatagcctttttaaatttgtttgaaacagactcttctgcctgttacatttttgcttttaaccaattaaagaaagccaatggaaaatttagttttaatattgtgttttccactagtatatccctgttgatttgtttgtgccttttattaactgccattttctaaaatttttttcaataaaaggaaggaagatgtgaaaaaaatggagtcatagttttgatggagagaacagagaaacaagtgttaacatctttctactataggtttttttcatttttaggctattttacttgtcaaaggcccctgagaacctgtagctaaggaactcttagctttccagtgataataacaataataacaacattctgtacttactttgtgccagaaatgctccaagtactttacatgtgttaataatgctcacagcaatcctaagaggcaggtgctgttatta

SEQ ID NO: 133905 - DNA, 362 bp, Homo sapiens
ccctgaagtcggtgtctgctgcgttcacggcaggattgggttaggaggaacagcacagcatgctgggctctggatttaaagctgagcgcttaagagtgaatttgagattagtcataaatcgccttaaactattggagaaaaagatgaacgagctcggatccgtgtggagcacattatccgggaagactacctcgtggaggccatggagatcctggagctgtactgtgacctgctgctggctcggtttggccttatccagtctatgaaggaactagattctggtctggctgaatctgtgtctacattgatctgggctgctcctcgactccagtcagaagtggctgagttgaaaatagttgctg

SEQ ID NO: 133906 - DNA, 951 bp, Homo sapiens
ttttaaagcatgcaaaggaagactttattcaggatcatcgtgataggtattggaagcacagcagtgagattttgcaatgggtacaagagattgggttcaactccaaattcagcatgaacgagtaggaatttatagtcaaggagcaggttagggatcactggatgacaaaatactaagaggaaatgtctgggataagtaggattctggctaaacgcacctgttgggattctttctgaagagagagacctggatgataagacatcatcgcctgggggatagtggaggatggtgaaccctgattctgaagtcggtgtctgctgtgttcatggcaggattcggttaggaggaacagcacagcatgctgggctctggatttaaagctgagcacttaagagtgaatttgagattagtcataaatcgccttgaactattggaggaaaaaaaaaaaaaaaaacagaactggcccagaaagcagggaaggagattgctgactatctggctgctgggaaagatgaacgagctcggatccgtgtggagcacattatccgggaagactacttcgtggaggccatggagatcctggagctgtactgtgatctgctgctggctcggtttggccttatccagtctatgaaggaactagattctggtctggctgaatctgtgtctacattgatcctggctgcttctcgacttcagtcagaggtggagggctttcccaatatttattcatcttagatccccagcaactcccccatcatattgaatctgtagatggccataaagggctgtaagaattatctcttctgcaccagattgtggtccctggaccaagccagaagcctttgcaaaactttcttcttgacctgcggttaccttggacaaccctgtggccgatctttgggcttgagggcaaaattcccttatgggagcgcattaaatcggaacctg

SEQ ID NO: 133907 - DNA, 1254 bp, Homo sapiens
atgaatgatgcttttggtggtggctccttgactgctttgctagtcatagaaacacaggccgatgatgtgtctgcttacattccaacaaatgtcatttccatcactgacagacagatcttggaaacagaattgttctacaaagatatccgctctgccattaacattgggtctgtctgtgtcttgtgttggatctgctgcccaaaccaggactatgaagcaggcggcagactctctttggctcatgtataccttcaattgcataagggagagaatatagaggacattccaaaggaagtgctgacagactgcgcccaccttgtgaaggccaatagcactcaaggctgcaagaacaacgttaatgtggtaaatactccacggtctaacctgaagaaaacagctgacgtggatgtgaggcagataggctttcacaggcagaaggatgtaaaaattgtgacaatggagaagaaagtaaatgagatcctgaaccgattagaaaaaacaaagtggagccgggcacgaaggctcatgtttgtaatccagaactttgggaaggagaagaggggggttgtcatcaccctctatggatcagagggacggagtgagccccatcacctctgtgacccccagaagacagtctttgaacgagggggcctggatgtcttccttctcaccacttggacctctctagggaacctgcacagccttcggctctggcatgacaattctggcgtcagtccctcctgggagatgcagcttatggatatatgctacgtgggcatagacattggccacacaagcctgaagtggctcccctggccttactacaatcacaccatcaccccaccagctactttcctcaaatctaagcaggctcttggacagatggcttttgtagcggaactggcccagaaagcaaggaaggagattgctgactatctggctgctgggaaagatgaacgagctcggatccgtgtggagcacattatccgggaagactacctcgtggaggccatggagatcctggagctgtactgtgacctgctgctggctcggtttggccttatccagtctatgaagtaagatattttgattcagagacctaaatcatttctggaatttgagaaaggagtaatatgatctctttctgcattaagggactatttcacatgcccaaggatctgctgcctaacagttgctgaaaggcctgttaaaaggaaaatacggaatctgaaactgagaagcctaaatttgaat

SEQ ID NO: 133908 - DNA, 1143 bp, Homo sapiens
atgcacggcacatttctcaggttccacccagactcgcctcctactggcgctgagaacgcagcgactccacccttagcctcaggtcgggggccccagcatttgtctgatctgcgcttgcgtactcctaggccagggttgcctgcggtcctgactgttccgtcttggactacatattccacgggcgacggagaaatcttgtacctctggctccgtctcctggacctctgcgctgcccgtgacctggtcccacctgaggaagaaggcggcgcgggtcgctgccggagcttctgcagccccagcccgcagcccgcgcgggaccctgcgtggcggaaaaaaaaaaaaacagaactggcccagaaagcaaggaaggagattgctgactatctggctgctgggaaagatgaacgagctcggatccgtgtggagcacattatccgggaagactacttcgtggaggccatggagatcctggagctgtactgtgatctgctgctggctcggtttggccttatccagtctatgaaggaactagattctggtctggctgaatctgtgtctacattgacctgggctgctcctcgactccagtcagaagtggctgagttgaaaatagttgctgatcagctctgtgccaagtatagcaagctaatgcacaatctgagtgtggaagccccatccaaaatcctggtggagagatacctgattgaaattgcgaagaattacaatgtaccctatgaacctgactctgtggtcatggcagaagctccttctggggtagagacagatcttattgatgttggattcacagatgatgtgaagaaaggaggccctggaagaggagggggtggtgggttcacagcaccagttggtggacctgatggaatggtgccaatgcccatgcctatgcccatgccatctgcaaatactcctttctcatatccactgccaaagggaccatcagatttcaatggactgccaatggggacttaccaggcctttcccaatatttatccatctcagataccagcaactcccccatcatatgaatctgtagatgacattaatgctgataagaatatctcttctgcacagattgttggtcctggacccaagccagaagcctctgcaaagcttccttcctga

SEQ ID NO: 133909 - DNA, 3429 bp, Homo sapiens
atggctggaggccaggaagtggaggctgtggttgctgatcagctctgtgccaagtatagcaaggaatatggcaagctatgtaggaccaaccagattggaactgtgaatgacaggctaatgcacaagctgagtgtggaagccccacccaaaatcctggtggagagatacctgattgaaattgcaaagaattacaacgtaccctatgaacctgactctgtggtcatggtagaagacatcctggaaatgtccttggtggagtttgggaatatcggggaagcatttctagagcagaaccagtctcccgagtcttcagtgactttgacctctgccaatgctactctgctgctgagcagacaaaacatatcaactttaccgctgagctcttacactctgggtcacccagcccctgtgaggctaggctttccgtcggctttagctttgaaggagctcttgaataaacatccaggagttaatgtccaagttttcgctttagacccagtcctgggcacctttctgatcctcaccagtgtcatcttgatggtacttgtggtaattaatcttttcgtttcggccattctcatggcctttggaaaagaaagaaagtcgcttaaggtagtaatgcaatccaacacaatatgctacagggaaaacagaatttccacggtgccgccctctggtacaagggaaacagcacgcaaagcaaaaggccacagagggctccctgagaatccagtacaactaagcgaggccttcaactgtcaagacaaactttgcaactggatcccggtgggacagtgccctgcagcgaggagtactgtatatgccaatgagagggcccagcttccaggaaccgttacaatggcgtcccgagtcattttccctctcccacttgcattcgagagtcttcacactccgggaaaatcctcaagtcaaggctccgatgctggggctggcccaccgatccttggtctgttttgcccatggacccgcggacctcgcctctctgcgctgcgggctcgcaggctgtcgtcgcccatagcggacgtcaacaaaaatatcccgccctctaaacaccggacaatactatcatctagaccagacggtagtattctttttcttccgcccttctttgtcgttactatcacaccgcccgcccgcgctgacgtacaagagaaagatggacacacaatagaacaagatgaaggagagagacaacaccaaatagaaaaaacagaagaggagaacacaaacaaaccaaaacgaaaacagaaactggctccaggaacaccacaaagcaatatgaaacctgttcatgaaaggagtcaggaatgccttccaccaaagaaacgagacctccccgtgaccagcgaggatatggggagaactaccagctgctccactaaccacacaccctccagtgatgcttctgaatggtcccgaggggttgtggtggctgggcagagccaggcaggagccagagtcagcctggggggtgatggagctgaggccatcaccggtctgacagtggaccagtatggcatgctgtataaggtggctgtgccgcctgccaccttttcaccaactggactcccatctgtggtgaatatgagtcccttgcccccaacgtttaatgtagcgtcttcactaattcaacatccaggcatccactatcctccactccactatgctcagctcccatccacctcgctgcagttcattgggtctccttatagccttccctatgctgtgccacctaatttcctaccgagtcccctcctatctccttctgccaaccttgccacctctcaccttccacactttgtgccatatgcctcacttctggctgaaggagccactcctcccccacaggctccctccccggcccactcatttaacaaagctccctctgccacctccccatctgggcaattgccacatcattcaagtactcagccgctggaccttgctccaggtcggatgcccatttattatcagatgtccaggctacctgctgggtatactttgcatgaaacccctccagcaggtgccagcccagttcttacccctcaggagagccagtctgctctggaagcagctgctgcaaatggaggacagagaccacgagagcgaaatttagtaagacgggaaagtgaagcccttgactcccccaacagcaagggtgaaggccagggactggtgccagtggtagaatgtgtggtggatggacagttgttttcaggttctcagactccacgggtagaggtagcagcaccagcacaccgggggaccccggacactgaccttgaggtccagcgggtggttgccagccaagttgggccacagagcacaattctgaggacacagtgtctctgtaaccacctgaccttctttgccagcgacttctttgtcgtgcccaggaccgtgaatgttgaagacacgatcaaactgttccttcgcgtgaccaacaatcctgttggggtgtcactgctggccagccttttaggattttatgtgatcacagttgtgtgggctcggaaaaaggatcaagcagatatgcagaagggctgccagacacctgccggagttcatcctcctgctcctcagctggaggaggcaggaactataccaagtggaggcctagtgaaggtcactgtcctggctgataatgaccccagcgctcaatttcactaccttattcaggtctacaccggatatcgaagaagcgctgctacaacagctaagttgtcagtgtacctcattcttcctggatgcaggacaagaactcgggacccgctgagtggtgtgggatccaggccagtagcaggagctgagtacaggctaccaggccaattcggcagaacgagcacagtggctgcaagcaatactcaggcagaaggtgctgccggccacagaggtttctggctggcaaagcaacaccctaaggatgctgtgacattagaactaagatgtaccccttgtaggtccatcgcaaggctgtcagacgccgggggcgtgcccgccggggcccgacgagtgcggtgtgccgcggtgctcgcaaattgctcgttggatatgaaacgcggggtgtgtgcctcaagaagtgctactgtgcgcaaaaggagtgacaaggacgttgaggagttgggtgatagagaatccgcagtaggcgtgagtgactttttggacggagatgcccattatgaaagaaatggaaataattcccatttgtaccagagacacaagaagacaaaaagaggagttgcaatagcaagagacaaaatgcccccagactttcaggatcatgtgattcctggccaagaaataaaagcaaaatcattttattccccagtggattcggatgaaaccggtgataaaatcaggtacaactccaagaggagacactggagaacaggcatgctgggtctgtaa

SEQ ID NO: 133910 - DNA, 945 bp, Homo sapiens
atgcgctcggtaaaccagcgttatctggaaacttactttcgtctgccggagcagttccgtagccttgaacctgtcgttcgcgagcgtattcgttctcgcctgacgcgcggtaaagtggaatgtaccctgcgctatgagccagatgttagcgcgcaaggtgagctgatcctcaacgaaaaactggctaaacagctggtaactgccgcgaactgggcagaagctcctcctggggtagagacagatcttattgatgttggattcacagatgatgtgaagaaaggaggccctggaagaggagggagtggtggcttcacagcaccagttggtggacctgatggaacggtgccaatgcccatgcccatgcccatgcctatgccatctgcaaatacgcctttctcatatccactgccaaagggaccaaggatcccctttgactttggttttgcgggttttgttattgcctggtacgtgtcgaatctggttggcggcaccatgtactggtggtttgccgcgcgcgaattacgccgccgaaatatccataacgccttcaaattgaatctgtttgagtctgcccgatacattaaaggcgcgtggagttttgtctggtcaaccaacattgcccactccatctggtcggcgcgtaactcgtgcagcacagtgttggtggggatcgtgttaggacccgctgccgccgggttatttaaaatcgccatgacattcttcgacgccgccggaacgccagcgggtttgctgggtaaaagtttttacccagaggtgatgcgtttagatccgcgcaccaccagaccgtggttgttaggtgtgaagtccggtttactggcgggcggaatcggtattctggtggcgctcgcggtgttgatcgtcggcaagccgctcatttcgctggtgtttggcgttaagtatctcgaagcgtatgacctgatttag

SEQ ID NO: 133911 - DNA, 2779 bp, Homo sapiens
  misc_feature (1)...(2779): n = a,t,c or g
ctgtggctggcctccccgcgcccagagcgaaattaagggcatgcccccagcagctgactcagtcggcgtggcgcttcccccaacgtctgccgtgcccccgccgcgggaagtagtccccggccgcgccgactccaaaggaaaccgagggagggtgccccgagtcagcgcgtgggtcccggcagcggcgatcgcgcagccaatccctggaaaggagggcgtggctatatcggccccgtggatccctccgcccgcgcttgttgtgctgaggccgagggagtcgccattttggatggcgatttctgaagtcggagccggctgcgttcacggcaggattcggttaggaggaacagcacagcatgctgggctctggatttaaagctgagcgcttaagagtgaatttgagattagtcataaatcgccttaaactattggagaaaaagaaaacggaactggcccagaaagcaaggaaggagattgctgactatctggctgctgggaaagatgaacgagctcggatccgtgtggagcacattatccgggaagactacctcgtggaggccatggagatcctggagctgtactgtgacctgcctgcctggctcggcttggccctattccagttattgaaaggaactagattctggtctggcttgaatctgtgtctacattgatctggggctgctcctcgactccagtcagaagtggcttgagttgaaaatagttgctgatcagctctgtgccaagtatagcaaggaatatggcaagctatgtaggaccaaccagattggaactgtgaatgacaggctaatgcacaagcctgagtgtgggaaccccacccccaaatcctggtggagagatacctgattgaaattgcaaagaattacaacgtaccctatgaacctgactctgtgggtcatggcagaagctcctcctggggtagagacagatcttattgatggtggattcccagatgatgtgaaaaaaagggaggccctggaagaaggaggggagtggtggcttcacagcaccagttggtggacctgatggaacggtgccaatgcccatgcccatgcccatgcctatgccatctgcaaatacgcctttctcatatccactgccaaagggaccatcagatttcaatggactgccaatggggacttatcaggcctttcccaatattcatccacctcagataccagcaacttcccccattcgtattgaatctgttagatggacatttaattgcttgattaaggaatattcttctttcttgcacagatttgtttgggtcctggacccaaggccagaaggcnttttgcaaagtttcctttccagacctgcagataacttttgacaacttttgttcctaccagagttgccatctgtgccagacacactaccaactgcatctgctggtgccagcaccttcaggcatctgaaggacattgactttgatgatctttcccggaggtttgaaggagctggaaaaaggaaaacatagggtctctttaaaccagggcaactttcacgttttggggagttgagactgagcaatttctccttggtaacaaagaatctccatgaaattcctgtttcatctgttaaccgtcactcagcacaacactccctcctgggctctcttcctgctccctccaagattctgctgcttttccagttctctgtttgaattcctgaagactaacaattggagactgaggccagagcaactggctcctggcagctgtgcttgtccgtttcctgtcagagtgatcccaggtttcctcctggcccgtcccatggtccctccacaggagtgtgagaggatgggggaagcactgcgggaagaccaccaaagatgggctgggacagtgggaagagagcaccgttgtgaaagcatcccagcctccgtgttgaggttccagacttaagaaacaagacccctctgtacagggggattgtggtgagtgagaatcaaggccaccttgtgtgttttctcactctcgaatgcaagtgggagagggaaaatgactcgggacgccattgtaacggttcctggaagctgggccctctcattggcatatacagtactcctcgctgcagggcactgtcccaccggggatcccagttgcaaaagtttgtcttgaccagttgaaggcctcgcttagttgtactggattctcagggagccctctgtggccttttgctttgcgtgctgtttcccttgtaccagagggcggcaccgtggaaattctgttttcccctgtagcatattggggtggattccattactggcaaaaaaaaggaccagggtgcccattcaagtccctagggtgggccctccccagctgcccttaatagaaagtacctcaaagccctttggggtaagtgaagcctggaaaagcccctacaggaaaagagggggacccctgtattccatttgaaaaaactttgaattccatggaaccctttaaaaacctaatcctcagaaaaaatttttggtgccccatgccagctgtagttgttcactgctttccctggatggatgggactccttatgtcataacttctgttaactcctttggcccaatagctaaggtcatccgttccaacgaggggtggcttttggggattgggatgatacagcttttgcttctgtgtagtatacctgtacatacttgtttcaggcagcctttctttaatgttttcaagttggtttgtattctgtagctcagtagctgtctaataaagttaaagatcctgaaaaaaaaaaaaaaaaaaa

SEQ ID NO: 133912 - DNA, 255 bp, Homo sapiens
cgggtgcatctcgacatccaggttggggagcatgccaacaactaccctgagattgctgcaaaagataagctgacggagctacagctccgcgcccgccagttgcttgatcagtatcgtgaagagcgcttccgactgacgagcgagagcaccaaccagagggtcctatggtggtccattgctcagactgtcatcctcatcctcactggcatctggcagatgcgtcacctcaagagcttctttgaggccaagaagctg

SEQ ID NO: 133913 - DNA, 279 bp, Homo sapiens
acatactttgaagacaaccctagggacctccagctgctgcggcatgacctacctttgcaccccgcagtggtgaagccccacctgggccatgttcctgactacctggagagcaaagtcccagaacccactgcgcagcttcaagcacaaaggaaagaaattcagacccacagccaagccctcctgaggttgttgggcctctctggagctgagcacattgtggagcacaggcttacacccttcgtggacaggcgaggctctggtgcttactgcacagcctga

SEQ ID NO: 133914 - DNA, 270 bp, Homo sapiens
gtggtgctgtcccggcagtacggctcggagggccgcttcacgttcacctcccacacgcccggtgaccatcaaatctgtctgcactccaattctaccaggatggctctcttcgctggtggcaaactgtatcgtgaagagcgcttccgactgacgagcgagagcaccaaccagagggtcctatggtggtccattgctcagactgtcatcctcatcctcactggcatctggcagatgcgtcacctcaagagcttctttgaggccaagaagctg

SEQ ID NO: 133915 - DNA, 386 bp, Homo sapiens
gactgtgtcatagcaactgatgctgaagtcctgggggccccagtcaagggcaagcgtcggggccgagggcccaaaggggacaaggcctctgatccggaagcaggtgtggcccggggcatagacttccaccatgtgtctgctgtgctcaactttgatcttcccccaacccctgaggcctacatccatcgagctggcaggtagtagtgtgacggcccaggcatctgcatggtaggcacactgagggacttggggtgtgctggacagagcctgcgggttggagatgcaagctgcactgtcttcccttgcaggacagcacgcgctaacaacccaggcatagtcttaacctttgtgcttcccacggagcagttccacttatgcaagattgc

SEQ ID NO: 133916 - DNA, 1020 bp, Homo sapiens
  misc_feature (1)...(1020): n = a,t,c or g
aggggcaaggggttttatttccaacatgggcagaccgagaaggcgctgtttcatcgagaaatccccgacgagacccatggtcatcggcaactatcgtacccagatgtgggataagcagaaggaggtcttcctgccctcgacccctggcctgggcatgcacgtggaagtgaaggacacgacggcaaggtggtgctgtcccggcagtacggctcggagggccgcttcacgttcacctcccacacgcccggtgaccatcaaattctgtctgcactccaattctaccaggatggctctcttcgctggtggcaaactgcgtgtgcaatctcganatccccaggttggggagcatgccaaacaaactaccctgagattgcctgcaaaaagataaagctgacggagctaacagctccgcgcgccgcccagttgctttgatcaggtggaacagattcagaaggagcaggattacccaaaggtatcgtgaagagcgcttccgactgacgagcgagagcaccaacccagagggtcctatggtggtcccattgctcagactgtcatcctcatcctcactgggcatctgggcagatgcgttcaccttcaagagcttctttgaggcccaagaagctggtgtagtgccctctttgtatggacccttcctttttacctcattttattttggtacttttccccacacagtcctttatccacctggatttttagggaaaaaaaatgaaaaagaataagtcacattggttccatggccacaaaccattcagatcagccacttgctgaccctggttcttaaggacacatgacattagtccaatctttcaaaatcttgtcttagggcttgtgaggaatcagaactaaccccagactcagtcctgcttcttttgcctcgagtgattttcctctgtttttcactaaataagcaaatgaaaactctctccattaccttctgctttctctttgtccacttacgcagtaggtgactggcattgcccacagagcaggcctgcctca

SEQ ID NO: 133917 - DNA, 2427 bp, Homo sapiens
ggcacgagggcagcgcgtgcgtgctgcgctactgagcagcgccatggaggactctgaagcactgggcttcgaacacatgggcctcgatccccggctccttcaggctgtcaccgatctgggctggtcgcgacctacgctgatccaggagaaggccatcccactggccctagaagggaaggacctccatggctcgggcccgcacgggctccgggaagacggccgcttatgctattccgatgctgcagctgttgctccataggaaggcgacaggtccggtggtagaacaggcagtgagaaggccttgttcttgttcctaccaaggagcttggcacggcaagcacagtcccatgattcagcagctggctacctactgttgctcggggatgtccgagttggccaatgtctcagcttgctgaaagactcagtctctcagagagctgtgcttgatggagaagccagattgtggtagtagggaccccatcttcgcatattaagccactttgcagcaagacagcctgaaactttcgtgactccctggagctttttggtggtggaacgaagcttgaccttcttttttccttttggctttgaagaagagctcaagaagtcttcctctggtaaggcagagtcacttgccccggattttaacaaggcttttctcatgtcagctacttttaacgaggacgtacaagccactcaaggagctgatattacataacccgggttacccttaagttacaggagtcccagctgcctggggccagaccagttacagcagtttcaggtggtctgtgagacttgagggaagacaaattcctcctgctgtatgccctgctcaagctgttcattgattcgggggcaagtctctggctcttttgttcaacactctaggaacgggagtttaccggcttacgcctgtttctttgggaacagtttcagcatcccccacctgtgtgctcaatggagagcttccactgcgctccagggtgccacatcatcttcacagttcaaccaaggtttctacggactgtgtcataggcaactgatgctgaagtcctgggggccccagttcaagggcaagcgtcggggccgagggcccaaaggggacaaggcctcttgatccggaagcaggtgtggcccggggcatagacttccaccattgtgtctgctgtgctcaacttttgatctttccccccaacccctgaggcctaacatccatcgagctggcaggtagtagtgtgacggcccaggcatctgcatggacagcacgcgctaacaacccagggcatagtcttaaccttttgtgcttcccacggagcagttccacttaggcaagattgaggagcttctcagtggagagaacagggggccccattttgctcccctacaagttcgggatggaggagatcgagggcttccgctatcgctgcaggtgtccacccccaggatgccatgcgctcagtgactaagcaggccattcgggaggcaagattgaggtttgatcaaggaagagcttctgcattctgagaagcttaaagacatactttggaagacaacccttaggggacctccaggctgctgcggcatggaccttacctttgcaccccgcagttggttgaagccccaacctggggccatgttcctgacttacctggttcctcctgcttctccgtggcccttggtgcgcccttcacaaagaagcgggaagaagcttgtcttccctcttgtaggaaggcccaagagagcaaagtccccagaaccccactgcgcagcttcaagcacaaaggaaagaaattcagacccgacagccaagccctccgtgaggttgttgggcctctataggagctgagctcaatgtggagcacaggctaacacccttcgtggacaggcgaggctctggtgcttaactgcacagcctgaaaaggacagttctgggcccggcagtgctgggccctttagctcctttggcacttccaagctggcatcttgcccccttgaccaacagaaataaaaaatttttagctggccccaagttttgtgcctccaagcatatgaaaaaggactatttgaatcccccaaaacatcaggagtcgggaaacttccgaagaacagctgtgcctggctctgtggctgcatgcagtgcttcacttggccagcagaggtcagctgtgccgagctgccccagccatgagaagagaatgcctgcccttgctggcaggtggctatggccggcccagagccttcctgcccagctcctgcagccctgctgcctgggatcaggctgggagatgggccttcctgaccgccagccttcctctccccgagcacacgcacatgtagattcggggggaagctgcctgctcttccttagaggagccggggcagctatctgctggtccctttctgaacaactgttgatgtgtgaaa

SEQ ID NO: 133918 - DNA, 497 bp, Homo sapiens
ctactactactaaattcgcgggccgtcgacccaaggtgaccgtcctaggtcagcccaagctgccccctcggtcactctgttcccgccctcctctgaggagcttcaagccaacaaggccacactggtgtgtctcataagtgacttctacccgggagccgtgacagtggcctggaagcgaggtagcagccccgtcaaggcgggagtggagaccaccacaccctccaaacaaagcaacaacaagtacgcggccagcagctacctgagcctgacgcctgagcagtggaagtcccacaaaagctacagctgccaggtcacgcatgaagggagcaccgtggagaagacagtggcccctacagaatatttattgagggtttattgagtgcggggagaagggcttgatgccttggggtgggaggagagacccctccactgggatcctgcagctctagtctcccgtggtggggggtgagggatgagaacctatgaacattcgtcga

SEQ ID NO: 133919 - DNA, 546 bp, Homo sapiens
atggcctggactcctcttcttctcttgctcctctctcactgcacaggttccctctcccagcctgtgctgactcagccaccttcctcctccgcatctcctggagaatccgccagactcacctgcaccttgcccagtgacatcaatgttggtagctacaacatatactggtaccagcagaagccagggagccctcccaggtatctcctgtactactactcagactcagataagggccagggctctggagtccccagccgcttctctggatccaaagatgcttcagccaatacagggattttactcatctccgggctccagtctgaggatgaggctgactattactgggctgtttcacagtattctggagtaccttttgagtattggttcctgaacatcagcagtcttggctgcctctgtggactcccggagttgtctccctgcttgtgttctggtgccatcctttgttcctccacccctgaccaaggtgcccagcagcctgtcttcaccagtcaaggaatccgccatcttggctgtagacatacatag

SEQ ID NO: 133920 - DNA, 1190 bp, Homo sapiens
  misc_feature (1)...(1190): n = a,t,c or g
acgcgtccgtgtgtccaccatggcctggactcctcttcttctcttgctcctctctcactgcacaggttccctctcccagcctgtgctgactcagccaccttcctcctccgcatctcctggagaatccgccagactcacctgcaccttgcccagtgacatcaatgttggtatctacaacatatactggtaccaacagaagtcagggagtcctcccagatatctcctatactactactcggactcatataagggcctgggctctggaagtccccagccgcttctctggatccaaagatgcttcagccaatacagggattttactcatctccgggctccagtctgacgatgagggatgactattactgtgcaacatgggatagcagcctgactggacaggtcttcggcggaggggaccaaagctgacccgtccctagggtcagcccaaggcctgcccccctggggtaactcttgttcccaaccctccctcttgaggagctttcaagcccaacaagggccacaactggtgatgtcctcataaagtgactttcttaccccgggaagcccgttgaacagttgcccctggaaaggcagatagccagcccccgttcaaggcgggaagtggagaccacccacacccctcccaaacaaagcaataatcaagtacgcggcccagcaggctatctgagcctaacggcttgagcagtgggaagttcccacagaaagctacagctgccagggtcacgcattgaaggggagcaccgtgggagaagacagtgggcccttacagaatgttccataggtttctcaacccctcacccccccaccacgggatgacttagagctgcaggattcccaggggagaggggtcttctcctcccaccccaaggcatcaagacccttctccctgcactcaataacaccctcaataaatatttctcattgtcaatcagnnnnnnnnnnnnnnggggggccctttttaaagaatccttgggggggcccaatctttggcggggaaggcaaggcttaacttttttccttttggggggcggatttaaaccctggctgggaatcttgggaaaggaccttaattttgggggggtgccttatttgggcaacctccctccagaaattaaaggctttagggaaaatataaatttttaaagggaaaggggggtaaacaaccggcctcg

SEQ ID NO: 133921 - DNA, 1857 bp, Homo sapiens
atggcgaaacctaaatcttacttggtggctatgctgaaacttgacccaggccctggcttgcaagtggacgtcagaactgccccagatgctatcttaaatattcagctgcaagaattccaaccaagttggaaagaaactttatttcattatacttccaggtctgggaatgatgccagtgaacagctctccttgacaggtctctcatcacttacagctcaaaggaaaagagaactcactcatttcacccgtttgatttgggtgaaatcatcaactggggacatcattaggagactaagactagatgcctctaggaaggctttgcaggatggttttgatctagttattgaagagactgattactttttcatgagcaggtggtccaggtaccttgtggaggtaaaagagataaaggtgctgtggtatgatgatggagccccatttccaaatggagaaacgaaggctcaagacattcagataacatgtctccagttgccatctagtaaagtgggacactcaggattcaaactcaggtgtccatctgtggagcaccctgagcagcacgccccactgtggcctcacagctccccaagcaagcagctggagcagggattacactacatcagaaaagagtgcatcagggatgcggggaagaatatagggtctgatgagcaagacagaaaccaacaaggtcaagaacacaagcagactcagcttaccctggcaagcaaggaagaagaagaagaaactagagatgaaggcagtcaattccagggaggtcatgttctgaagggggtggacaaagcagagaagcttaaagggggatccaagaggtggagggaaggccccttccccgacagatcttgcaatattgacaaggcatcccaaactaatgctatgaaagaaaacattcgccttgataacgtgtcccaagaaaaactctctgctggtggctccaacttagacaaaggaacaaagctgctccaagcgtacccccagagggatgagggatgtttgtctttctccattcttgaagcaactatcattgcaatcttcctcatttccccaccttgccaattgccttctgcacacagccaagggaccatgcagcaggcccctttagcgctgcgggaatcccctgcctctatccgagatccacattaccttgttgaagtcttcagaagttgccctcatttccttccatgtcttgttcaggagctggatacagatgcagaaaaactcctcaaaggatctgtcgtgggtgaagaacatcgggtggaagtcgttgcaggtctcactagctggaggaaagagatggaaaataagagaaaaagttttaaaacagtgaaacacgagaacataaccacaggtatgtgccccaaagggagacaagcggaggcacagatggctggaagtcaaagcaacctgaatagctttgaaggcggcaactggtccagtcctgggcaaaatcataaaatcagccaaaactgccttcaagcccccattgtagagcttccttgggtcacacctagtgctcggaactttaggtctggtccctactctcctcctcctcctcctcctcctcagcccctcccatcatcccatctgtcaagcttacatttttatagcccttttgtaagttatacctcatttgatctttacagttcctcttaccactcgtatcttatggatgaggatactgtggagcccaaggaactaaggtcaagccaaaaagtgatcggccattcttttactgggttccagccaactctgtccgctaacccctatgacagaggagatgggaaaataattgagctgctacctaggaaggcacaaacatttcctgtggtgaggacttag

SEQ ID NO: 133922 - DNA, 500 bp, Homo sapiens
ggcagcacctacagcgagctgctcagcggcaccgcctgcgtggtcacggcactgcaccttgcgcagcagcggcgccaccacctcctcgggggcttggcgtcccggcacgatgcgcctgagcagctcgctgtaggtgcgcccgtccagccccggcctcttcctgcgcccgccggcgctcaggcactcgtaggccacgctcacgttgttgttgaaggcggccctctgggagtggtgggccaggcgaaggtgccatagcgcgcggcccaggcgctgctgctgcagcaggagctggcccgggggctccccggcgccgccgtttacaggcgagcgcaggcccatgttctcgaagtagtgagccaggaaggcgatcggctcctcgggccgcgcctccagcaccttcagcagggccgcacgtagcatttccgtcacgccgacctgccgcaggaagtcctcctcgctctcggccgcccccgccgcccgggataccgactggcggccgc

SEQ ID NO: 133923 - DNA, 599 bp, Homo sapiens
ttttttttttttgaggtaaactcggcaagtttattctggtggtgtcaggactcctccgtgccagagtcatcctcatcgtccccgaagcagctgtcggcctcctcctccacctcgccgtcctcgtagtagtcgtcgtagaagaggtctgagccctcgtcgggcgccggcgcattggtcttcacgcagtactcggccagcgtggtgggcaccttcacgccgtcacgctccgcgtccaccttggtccccaggacctgcttccggatgatgttctgtgtacttcccgatccttccccttgctctctttccacttcctgtacatcacggaggcgtccacgtttgcgggcgagaaggtgttgggctcgttcaggagggagattcacactcaggagaatggtcctgacgttctgcgtggggttccacctctctgagggcagctccccgctctgggggtcgtccaccggcgggtggaggatggagatacacacgtcccccgtctcgtagatgttagggtgccacatcttggttaagaaaccgaaaggctggtggagagtatgggtagtcgatggggaacttgaggcgcgccttgaagtagccgccct

SEQ ID NO: 133924 - DNA, 1655 bp, Homo sapiens
tcagagctgaattaagaggacacccggctggcgtctgctggttgtgtgtgggaaaaaacgctcccacatgtggtcacagaagtcttttctgttggatgactgtgatgtggcggtgacagcaggggagaaacaaggcttgaggttctctatgtccgattggaccccctccaccagaacaggcaatgtcactaccatctgcccagctgcctcttcatttgacatctggggagactgaggctcagggaggatacctggccgggcggggctggagggcccgggccctgcgttccagaagagccgcctgtctccggcttcaggctccgcagggccccgtggggcgtccccctccgctgtcccaccaggccgggtccaggggtcccggcgtttccggcctcgaatccacctccagtcgccgcggttccggggccgtgggtgacctgctggggaaaaggtcttcagggcgaagggaaggctccgcgcgccccgcacgcggggaccccccagcgcagatcccggatccgcgcggcccacgggcctcagcccaccggcttgaccttcgcgatgaagagcgcggcggccctctccagaaactcctcgcgggtcatgggcgcgctgggccgccgccccccgacggcgcggtccagcgccagggcccaggctgtcgggccccaagcgcgagccggcctccaggaagcgcgcgggcgcggcggcgtcgctggcctgcagcgcgccctccagggtgtccagcacggcctggcccacgcggcggtcggccacggcggcggccgagtcctccagcagctggaagagcgcgccggcgcgcgccacgaactccagcagcacgaagcaggtgagtgtgcccgcgcggaagacgctcagcggcaccgcctcgtggtcacggcactgcaccttgcgcagcagcggcgccaccacctcctcgggggcttggccgtccggcagatgcgcctgagcagctcgctgtaggtgcgcccgtccagccccgcctcttcctgcgcccgccggcgctcaggcactcgtaggccacgctcacttgttgttgaaggcggccctgggacacgacttcacctttctgtgggccaccatccatgaggtcatccccaaaatgcgctgggggcagtcgcagtgtcagcgcggcggcccgagctcccacacgcctgacctctccgcatgacccagcaggagccgcaccggggccccttcatcaggatctgctgtgaggccgggcaggctgctgccgcctcacagatacaccccaaacccaggagggagggggacaccacgatgtccttcgtgacccgctcggaggccacactctgtccgttgcttctgcagtcccgttccggcctgtccccccaggaagcaggcctggggaccaaggtggacgcggagcgtgacggcgtgaaggtgcccacccgctggccgagtactgcgtgaagaccaaggcgccggcgcccgacgagggtcagacctcttctacgacgactactacgaggacggcgaggtggaggaggggccgacagctgcttcggggacgatgaggatgactctggcacggaggagcctcccccacaggaagcgcgtgtggggaggctcggggccggggccagccccacactgggtctccacagcggcat

SEQ ID NO: 133925 - DNA, 1860 bp, Homo sapiens
  misc_feature (1)...(1860): n = a,t,c or g
atggtgtttaaccttcgatctagctacgtggtcagaaggttcttctcctgggtgacagagcgagactgtctcaaaaaaagaaagaaagaaagagagagagagagagagagagggaaggacacggaaggaacggaagggacggaacggacagggacggggaccggaaggtcaaaggtaaaacgaacggacaggacaggaacggacaggacacggaagggaaggaaggaaggaaggaaggaaggaaggaaggaaggaaggaaggaacgaaagggaaaggggttactagtattggaatctactgctccatcaggagacctcacccgcccacaccacattgcatcagttgttcccaaccgttaccctcgctggttcactctaagccacattgagtcccagcagtgtgagctggcatccaccatgctaactgcagccaaaggcgatgttcggaggctggaaacagtattagaatccatccagaaaaacattcactcctcatcacacatcttcaagcttgcccaagatgcatttaaaatagcaactctcatggacagtttgccagacatcactcttttcaaagtgtctctggagctgggcctgcagatgagaaaagatagagtaactggttcagataccacatctagtcagtgggcccaccaggaggagaatatgggcctcttgccaggaggagaatgtggctgtggcaaggccacctggggttatgcgaatgacactgtcaaccttaaattggcgacggcgggagatggggtttatgccctggacagcatcatgcagacctggtttacactctttactcccaccgaggccacaagtatagttgcaactaccgtgatgtccaacagcaccatcgtccgcctccacctggactgccaccagcaggaaaagctggccagcagcgcccggacacttgcactgcagtgtgccatgaaggatccacagaactgtgccctctctgcgctaaccctttgtgaaaaggatcacatagcttttgagacggcgtaccaaattgttctcgacgctgctacgactggcatgagctatacacagctctttacaatagcacggtacatggagcaccgcgggtaccccatgagggcctacaagctggccaccctggccatgacccatctcaacctgagctacaatcaggacacacaccctgccattaatgatgttttgtgggcctgtgcgcttagccactcccttggtaaaaatgagcttgcagctataatacctctggtggtcaagagtgtcaagtgtgcaacggtactgtcagacattttgcgcagatgcactctgaccactcctggcatggtgggacttcatgggaggaggaactctggtaagctcatgtcactggacaaagcccccttgaggcaactcttggatgccacgatcggggcctacatcaacacaacgcactcacggctcacacacatcagtcctcggcactatagtgagtttatagagttcctcagcaaagcccgagagaccttcttaatggcgcatgatggacacattcagtttacacagtttattgacaacctgaaacaaatctacaaaggcaaaaagaaactgatgatgttggttcgggagaggtttggttgatagatcttgtatgaatggggtggggggtggggatgggagggatgctnncctccttccccactgcnttttcactccgccaccgaactgatctattgttagccttaaactgcgcgaaggacatatccttttctactcctcaaactgggagtttgtttcctactgcaaaggattttaatttaatttattcgctaacatgactattttttaattgactattgccctgtgtttacgacg

SEQ ID NO: 133926 - DNA, 373 bp, Homo sapiens
ggaaaactgcagaaaccctgtttctgtgaaaacttacgttagccccgtttcacagatgagaacctggagatgtgtactgtcatacagtcagttcagtgctaccaccgctcctggcatcctcctcgccccctgaacctgccccccaccaccagagccccccagcccactcacctgtgctgtgttggttccgcagactcggcggtggcgaggactgggctccctcttccggagggcgtgctgtgtggcgctcccactgcagctgcttctgctgctgttcctcctcctgctgttcctgctcccaatcagggaagaggaccgcagctgcaccctggccaacaacttcgcccgctccttcacgctcatgctgcgctaa

SEQ ID NO: 133927 - DNA, 4083 bp, Homo sapiens
atgggggaagggcactgctgcaagctgagttctttgaaggatctggtagtaggcaaggctgtcattgcttgcccatttacagatgagaaggctgatatccagcggctggatgtggtttcccgggaaatgaatggaaacatcctcgtgcctaagcctctggatccaggaaaggatttggctctgccagtcaagggcccaggcactgcagggccatggatctccttaagggttcaccatcagccagcaggcccggtgctcagcacaccaaggagctttcaaggaggagatccctgggaagtgctcagcacagagtctgggagctcagttaggccgtcctacaccacaaatgccaaaaccagtgagaaatgcaagccacagggtgaggtgggagaagttgcattcattaatattgactcagagcaggtgctgagctccacgaaggaggggcagttctattggatgccccacgcccctgcaggtgccatgactcagcagccccaggacgactttgacaggagcgtggaggatgcccaggcatggatgaaggctgtgcaggaccagctgcaggtcaatgacaacacgcagggaccccgcgcggccctggaggccaggctgtgggagaccgaggggggacccgtgcagcctgagccctgtcacgttcaagctctctgctgtgctcccttcaccttctgtctgggaagctccctcacagatcacccaagagtggaataccccctgctttctgccatccctatgccagggctggggctgtgcagcctgtgcctctttcatgaggataagaaggacgaaggtccaggggtctggggggaccacacagtcaggacaccaggctttggagaaggggccattgtccgcatgggacattccagacctggctgctccttctggaaaatatgccagctggagcccgaggggcgtgtgagggtggacctcgtgctacggatggctgaagccctcttggcatgctgccctggggaccagaagcccgggatcctggcccggctgaaggacatcaaggcccaatgggaggagacagtcacctacatgactcactgtcacagccgcatcgagtgggtgtggctgcactggagcgagtacctgctggcccgagatgagttctaccgctggttccagaagatgatggtcacactggagccccacatcgagctccagctgggcctgaaggagaagcagtggcagctgagccacgcccaggtgctgctgcacaacgtggacaaccaggcggtgctcctggaccggctgctggaggaggcagcctccctgttcaacaggatcggggaccccagcgtggacgaagatgcccagaagagaatgaaggctgagtacgatgcagtgaaggccaaggcccagaagcgtgtagatctgctggagcaggtggcccgggagcatgaggagtaccaggcaggtgtggacgagttccaactgtggctgaaggcggtggtggagaaggtgaatggctgcctggggcggaactgcaagctgcccatcacgcagcgcctctccacactgcaggacattgccaaagattttcccaggggcgaggagtctctggagacgctggaggagcagtctgcgggtgtcattcggaacacctctcctttgggtgcagagaagatcaccggagaactggaagagatgaggaaagttctggagaagctgcgcgccctctgggaggaggaggaggagcggctgcggggcctgctccggtccaggggagcctgggagcagcagattaagcagctggaggctgagctcagtgagttcaggatggtcctgcagaggctggcccaggagggcctgcagcctgcggcgaaagcggggaccgaggacgagctggtggcacactggagacgctactcggcaacacgggcggcgctggcctcggaggagccccgggtggaccggctgcaagcccagctgaaggagctcatcgtcttccctcacaacctgaagccactctctgatagtgtcatcgctaccatccaggagtatcagagcctgaaggtgaagagcgcgaggctgcgcaatgccgcggcggtggagctgtggcagcatttccagcggcctctgcaggatctgcagctgtggaaggccctggcccagcggctcttggaggtcactgccagcctgccggacctgccttcccttcacaccttcctgccccagatcgaggcagccctgatggaaagctcccgcctgaaagagctgctgacgatgctgcagctgaagaaagacctcctgattggcatctttggccaggagagagccacggcactcctggagcaggtggcaggttccatgagggacagagacctgctgcataacagcctcctgcagaggaaaagcaaactgcagagcctgctcgctcagcacaaagactttggagcagcttttgagcccctgcagaggaagctcttggacctccaggtcagggtccaagccgagaaggggcttcagcgggaccttcctggaaaacaggcccagctctcaaggttgcaggggctgcaggaagaggggctggacttgggggcacagatggaggctgcaaggcctctggtccaggagaaccccaaccaccagcacaaaatggaccagctttcctccgacttccaggccctgcagaggtctctggaggaccttgtggacaggtgtcggcagagtgtgcaggagcactgcaccttcagccaccagctgctggagctgcggcagtggatcgttgtgaccacgcaaaagctggaggcacaccggggagaggcgggcccgggggatgccgagtcccaagaggccgagtttgagaggctggtggcagaattcccggagaaggaggcccagctgtccctggtggaagcgcagggctggctggtgatggagaagtcttctccggagggtgctgccgtggtgcaggaggagctcagggagctggcagagtcgtggcgggccttgaggctgctggaagaaagtctgctgagcctcatcagaaactggcatctgcagaggatggaagtggattcggggaagaaaatggttttcaccaacaacatcccaaagtcaggatttctcatcaatcccatggatcctattcccaggcatcgtcgacgcgcaaatcttctacaggaagaagaagggagccatgaagatttctcccagctcctgaggaactttgggcagtggttgcaggtggaaaactccaagctggttagaatcatcgcaatgagaacttctacagctgaggacttgaggaccagaaaatcgaagctgcaggagctggaggctcgggtgccagaaggtcagcatctctttgagaacctccttcgtctcgggccagcaagggggacctcggatgagctggaagatctgcgctaccagtggatgctgtacaagtccaagctgaaggactctggccacctgctgtgcttcttcatcaccatcatcaccctcaccatcactaccaccactaccaccatcaccaccaccatcaccatcatccttaacaccatcaccctcaccatcaccaccatcaccatcgcaatcatcatcatcaccatcaccatcatctccatcaccatcatcaccatcaccatcatcatctctatcactcacacttaccatcaccatcacatcaccatgatcatcaccattatcaccatttccatgatcattatcaccatcatcaccaccttactctcaccaccccacccccaccccaccaccattagcgtcatgatcattatcgcatcaccaccatcatcaagcatcactgccatcattgccatcacccccatcgccatggtcactatcactatcatcatcacgggactgtggcttttggtgccctggaggactcggcggtggcgaggactgggctccctcttccggagggcgtgctgtgtggcgctcccactgcagctgcttctgctgctgttcctcctcctgctgttcctgctcccaatcagggaagaggaccgcagctgcaccctggccaacaacttcgcccgctccttcacgctcatgctgcgctacaatggcccaccacccacctaa

SEQ ID NO: 133928 - DNA, 538 bp, Homo sapiens
gtagaggctgggccttcaagaacccagatactattgagcagtgccggcgagagggcttcagccagaagatgcaggagcagaagaatgaaggctgccaggtgtatggcttcttggaagtcaataaggtggccggaaacttccactttgcccctgggaagagcttccagcagtcccatgtgcacgtccatgacttgcagagctttggccttgacaacatcaacatgacccactacatccagcacctgtcatttggggaggactatccaggcattgtgaaccccctggaccacaccaatgtcactgcgccccaagcctccatgatgttcacagtggctggactcatcgattcgctcatctaccactcagcacgagccatccagaagaaaattgatctagggaagacaacgtagtcaccctcggtgcttcctctgtctcctctttctccctggcctgtggttgtcccccagcctctgccaccctccacctcctcggtcagccccagccccaggttgataaatctattgattgattgtgatag

SEQ ID NO: 133929 - DNA, 1098 bp, Homo sapiens
atggaggcgctggggaagctgaagcagttcgatgcctaccccaagactttggaggacttccgggtcaagacctgcgggggcgccaccgtgaccattgtcagtggccttctcatgctgctactgttcctgtccgagctgcagtattacctcaccacggaggtgcatcctgagctctacgtggacaagtcgcggggagataaactgaagatcaacatcgatgtactttttccgcacatgccttgtgcctggtcccagtaccttagcctgattttcctgcttccagatctgagtattgatgccatggatgtggccggagaacagcagctggatgtggaacacaacctgttcaagcaacgactagataaagatggcatccccgtgagctcagaggctgagcggcatgagcttgggaaagtcgaggtgacggtgtttgaccctgactccctggaccctgatcgctgtgagagctgctatggtgctgaggcagaagatatcaagtgctgtaacacctgtgaagatgtgcgggaggcatatcgccgtagaggctgggccttcaagaacccagatactattgagcagtgccggcgagagggcttcagccagaagatgcaggagcagaagaatgaaggctgccaggtgtatggcttcttggaagtcaataagatcaacatgacccactacatccagcacctgtcatttggggaggactatccaggcattgtgaaccccctggaccacaccaatgtcactgcgccccaagcctccatgatgttccagtactttgtgaaggtggtgcccactgtgtacatgaaggtggacggagaggtactgaggacaaatcagttctctgtgaccagacatgagaaggttgccaatgggctgttgggcgaccaaggccttcccggagtcttcgtcctctatgagctctcgcccatgatggtgaagctgacggagaagcacaggtccttcacccacttcctgacaggtgtgtgcgccatcattgggggcatgttcacagtggctggactcatcgattcgctcatctaccactcagcacgagccatccagaagaaaattgatctagggaagacaacgtag

SEQ ID NO: 133930 - DNA, 474 bp, Homo sapiens
atggaggcgctggggaagctgaagcagttcgatgcctaccccaagactttggaggacttccgggtcaagacctgcgggggcgccaccgtgaccattgtcagtggccttctcatgctgctactgttcctgtccgagctgcagtattacctcaccacggaggtgcatcctgagctctacgtggacaagtcgcggggagataaactgaagatcaacatcgatgtactttttccgcacatgccttgtgcctggtcccagtaccttagcctgattttcctgcttccagatctgagtattgatgccatggatgtggccggagaacagcagctggatgtggaacacaacctgttcaagcaacgactagataaagatggcatccccgtgagctcagaggctgagcggcatgtctgtgagcttcagctagaaagtggtaataaaacagtagtaccaaccacatggaattgtaagatcaaatga

SEQ ID NO: 133931 - DNA, 690 bp, Homo sapiens
tttcgtggccggctggcgtcccctttccggccggtccccatggaggcgctggggaagctgaagcagttcgatgcctaccccaagactttggaggacttccgggtcaagacctgcgggggcgccaccgtgaccattgtcagtggccttctcatgctgctactgttcctgtccgagctgcagtattacctcaccacggaggtaaggggcggggcttaatgcgtgggcggggcttggcattctaggagtaggacctttaggggtgggagtggggaaggagaggtttggggctaagtcttactgaggtagcgctgccccaggtgcatcctgagctctacgtggacaagtcgcggggagataaactgaagatcaacatcgatgtactttttccgcacatgccttgtgcctatctgagtattgatgccatggatgtggccggagaacagcagctggatgtggaacacaacctgttcaagcaacgactagataaagatggcatccccgtgagctcagaggctgagcggcatgttttatcattcgttgtttcagcagattaatgcaggacaccagtggaaccaacataatttgctataggactggatgtggagtggaggagagcaaagtcatggttgttgattccaacgctttcagcctgagcaaatgaatgacttgagatggagatgactggaggag

SEQ ID NO: 133932 - DNA, 1517 bp, Homo sapiens
  misc_feature (1)...(1517): n = a,t,c or g
aagaggagacagaggaagcaccgagggtgactacgttgtcttccatagatcaattttcttctggatggctcgtgctgagtggtagatgagcgaatcgatgagtccagccactgggagagagacaagggctggcactggcccagtgggggccttggcttttgacgctgagagccttgtcacttaactggccaggccagcatctgccccttcacccccaaccaaacctggggcacccaggctttaccctccccaccccacagctcacagacgccctgggcctcttacctgtgaacatgcccccaattgattgggcggacacaccctgtcaggaagtgggtgaaaggaacctgtgcttctcgcgtcaagcttcacccatcatcgggcgagacttcataagaggacgaagactcccgggaaagccttggtccgcccaacgagcccattgggcaaccttctcatgtctgggtcacagagaacttgatttgttcctcagtaccctggggtgggaggggagcctctccgtccaccttcatgtacacagtggggcaccacctttcacaaagtactgggaaacatcatggagggctttggggcgcagtgacattgggtgttggtcaaggggggttcacaatgccctggatagtcctcccccaaatgaccaggtgctggatgtagtggggtcatgttgatgttgtcaaggccaaagctctgacaagtcatgaacgtgacacatgggaactgctggaagctctttcccaggggacaaagtggaagtttccggccaccttattgacttgcaagaagccatacaccttggcagccttcattcttctgctcctgcatcttctggctgaagccctctcgccggcactgctcaatagtatctgggttcttgaaggcccagcctctacggcggatatgcctcccgcacatcttcacaggtgttaacagcaacttgatatcttctgcctcagcaccatagcagcttctcacagcgatcagggtccagggagtccagggtcaaacaccgtcacctcgactttcgcagagctcatgaccgctcagcctctgagctcacgggggatgccatctttatctagtcgttgcttgaacaggtttgtgttccaacatccagctgctgttctccggccaacatcccatggcatcaatactcagataggcacaaggcatgtgcggaaaaagtacatcgatgttgatcttcagtttatctccccgcgacttgtccacgtagagctcaggattgcacctccgtggtgaggtaatactgcagctcggacaggaacagtagcagcatgagaaggccactgactaatggtcacggtggcgcccccgcaggtcttgacccggaagtctctccaaagtgttggggtaggcatggaactgcttcagcttccccagcgcctccatggggaccggccggaaaggggacgccagacgaaatcgtcgacccggnanttccggngcggtncgtcacgcttcagtatcaaaggggcacg

SEQ ID NO: 133933 - DNA, 473 bp, Homo sapiens
  misc_feature (1)...(473): n = a,t,c or g
nattgattagcatctcnccagngcggnggaattcccaagacagagaggatcggctgtggttcccacttctgtgagaagctccagggtgttgaggagaccaacatcgaattactggtgtgcaactatgagcctccggggaacgtgaaggggaaacggccctaccaggaggggactccgtgctcccaatgtccctctggctaccactgcaagaactccctctgtgaacccatcggaagcccggaagatgctcaggatttgccttacctggtaactgaggccccatccttccgggcgactgaagcatcagactctaggaaaatggtttttccagcccaggacaagccaggtgagctgcaggccacactggaccacacggggcacacctcctncaagtccctgcccaatttccccatacctctgccaccgctaatgccacgggtgggcgtgccctgctctgcagcgtccttgcangg

SEQ ID NO: 133934 - DNA, 448 bp, Homo sapiens
  misc_feature (1)...(448): n = a,t,c or g
accagggcaacctgtagtgccagtgcctggttccacccggggggcatctgagaactgtgtccttccattcctgagtccagcacttcccaggccagccagggtggtgcttgtgtgggaaggactttaaatccagctgccagacccctggacgggagaaggagagacggctggccaccatgcacggctcctgcagtttcctgatgcttctgctgccgctactgctactgctggtggccaccacaggccccgttggagccctcacagatgaggagaaacgtttgatggtggagctgcacaacctctaccgggcccaggtatccccgccggcctcagacatgctgcacatggtggtatgggccaagacagagaggatcggctgtggttcccacttctgtgagaagctccagggtgttgaggagaccaccatcgagttatggtgtgcactagn

SEQ ID NO: 133935 - DNA, 1227 bp, Homo sapiens
tttgggcaagacaaccccaagcccaagttaggcagtgagcttccctcaaaatccttcccaccccccaggactcaggttgggagggccaggagaggtgtgggcccggtgtgcagtccttcaggcggccccccttgagctcgcaagccagccaaggccttgtgccttccaggattggattggtgtgatgaggcacatgccccgtagcctttcccttccggagggccttaaccaagaagtatcttgtttaggggctggggacagggtggggaagatgacaggaggacagctgtcctcttcaccctttgagtggtatccccttcagaagattccagccaacaccagaggaggcaggagcagtagtcccaggagagggccccacacatgaccagggcccgagttcagccctgacacgacgctaggcttgtcagggccctctgcacctggcaaggacgactgcagagccagggcacgcccacccgtggcattagcggtggcagaggtatatggggaaattgggcagggacttggagaaggtgtgccccgtgtggtccagtgtggcctgcagctcacctggcttgtcctgggctggaaaaactgaggccaagacctcactggaaggaggcaactcagcctcagcctcagcctcctcctgggcatggggtaggagttcccttgcccctgtcagggacatcttggggtccagagagttctctgggctcctagagggcacttttgttttgtctgtcactttgtctgctgattttgggataggaacatgggtcgatttggggaaggtaactggctcctcatccaaggagggcaggctgtgagctgccaaaatggaagggacctcagttgttacgcaaggtggagcctctgttgccatggagggcgggtctttcgttgctaaggaagttggggcctgggtttccacagcaggcagagccttggttgccagggagcctgagacctctgttaccaagaaagccggaatccccgttgctagggaagaaggagtacccattttcctagagtctgatgcttcagtcgcccggaaggatggggcctcagttaccaggtaaggcaaatcctgagcatcttccgggcttccgatgggtttggttggcacataccaccttggttcactttcttcacagcacttctcctctgcggcttgatgtttaagattcactgagtgtccgttgtctcccagtggaatgtgagctc

SEQ ID NO: 133936 - DNA, 1288 bp, Homo sapiens
  misc_feature (1)...(1288): n = a,t,c or g
aggggcaggactggtggcagaggccacagagatgaccacaccagggcattctgtagtgccagtgcctggttccacccggggggcatctgagaactgtgtccttgcattcctgagtccagcacttcccaggccnnnnnnnnnnnnnnnnnnnnnnnnnnnnnnnnnnnnatttccctaatggatctgtccacaacttaggaactcacacagcttttggcctgagcccccgttaccaagagaaaggaggtttttgccaaggactccaaggggagtgcacttgatgctggtcgggacccaaagcgcccagccctccctgagacattgtgtgagtcgggctgggcctcaaacacggcccccactgccccaccccagccagggtggtgcttgtgtgggaaagactttaaatccagctgccagacccctggacgggagaaggagagacggctggccaccatgcacggctcctgcagtttcctgatgcttctgctgccgctactgctactgctggtggccaccacaggccccgttggagccctcacagatgaggagaaacgtttgatggtggagctgcacaacctctaccgggcccaggtatccccgccggcctcagacatgctgcacatgagatgggacgaggagctggccgccttcgccaaggcctacgcacggcagtgcgtgtggggccacaacaaggagcgcgggcgccgcggcgagaatctgttcgccatcacagacgagggcatggacgtgccgctggccatggaggagtggcaccacgaggcgtgagcactacaacctcagcgccgcctcctgcagcccaggccagatgtgcggccgctacacgcaggtggtatgggccaagacagagaggatcggctgtggttcccacttcttgtgagaagctccagggtgttgaggagaccaacatcgaattactggtgtgcaactatgagcctccggggaacgtgaaggggaaacggccctaccaggaggggactccgggctcccaatgtccctctggctaccactgcaagaactccctctgtgaacccatcggaagcccggaagatgctcaggatttgccttacctggtaactgaggccccatccttccgggcgactgaagcatcagactctatgaaaatgggtgcagagggccctgacaagcctagcgtcgtgtcagggctgaactcgggccctggtcatgtgtggggccctctcctgggactactgctcctgcctcctctggtgttggctggaatcttctgaaggggataccactcagaggc

SEQ ID NO: 133937 - DNA, 404 bp, Homo sapiens
  misc_feature (1)...(404): n = a,t,c or g
tttcgtgcccgccctcggctcctccgccgtgatgctgtcccgatcccgctgtgtgtctcgggcgttcagccgctcgctctccgccttccagaaggggtctccttatgccagggaccaggttaccctaacagcaggaaggttgtcattaacaacagtgtcttcagtgttcgctttttcagaactacagctgtatgcaaggatgacttggttacagtcaaaaccccagcgtttgcagaatctgtcacagagggagatgtcaggtgggagaaagggaagatttagtttcctannnnnnnnnnnnnnnnnngaaaaaaagttttgtnnnnnnnnnnnnnnnnnnnnnnnnnnnnnnnnnnnnnnnnnnnnnnnnnnnnnnnnnnnnnnnnnnnnnnnnnnnnnnnnnc

SEQ ID NO: 133938 - DNA, 1323 bp, Homo sapiens
atgccagcagtaacaatattgaagccaaatttaaaacaaataattctaggattaaaagctgcagaggtgtcatcacttccaccatcaattgtcttggatgccaaggaaatcacaactcaaattacgagacaaattttgaaggggaactgccctctagggagacattccctgcctggggtctccttatgccagggaccaggttaccctaacagcaggaaggttgtcattaacaacagtgtcttcagtgttcgcttcttcagaactacaactgtatgcaagtatgacttggttacagtcaaaaccccagcgtttgcagaacctgtcacagagggagatgtcaggtgggagaaagctgttggagacacagttgcagaagatgaagtggtttgtgagattgaaactgacaagacattggtgcaggttccatcaccagcaaatggcatgattgaagctcttttcgtacctgatgggggaaaagtcgaaggaggcactccgcttttcacactcaggaaaactggtgctgctcctgctaaggccaagccggctgaagctcctgctgctgcagccccaaaagcagaacctatagcagcggcagttcctccccgtgcagcacccatacccactcgatgccaccagtgccctcgccctcacaacctccttctagcaaacctgtgtctgcagaggcccagaatacatgtgccaatgctgacaatttttaatgagattgatgtgagtaacatccagaagatgagggctcggcacaaagaggcttttttgaagaaacataacctcaaactaggcttcatgtcggcatctgtgaaggcctcagcctttgccttgcaggaacagcctgttgtaaacgcagtgattgatgatataaccaaagaggtggtatatagggattatattgacatcagtgttgcagtggccaccccacagggtctggtggttccagtcatcaggaatgtggaagctatgaattatgcagatattgaacagaccatcactgaactgggagagaaggcccgaaagaatgaatttgccattgaagatatggatggtggtaccttcaccattagcaatggaggtgtttttggctcactctttgaacacccattatcaacccccctgtctgccatcctggggatgcatggcatctttgacaagccagtggctataggaggcaaggtagaggtgcagcccatgatgtacgtggcactgacctatgatcaccggctgattgatggcagagaggctgtgactttcctccgcaaaatcaaggcagcggtagaggatcccagagtcctcctctttgatctttag

SEQ ID NO: 133939 - DNA, 1561 bp, Homo sapiens
atggagtcagaagccctggtggtctgcatcaaccactgcatggctgtgaactatggaatgatctaccagagaggcagctccaatatgaacatcctctccctgtccctcaagcatcctgagaagactggaatcagcccaacagcaaaccatggcatctcagatctgcaggaaggagaggctgcgtgtggttcgctccgaacacccctcgtcgggcggcgggtactgcggcccgccccacttccggttgttgtccggccctatatccggtgtccgcccgccctcggctcctccgccgtgatgctgtcccgatcccgctgtgtgtctcgggcgttcagccgctcgctctccgccttccagaaggggaactgccctctagggagacgttccctgcctgaggatgacttggttacagtcaaaaccccagcgtttgcagaatctgtcacagagggagatgtcaggtgggagaaagctgttggagacacagttgcagaagatgaagtggtttgtgagattgaaactgacaagacatctgtgcaggttccatcaccagcaaatggcgtgattgaagctcttttggtacctgatgggggaaaagtcgaaggaggcactccacttttcacactcaggaaaactggtgctgctcctgctaaggccaagccggctgaagctcctgctgctgcagccccaaaagcagaacctacagcagcggcagttcctccccctgcagcacccatacccactcagatgccaccggtgccctcgccctcacagcctccttctggcaaacctgtgtctgcagtaaaacccactgttgccccaccactagctgagccaggagctggcaaaggtctgcgttcagaacatcgggagaaaatgaacagggatgcggcagcgcattgctcagcgtctgaaggaggcccagaatacatgtgcaatgctgacaacttttaatgagattgacatgagtaacatccaggagatgagggctcggcacaaagaggcttttttggaggaaacttaagctcaaactaaggctcatgtcggcaattgttgagggctcagccgtttgccttgcaggaaaacgcctttgttaatggagggaattgacgacacaaccaaagaggtggtgtatagggattatattgacatcagtgttgcagtggcccacccacggggtctggtggttccagtcatcaggaatgtggaagctatgaattttgcagatattgaacggaccatcactgaactgggagagaaggcccgaaagaatgaacttgccattgaagatatggatggcggtaccttcaccattagcaatggaggcgtttttggctcgctctttggaacacccattatcaacccccctcagtctgccatcctggggatgcatggcatctttgacaggccagtggctataggaggcaaggtagaggtgcggcccatgatgtacgtggcactgacctatgatcaccggctgattgatggcagagaggctgtgactttcctccgcaaaatcaaggcagcggtagaggatcccagagtcctcctcctggatctttag

SEQ ID NO: 133940 - DNA, 3289 bp, Homo sapiens
gcaagataaggagggactatagtatgctatttaactttcttttagtaatatgagttgcaagtaaaaattcctggtatagtattattattacaacaagacagtctatgcctgttgaaactggcactttttctttcccaaaactaattttattctttaaggggcatgctatcttggaaaggagggcaaatagagctgcctgtgaaaaggaataatataaaacggagacccggccgccgtgatgctgtcccgatcccgctgtgtgtctcgggcgttcagccactcgctctctgccttccagaaggggaactgccctctagggagacattccctgcctggggtctccttatgccagggaccaggttaccctaacagcaggaaggttgtcattaacaacagtgtcttcagtgttcgcttcttcagaactacaactgtatgcaagtatgacttggttacagtcaaaaccccagcgtttgcagaacctgtcacagagggagatgtcaggtgggagaaagctgttggagacacagttgcagaagacgaagtggtttgtgagattgaaactgacaagacattggtgcaggttccatcaccagcaaatggcatgattgaagctcttttcgtacctgatgggggaaaagtcgaaggtggcactccgcttttcacactcaggaaaactggtgctgctcctgctaaggccaagccggctgaagctcctgctgctgcagccccaaaagcagaacctatagcagcggcagttcctccccgtgcagcacccatacccactcagatgccaccagtgccctcgccctcacaacctccttctagcaaacctgtgtctgcagtaaaacccactgctgtcccaccactagctgagccaggagctggcaaaggtctgcattcagaacatgcaggagaaaatgaacaggatgcggcagtgcattgctccagcgtctgaaggaggcccagaatacgatgtgccaatgctgacaatttttaaatgagattgacatgagtaacatccaggagatgagggctcggcacaaagaggcttttttgaagaaacataacctcaaactaggcttcatgtcggcatttgtgaaggcctcagcctttgccttgcaggaacagcctgttgtaaatgcagtgattgacgacacaaccaaagaggtggtgtatacggattatattgacatcagtgttgcagtggccaccccacggggtctggtggttccagtcatcaggaatgtggaagctatgaattttgcagatattgaacggaccatcactgaactgggagagaaggcccgaaagaatgaacttgccattgaagatatggatggtggtaccttcaccattagcaatggaggcgtttttggctcgctctttggaacacccattatcaacccccctcagtctgccatcctggggatgcatggcatctttgacaagccagtggctataggaggcaaggtagaggtgcggcccatgatgtacgtggcactgacctatgatcaccggctgattgatggcagagaggctgtgactttcctccgcaaaatcaaggcagcagtagaggatcccagagtcctcctctttgatctttaggaggaacccacacaccctacaaattgatcatgcaggaactgaaaaccagtctttctccctgtccccctcatgggtcccgggttagcctggtgacagcaagacacatgctgttggcctcaagcaaggaagcagagcactgtgtaaccagcagtcacaggtcttttttttggcgttcctgcctggctctctccctctctgcacctgtctcataccctcgaatatcttaattccttaggcttaagagagagagccttaatggatgctcattcatattcctgcctttcttccatcagctctctgcaaagatgattttgcttctccctagtgctggtatattatagagaaacccccggcggcccatgtgattaagttcctatcttttgaaagtttgttcgacagagacttctaggaggatgctgtgcctcccaagctcagagcagcctctgtcctggctgtgcacattctcccttgattccactttgtgtggagggattgaacacaggcaaagaggtgctgctttgcttcttcaatggcaccttcattctcccgttgtcattgacttcaagatgcctcttctacctcttccaggaagcacaggccaggggatctgggtgtgtgagtgggaggagagggcagaggtcccctgaggtcaatgcattgtaatcatcatacgaaggagagcccaggtctgcccctcacgcttcccatcatagggctgacaccaagaagactccgtctttggcacaatctcacacagctggggctgtagcaaccctttccaacccctcttgctggtttgctggcacacattacaccaaccttgtcctagacaagattctcacaccatcatcgccacgtggaccaagcagtggtcccgagaaagaggccagagcctgggtagagattaggggaagggaggtctcctctagactgaccttacattgcctggagcttttcgagttaaagttgcttgtaagcacctgggcttgaggaggccagttttttgtcccttccggcgcttatagcggggcccttgtctcttccctctgcaggacacaagatctggaggacgtggactggggtaggaaacccaccctgaggggtgttagtacctagtggtgaaacggatgaggtcatttctaaggtgtgttgccccggtggatactgggcaacaatcattggaattccttggagccactgggattcatggctttgtatccaactgcatccaggctctgaggctgctgtcgtttgacaccagggccagtagagagatgcccttttgtatcttaagccaaggaagtgaggcctgggggtgtcgggaggggggaaggggtgggagcccaatactgagtgcctgcagcatctactactctgtcttcactattcagaaccttgtaactaaagtatttaaagaagctgattttaaatgcaaattaaagggcagatattctcaaacagggttcctgtatctgttccttttggctactgaggtggtacaagtccccagcactgttgcactgaaattattgaaagccactcaaggtcctgttgcttattttgtgaaatcagaaatcccttatgtggaacttaacactcataatttgacagaaggtagaaccctgactgccagccgggaaagtgttgccaaaaagagtcaacctctgtaaaaatatttgaagag

SEQ ID NO: 133941 - DNA, 1211 bp, Homo sapiens
cgcgtggtcgatttctgccgccctgccaccctgccgccctgccgccctgccgccctgccgccctgctgccggtggtcgctgcccgtggtgctccgtcgcccccgccacctcacgtcctcccgtgcgtcgggagcggtctcggctacaacatgttgggcatgatcaagaactcgctgttcggaagcgtagagacgtggccttggaaggtcctaagcaaaggggacaaggaagaagttgcctatgaagaaagggcctgtgaaggcgggcaaatttgccacagtagaagtgacagataagcctgtgggatgaggctcttacggggaagcaattgcccaaggttcgcaaagtatgcggggggcaccaatgacaaagggaattgggatggggatgacagtccctatttcctttgcatgtgttccccaattgaagatggctctcttgcagaaagaaattaaaagtctggtttccggatttccaaaccaattttcaaagcgacccaccagctcccagttgacaaaagcgttaagatttgaggaacgggaaggcatccactgtctaattccatgccagtttggtggttatgccaagggaagcagactacgtagtcacaagccacccgttttgcgtgctgccctgggagggcacagccacctaccggggggacatctacttctgcacgggttatgaccctcccatgaaagccctacggacggcgcaatgagatcttggctgtttgaagacatgagtgaccccactgaaccaagaacttactgggaagtgtgcctctgtgtctccttccttcgggggtaaggaggggacagtgcttcccaagttcccagctggcaagtcccaactttaaccaacttttcctttcaaagtcagttacttgccaatttttcttgaaaaaagcatgtttccatatactaagtctcttttctcacggtagggaaataatacagccaagatatgcagcatccttctcatttgatgtagaaaaattcttgcggatagacccagaaaaatccctggcagcttttctcccaggcatctgggtcactaaaaacttgattttctaaaattattgggatttgtatttttgtttattaagggggaaaatgtgatttgtgcctgatctttcatctgtgattcttataagagctttgtcttcagaaaaactaaaaataaaaggcattgacttaaaaaaaaaaaaa

SEQ ID NO: 133942 - DNA, 404 bp, Homo sapiens; identical to SEQ ID NO: 114867
  misc_feature (1)...(404): n = a,t,c or g

SEQ ID NO: 133943 - DNA, 2206 bp, Homo sapiens; identical to SEQ ID NO: 129196

SEQ ID NO: 133944 - DNA, 684 bp, Homo sapiens
atgcccgaaccgcagcggccaggcgttcctccagaacctcctcccccaggagcttgctacgcgtgccggaaatctggccactgggccaaggaatgcccgcagcccgggattcctcctaagccgcgtcccatctccccctggaccatcacggacgccgagcttcgggtaactctcacagtggaagcccacctgcacccaggtgaaataaacagccatgttgctcacacaaagcctgtttggtggtctcttcacagggacgcgcatgaaaactacaaacacctctgtgcaaacaagctagaaaaccttgaagaaatggacaaattcatggaaatattcagcatcccaagattgaaccagataaaaatgatgttaggtacagagagctccctgaaacagatgctgacctcaagagaatttgcaagacaacagttgaggctgaaagcttttgctcccattcaggaaatgatgacttttgtgcagtttgctaataatgaatgtgattatgggatggggcttgagttgggaatggacctcttttgctatggctcacattattttcataaagttgctgtccagcttttacctcttgcatataatctgttgaagaggaatctgtttgcagaaattattgaggatcatctggcaaacagaagtaaagagaacatagaccaacttgctgcatga

SEQ ID NO: 133945 - DNA, 1665 bp, Homo sapiens; identical to SEQ ID NO: 133891

SEQ ID NO: 133946 - DNA, 915 bp, Homo sapiens
atggagctagaagccacgaatatagttgttagggctgttctcctgtttccaaggaccacaggccagccccttagcacaaggaggagagctcctatagaaggcattcttccaagctcatctgttctccttcagttggataaggatgtaggcagagggttggacccagctgggccatttttccacaacactccaaaggaagtcaggctagacccctcggatgccaactttgttgacgttattcatacaaatgcagctcgcatcctctttgagcttggtgttggaaccattgatgcttgtggtcatcttgacttttacccaaatggagggaagcacatgccaggatgtgaagacttaattacacctttactgaaatttaacttcaatgcttacaaaaaagaccacagctcttgggctgtcccagccccactgcagcttcctgatgcgtggggtgggatggctacagtgtttcagcagctcctttggcacctgctgtttggtgggtctcaggttcttgtcccacgtccaggaagaaagaggttacacagacaactgaagagtgagcatggtggagaagagttttatcgagtgaccaaacagctcttggatgagaggggaacccaaaaaagatccacctacgacctcaggtcctcagacccaccagcccaagaaacatctcaccaatttcaaatccgggacgcctctctgattattcacccaggtttcagaggtgtcagaccacgcagggacgcctgccttggtccttcacccttagcggcaagtcccgcttttctggggaaggggcaacctggggtcttaagacctaattggcgcgtccttccaccccagatgaagacgaatgggaatctgtattttaacaggatctccataggactttgtgagcacattgaagtttga

SEQ ID NO: 133947 - DNA, 2664 bp, Homo sapiens; identical to SEQ ID NO: 117147

SEQ ID NO: 133948 - DNA, 344 bp, Homo sapiens; identical to SEQ ID NO: 114497

SEQ ID NO: 133949 - DNA, 513 bp, Homo sapiens; identical to SEQ ID NO: 117148

SEQ ID NO: 133950 - DNA, 408 bp, Homo sapiens; identical to SEQ ID NO: 114500
  misc_feature (1)...(408): n = a,t,c or g

SEQ ID NO: 133951 - DNA, 441 bp, Homo sapiens
  misc_feature (1)...(441): n = a,t,c or g
tgcggtaccgctccggaattcccggnnnnnnannnnnnnnnnnnnnnnnnnnnnnnnnnnnnnnnnnnnnnnnnnnnnnnnnnnnnnnnnnnnnnnnnnnnnnnnnnnnnnnnnnnnnnnnnnnnnnntttggtgtcgtgactcagattgggggacctcccttgggagatcaatcccctgtcctcctgctctttgctctgtgagaaagatccacctacgacctcaggaccgaccaagaaacatctcaccaatttcaaatccagtaagcggcctctttttactctcttctccaacttgcctcactatccctcaacctctttctcctttcaatcttggcgctacacttcaatctctcccttctcttaatttcaattcctttcattttctggtagagacaaaagagacacgttttatccgtggacccaaaactccggcgccggt

SEQ ID NO: 133952 - DNA, 667 bp, Homo sapiens; identical to SEQ ID NO: 117149
  misc_feature (1)...(667): n = a,t,c or g

SEQ ID NO: 133953 - DNA, 419 bp, Homo sapiens; identical to SEQ ID NO: 132710
  misc_feature (1)...(419): n = a,t,c or g

SEQ ID NO: 133954 - DNA, 756 bp, Homo sapiens; identical to SEQ ID NO: 117157

SEQ ID NO: 133955 - DNA, 1080 bp, Homo sapiens; identical to SEQ ID NO: 119350

SEQ ID NO: 133956 - DNA, 915 bp, Homo sapiens
atgactgacaacattctggaattagctcaaaacatggataaatacacaaagtatgaaatgactactacttcaatcttaagtcaaccctcatcctcacagagggagcaagatggccaaggtttccaggaattgacggtcacttctgaaatgttcaggaaaggaaaaggaagtttctgctcccatcctcaccctgagaagttcctcagaacatttaatgaaatagaaacttacctcataggcaattttcaggacttagaattagaaagtagtgatgacctgccaagaggctgcacaaatgaaaaggccaggaagacctatgacccaaagaagcttccactcccatacacagcaggccttgctggatactggctagtaaattacacatatgagaatcatatgggtgaaggcagtgagcatagtgatgccatcagtagacaccatggccacggcctgtttggtggtctcttcacacggaggcgcatgaaatttggtgccgtgactcggatcaggggacttcccttgggagatcaatcccctgtcctcctgttctttgctcgtgagaaagatccacgtacgacctcaggtcctcagaccgaccagcccagtaaacatctcaccaatttaaaatccgcctccactcctccaccctataatccttttatcacctcccctcctcacacccggtccggcttacagtttcgttccacctctagccctccggcacctgctcagcaatttactcttaaaaaggtggctgaagctaaaggcatagtcaaggttaatgctcctttttccttatcagacctctcccaaatcagtgtgcgtttaggctctttcatcaaatatgaaaaatccagcccagttcatggctcgtttggcagcaaccctgagacactttacagccctagaccctga

SEQ ID NO: 133957 - DNA, 864 bp, Homo sapiens; identical to SEQ ID NO: 115468

SEQ ID NO: 133958 - DNA, 845 bp, Homo sapiens
tttcgtttttaagaggtttagaagcctggccgtcaatacctacaacagttatggaggcaagggaaacaggcccttgaaaagaaggtaatgtggagtgggtagcctccgtattgattaagaaggggacggacttaccctccaccgtgagagttacctaaagctcggcatccgtgatggtctacggggcttctgaggcgatcaggcagcatcagtcttcagccggtaagtcaagaaggagtcagtcagagaaccttgagccagagttccaggggctctgggagtggctgccaggtgagttgaacagtccgattttcagtggggtcccacacagatgggatgcggcttaggaggaatcctggcctgcgggcattccttggcccagtggccagatttccggcacgtgtagcaagctcctgtgggaggaggttctggaggaatgcctggccactgcggttcaggtgtttggaagttcttgtgtgccggagatgtggttgccccttccccagaaaagcgggacttgccgctaagggtgaaggaccaaggcaggcgtccctgcgtggtctgacacccttgaaacgtgggtgaatgatcagagaggcgtccctgcagtgagtaagcgtccctgtgtggtctgacacgtatgaatctggcaacataacaggaagcagcatagatgcccagagccaaaaataaagccccagttccatgtctggaagtcccaagacaatctgagacttgggatctgagctcagcagaatccggggagcctgagggccttcgatgtgcttcaagccagagaaaccttggagaccactgggaccaatttctgggcctgctgtggccat

SEQ ID NO: 133959 - DNA, 759 bp, Homo sapiens
atgcaggcaatggagaaatggaaaagagaggccaaagtggagacagaaaaagaccaaaagaatcaatatcagcagacctggctttccgacagcgcttctggatacaggtataccaaacttcctttttacttccgacacaacaacctcattcctgcactagcacatttgctcttcctggattccctttattcagatctgctcacggctgctttcttcatgcaattctggctctcagctcaaatgtcgtctgatcagagagggcttccaggatatttactttgggctgaagaaatatcgctgctagaaatttctgaactcaccagtggaaagcaggattcttcatggccagaggtaaaagcaggactaaagaaagaagcaaattacttgtcatcagactcagcccgcctgcacccaggtgaaataaatagcctcgttgctcacacaaagcctgtttggtggtctcttcacatggacacacatgaaatttggtgccgtgactcgaactggggggacctcccttgggagatcaatcccctgtcctcctgctctttgctccatgagaaagatccacctacgacctcaggtcctcagactgaccagcccaagaaacatcttaccaatttcaaatccgcccagctcaaagcatcaggaaaaacctccagaagccatatcaacacttccaaacgctgcagcaactgctgccgctgcagtgggctccctgctatggtccctctagtgtgtccatctgaaattcagtga

SEQ ID NO: 133960 - DNA, 1852 bp, Homo sapiens
atgacgattaaggcatgtgctgaaagcactgatggaggacctgcacgaaggcaccttacacatgagttccgcttccgctctcttcccacaataaaaaaaaccaatgcttctgagtacctgggttgcccagcgctttatgtgaagacgacaaccagacaagccagacgacaagccagacgactcgggcaaagacccaaaccagacttccccaaattcctaagcctcctgggcacagagatcattgagatgcagtcgagttcatcctccgctccatgtccaggagcacgatttatggaatttgatgatatgaaggaaaacattcatcaaagtgacatcctcagatacctgtccctggacattagagaaagtgaaatatccaaaactggtgaagttacaaattccttcagaaattcaaaaacatcaaaagccaaagttgccattgtagggttcagccacagacctcaggacaacttcatttgtgagcagaagtcctggagttctttgggcatcgagtgggcccgacatgcaaggaagaggcctgtttggtggtctcttcacacggacgcgcatgaaatttggtgctgtgactcggatcgggggacctcccttaggagaccaatcccctgtcctcctgctctttgctccgtgacaaagatccacctacgacctcaagtcctcagacccaccagcccaagaaacatctcaccaatttcaaatccggctgctcctcaccaggccgagctaggtcccaatccttcctcagcctctgctcctccaccctataatctttttatcacctcccctcctcacacctggtctggcttaccgtttcgttccgtgactagccctccccctcctgcccagcaatttactcttaaaaaggtggctggagctaaaggcacagtcaagaccatcacggacatcgagcttcaggtaactctcacagtggaagcccgcctgcgcccaggtgaaataaacagccatgttgctcacacaaagcctgtttggtggtctcttcacacggacgcgcatgaaatttggtgccgtcactcggatcgggggacctcccttgggaaatcaatccccgtcctcctgttctttgctccatgagaaagatccacctacgacctcaggtcctcagacagaccagcccaagaaacatctcaccaatttcaaatccgcggcacgtcccactttcctggggcaggggcaagtacccctcaaccccttctccttcacccttagcggcaagtcccgctttcctggggcagcggcaagtcccgctttcctggggcaggggcaggtgcccctcaaccccttctccttcaccctcagcggcaagtcccgctttcctggggcaggggcagcggcaagtcccgctttcctggggcaggggcaggtgcccctcgaccccttctccttcaccctcagcggcaagtcccgctttcctggggcaggggcagcggcaagtcccgctttcctggggcaggggcaggtgcccctcgaccccttctccttcaccctcagcggcaagtcccgctttcctggggcaggggcagcggcaagtcccgctttcctggggcaggggcaggtacccctcaaccccttctccttcaccctcagcggcaagtcccgctttcctggggcaggggcagcggcaagtcccgctttcctggggcaggggcaggtgcccctcaaccccttctccttcaccctcagcggcaagtcccgctttcctggggcagcggcaagtcccgctttcctggggcaggtacccctcgaccccttctccttcaccctcagcggcaagtcccactttcctggggcaggacttgccgctttcctggggtag

SEQ ID NO: 133961 - DNA, 2268 bp, Homo sapiens
cagaaggtgccaggagaagagctcctttgcaatgcacctgggcacatgcaatcagacatccacaaagagtgcgatgtctatgcagaatgcaccaattccaacttccaggtccctggagatgcttcggacatgggaagggaagtgattggatctctgtctcccataccctgttggtgggtatacagtgtgcctatatttaattcagcacctactatgccctggcgctgtggcattcataggcaaggaggactggacctggaaggggcctttgggtctcagaggacaggatgtggaccgggcctctactattccaagcgacaaggccacccggatttcattcttcctgggagacgggagcgctcatttctgctcctggtggtcactcacctccacgtgacctttggcatccaggctttctgggtctctggctccttgatgatgccatgcagaggtcctgaggttgagatgtccctgcttgtggctgtggctcctgggcacacgtatggcatatttcagatagaaaaacttatgaatatggaagggacatggatggtgctggaaggcgttatcctcagcagactaacgcaggaacagaaaacccaaacatcgcctgttgtcactgataagtgggagctgaacgacgagaacacgtggacacatgatgggaaacaacacacaccgcggcctgtttcaggagtatggtttttcaaggtgtccagtgcgcacacagaaagcccagctgcggaggccggccgccagaccccaaagggacgaaccgtcatgggacgccggttctcttccaaagcttcgctgcgggaagccagccttctcgctggggccctcgaggctgacagattcctctccaagcctcactcaggccctcgagggaaggagcgcctgtctctgtgcacgctgttggtgctgagtgatgctcgggtcctgcaggagaggagcctctggacatcgcttagtgccagaagaggcttcgtggttcctgctggtctagaggaaaggtttaggaataaagacacaggctcggacagccctggacaccccagggttaggagccttaaggaaaaatgggaggagaaatggcttttcaaaatggaaagtgttatgcagacagagctggacacagagctgctatttgctaagatccggggtttggaggccgccattcagcaattaaacgccctagcccattcttcactggctcatccttcattggctgaattagtcagaaaatatgcatctcagggggctctgatacgcatcactgctcacgcatgtgtacacgagcacacctggccacgagtccacgccaaacacacgcttgccagggatgctggcagggttctgtggggacagccccaggaggcgatggaccagtggacagccaaggccagcaccaacatcccccagttaccaaagcctggaatcaatgtgcctgactgtgccttgccccagggctggtggatcatcaggtcccagccacagctgtccctgaacatctctcggccactgactgaagggagctgggactcagcccacctgctcccaggtgaaataaacagctttattgctcacacaaagcctgtttggtggtctcttcacacggacgcgcatgaaatttggtgccgtgactcggatcgggggacctcccttgggagatcaatccctcgtcctcctgctctttgctccgtgagaaagatccacctacgacatcgggtcctcagaccgaccagcccaagaaacatctcaccaatttcaaatccgcgtgaaaacggactaatacagcttcttacaaatgcactcacagagcagagtgcctgccccccgagacggcctggtagcggctcctacggagtccgaggtggcctttctgcctgtgcctccccaccagggccctccgctggggaaccttggtccgtccactgtgaccacgagctttcggtgctggttgctggacccgcggtcatgaccctgaagggaagagtcctcactacccaaggcgtggtcctcagacatcacccgggagctggttataaatggagagtctcaggccccgccctggaggccctggttcagaacctgcgtttcagcaagagctggagtgattcaggcaggcacccccttctgcaggtctcagctccggtgaagaagaaggccagctgcccagcagacagggacaaggagtgtgcccacatctctggggcagactctgctgttgtgcagggcgaggggcacctgcgagacatccagtcctag

SEQ ID NO: 133962 - DNA, 2589 bp, Homo sapiens
atgtctgcaaaattgggaaagtcatcatcactcctaacacaaacttcagaggagtgtaatgggattctgacagagaagatggaagaggaagagcagacctgtgatccagactctagcctccactggagcagcagctacagcccagagaccttccgccagcaattcaggcagtttggctaccaggattcacctgggccccatgaggctctgagccggctctgggaactttgtcatctctggctgaggccggaagtgcacaccaaggagcagatcctggagctgctggtgctggagcagttcctggccatcctcccaaaagagcttcaggcctgggtgcagaagcatcatccagagaatggagaggaaactgtgactatgctggaggatgtggagagagagcttgatggaccaaagcagatcttttttggacgaaggaaggacatgattgcagagaagctagcaccttcagaaatcactgaggaattgccaagtagccagctcatgcccgtgaagaagcagctccagggagcatcatgggagcttcagtccttaagaccacatgatgaagacatcaaaactacaaatgtgaaatctgcttcaaggcaaaagacttctttaggcatagaactgcattgcaatgtttccaatatccttcatatgaatggctcccagagttccacatatagaggaacctatgaacaagatggtaggtttgaaaagagacaaggaaacccttcttggaaaaaacaacagaaatgtgatgaatgtggcaaaatctttagtcagagctcagcccttattttacatcagagaatccacagtggaaagaaaccttatgcatgtgacgagtgtgcaaaggcattcagccgaagcgcaattctgattcagcatcgacgaacccatactgactcagcccgcctgcacccaggtgaaataaacagtcttgttgctcacacaaagcctgtttggtggtctcttcacatggacgcgcatgaaatttggtgccgtgactcggattgggggacctcccttgggagatcaatcccctgtcctcctgctctttgctccatgagaaagatccacctacgacctcgggtcctcagaccgaccagcccaaggaacatctcaccaatttcaaatccgatgaagactgaccctacccaatcgccttggaagcctacaggaccatcacagacactctgggtaactatcacagtggaggttcaaaacctccttcacatcctccccttgtatctccccaccttaacccacaagtatgatacctctactccctccttggtgaccgatcatgcaccccttaccatcccattaaaacctaatcaaccttaccccgatgaatgccaatatcccatcccacagcacactttaaaaggattaaagcctgttatcactcacctgttacagcatggccttttaaagcctagaaactctccttacaattcccccattttacctgtcctagaaccaaacaagccttactggttagttcaggatctgcgccttatcaaccaaattgttttgcctatccaccccatgctccttcagctgtactcactctttgttgagtctcccacagttaccatttttcctggcccggacttcagtccggcctcccacattattcctgatgctacacctgacccccataactgtatctctctgatccaactgacattcaccccatttccccatatttccttctttcctgttcctcaccctgatcacacttggtttattgatggcagttccaccaggcctaatcgctacacaccaacaaaggcaggctatgctataatatcttccacatctatcgttgaggctaccactctgcctccctccactacctctcagcaagccaaactagttgccttaactcaagccctcactcttgcaaaaggactacgcgtcaatatcttactgattctaaatatgcctttcatattcggcaccaccatgcagtcatatgggctgaaagagggattgttcaggtctcctccctttcctacacatcaagctaggggatttgcccctgcccaggactggcaaattgactttactcacatgcctcgagtcagaaaactaaaatatctcttagtctgggtagacgctttcactggatgggtagaggccttccccacagggtctgagaaggccactgcggtcatttcttcccttctgtcagacataatccctcggtttggccttcccgcctctacacagtctgataacggaccggcctttactagccaaatcacccaagcagtttctcaggctcttggtattcagtggaaccttcatatcatttaccgtcctcaatcttcaggaaaggtagaacggactaatggtcttttaaagacacacctcaccaagctcagcctccaacttaaaaaggattggacagtacttttaactcttgctcttctcagaatcagagcctgtcctcgagatgctacagggtacagtccatttgaactcttatatggacacactttcttgcttggccccaacctcatcccagacaccagccctctaggcaactatcttccagtcctccaacaggctagatag

SEQ ID NO: 133963 - DNA, 3024 bp, Homo sapiens; identical to SEQ ID NO: 132721

SEQ ID NO: 133964 - DNA, 1823 bp, Homo sapiens
atgaataatgatccttacattcctgcatctgcttttggggctcgccctgttaaaaccacagaagctcccccactgagcaccttgagacccctgcccctgcccaccaaagaacaaccccctttgactgtaattttccattaccttcccaaatcctataaaacggccccacccctatctccctttgctgactctcttttcggactcagcccgcctgcacccaggtgaaataaacagccgtgttcctcacacaaagcctgtttggtggtctcttcacacggacgcgtatgaaatttggtaccatgactcggattggggggacctcccttgggagatcaatcccctgtcctcctgctctttgctccatgagaaagatccacctacgacctcaggtcctcagaccaaccagcccaagaaacatctcaccaatttcaaatccgcatgctttgaaaggattaaagcctgttatcactcgcctgctacagcatggccttttaaagcctataaactctccttacaattcccccattttacctgtcctaaaaccagacaagccttacaagttagttcaggatctatgccttatcaaccaaattgttttgcctatccaccccatgatgttactaggggagatatcagtcaccaaggccttggctggctccctgataaaagcccttgcagtattccacactgcagaatccccaggctatgctctcctggattcttactacctgctccagaaagggagtgtttgcatctccatcctccaagaagaggaagcattttcttggccggggaaaggagagtgtcgagataagtcctgggcctctctgggcctaatacccgcatttccccagggaggacagtggaaacaggccctggggcttctggaccacagctgcctctgctttggggaattaggcaccaggttggcagccccagcatccttcagcaccttcccaataacaaaccgagagcgggagagaaaaactgacaagctgattccaaaattcatgtggaaatgcaagggacccagaataaccaaaacaatcttggaaaagaatgaagttggagaatttacacttcttgatttcaaaacttaccacaaatttgcagtaatcaaaactatgtggtactggcataaggacagatacattgatcaacagaatgacattgaaagtccagaaataaattcatatgtttatggtcaactgatttttgacaaagactcagcccgcctgcacccaggtgaaataaacagtcttgttgctcacacaaagcctgtttggtggtctcttcatatggacgcgcatgaaatttggtgccgtgactcggattgggggacctcccttgggagatcaatcccctgtcctcctgctctttgctccatgagaaagatccacctacgacctcgggtcctcagaccgaccagcccaaggaacatctcaccaatttcaaatccgtttttacctgaaaactatatcaaattgagtcatcctgtcccgttagactcctacgtgctctgccagtttctcaggttgtccttgtttttaatgaccttaacagttttaagaagcactagtcagggcaaaacgacagctgtgcttcaccattctggggtacttgctgtcaatgcacctgccctcacagtctgggacactgccaagccccaccatcccaaggactctgtgcagtatgcaggccaggaatccctcaggctgtgggtttccacatgtgcttctgcatggaaagctcccctggctgctgcaggatgtcctttgcagagccccatcctgtcctccttatcgcagctgcaggcagcctga

SEQ ID NO: 133965 - DNA, 1374 bp, Homo sapiens
catggactctatgatgcgccagcaacacgttttgctttatccaacacatgtcctgttaagtcacggactagtgtggtctatgggctggcagaggtgaaaagatctcccttttcatgtagcttgcccacctacttacagcgttgcatcacagggtcaagtgtttctcctccacttcacgcagctcgggagccctcttgtctggaaaggctcttccctgctggtgcctccaggctgggctggttgttgctcctctatgctcccgaggtcctcagtgcctgcctttatcagaacagaggccacagcgcaccttggttaaatgtacagtctctgggaccagactgcctggactcacaactctggctccgccatttacagcccacctgcacccaggtgaaacaaccagccatgttgctcacacaaagcctgtttggtggtctcttcacacagacgcgcatgaaatttggtgccaagacccgggacttggatcaggggacttcccttgggagatcactcccctgtcctcctactctttgctccatgagaaagatccacctacgacctcaggtcctcagaccgaccagcccaagaaacatctcaccaatttcaaatccgggagagacaaaggagacacgttttatccgtggacccaaaactccggcgccggtcacggactgggaaggcagccttcccttggtgtttaatcattgcagggacgcctctctgattatacacccacgtttcaagggtgtcagaccacgcagggatgcctgccttggtccttcacccttagcggcaagtcccacttttctggggaaggggcaagatttaattaacctcgccttcaaggtgtacaataatagaaaaaagttgcaattccttgcctccactgtgagacaaaccgcagccacatctccagcacacaagaacttccaaatgcctgaaccgcagcggccaggcgttcctccagaacctcctcccacaggagcttgctacatgtgccggaaatctggccactgggccaaggaatgcccgcagcccgggattcctcctaagccgcgtcccatctgtgtaggaccccaccgaaaatcggactgttcaacttacctggcagccactcccagagcccctggaaatctggcccaaggctctctgactgactccttcccagatcttctcggcttagcagcttgaagactgacactgcccgatcgcctcggaagccccctgggtatattgcatgatgttgaggtttggggtatgattgattctgtcacccagatactgagtatagtacacaatagttaatttttcaattgtctcttctccctctctccctccatagtagtccccagtgtcttttgttgccatcagcag

SEQ ID NO: 133966 - DNA, 3142 bp, Homo sapiens
atggacccgctgagcatgagcattcatcaggtggtgctcaggcctgatgaacagggcccaggccaggaacaacagcctcccctttatgtgatggagcctggtgaaataaacagctttattgctcacacaaagcctgtttggtggtctcttcacacggacgcgcatgaaatttggtgccatgactcggatcgggggacctcccttgggagatcaatcccctgtcctcctgctctttgctctgtgagaaacatccgcctacgacctcaggtcctcagaccgaccagcccaagaaacatctcaccaatttcaaatccgagacaaaagagacatgttttatccatgaacccaaaactctggcgccggtcatggacttgggtaggcagccttcccttggtgtttaatcattgcagggacggcctctctgatcattcagccacatttcaagggtgtcagaccatgcagggatgcctgccttggtccttcacccttagcgaccatcacagatgccgagctttatgtaactctcacagtggaggggaagtccatccccttcttaatcgatacagaggctacccactccacgttaccatcttttaaagggcctgttgcccttgcctccatacatgtgcagaatgtgcagatcaaaagagacaaagaaggccattacataatggtaaagggatcaattcaacaagaagagctaactatcctaaatatgtatgcacccaatacaggagcacccagattcataaagcaagtccttaatgacctgcaaagagacttagactcccacacaataataatgggagactttaacaccccactgtcaacattagacagatcaacgagacagaaagttaacaaggatatccaggacttgaactcagctctgcaccaagcagatctaatagacatctacagaactctccacaccaaatcaacagaatgtacatttttttcagcaccacaccgcacctattccaaaattgaccacatagttggaagtaaagcactcctcagcaaatgtaaaagaacagaaattataataaattgtctctcagaccacagtgcaatcaaactagaactcaggattaagaaactcactcaaaaccactcaactacatggaaactgaacaacctgctcctgaatgactactgggtacataaagaaatgaaggcagaaataaagatgttctttgaaatcaacgagaacaaaaacacaacataccagaatctctgggacacattcaaagcagtgtgtagagggaaatttatagcactaaatgcctacaagagaaagcaagaaagatccaaaattgataccctaacatcacaattagaagaactagaaaagcaagagcaaacacgttcaaaagctagcagaagggaagaaataactaaaatcagagcagaactgaaggaaatagagacacaaaaaacccttcaaaaaattaatgaatccaggagctggttttttgagaagatcaacaaaattgatatactgctagcaagactaataaagaagaaaagagagaagaatcaaatagacgcaataaaaaatgataaaggggatatcgccaccgatcccacagaaatacaaactaccatcagagaatactacaaacacctctgcccaaataaactagaaaatctagaagaaatggataaattcctcgacacatacaccctcccaagactaaaccaggaagaagatgaatctctgaatagaccaataacaggctctgaaattgtggcaataatcaatagcttaccaaccaaaaaaagtccaggaccagatggattcacagcaaaattctaccagaggtacaaggaggagctggtaccattccttcagaagtacaaggaggagctggtaccattccttctgaaactattccaatcaatagaaaaagagggaatcctccctaactcattttctgaggccagcatcatcctgataccaaagcctggcagagacacaaccaaaaaagagaattttagaccaatatccttgatgaacattgatgcaaaaatcctgaataaaatattggcaaaccaaatccagcagcacatcaaaaagcttatccaccatgatcaagtgggcttcatccctgggatgcaaggctggttcaacatacgcaaatcaataaatgtaatccagcatataaacagaaccaaagacaaaaaccacatgattatctcaatagatgcagaaaaggcctttgacaaaattcaacatcgcttcattttaaaaactctcaataaactagatattgatggaatgtatctcaaaataagagctatttatgacaaactcacagccaatatcatactgaatgggcaaaaactggaagcattccctttgaaaaccggctcccgaccacaccgacaggggtgttcgggctatagcggtcaggtttcagcatgcgatccgccaccgggcccaggcggagttcctgtcactctttctcaatctggctgccaccactggcaaggaggtcatgaatgtgagggccgtggcgacagacgcctcaagcaagggcgtcaaggcggcctattttcccggaaacaatccggcgcgttcatcgacagcatcgttgcccgaaaggggaacgccgacgagaatttcagcaacatccgtatcgcaggcgatggtggatcggctgcgatgtcgttcgactatgcgttcaagatcgacgacgtggtcccgaactctggcatggaacattggcttcttgtaaacacgaacaatggatggcggatcgtatcggtggcttggtcggctgctcctctccaggccgatctaggtcccaattcttcctcagcctctgctcctccaccctataatccttttatcacctctcctcctcacacctggtccggcttacagtttcgttccgtgactagccctcccccacctgcccagcaatttactcttaaaaaggtggctggagccaaaggcatagtcaaggagcttgctacacttgccggaaatctggccactgggccaaggaatgcccgcagcccgggattcctcctaagccacgtcccatctgtgtgggaccccactgaaaatcggactgttcaactcacctggcagccaatcccagagcccctggaactctggcccaaggctctctga

SEQ ID NO: 133967 - DNA, 941 bp, Homo sapiens
atggtcaaccccaaattctttgccagtgaaaagattactcaagaacacaatgataaagactttttcagacatacaaagttaaaagaagttactaacagcagatctacactacacttgacgccagcacatcttagagtctcactcaaggcccatactgtgtactacctggctaccactgttgattattcaggacccaaggactcttcagtcagcagccatgttgctcacacaaagcctgtttggtggtatcttcacacggacgcgcatgaaatttggtgccgtgacttggatcgggggacctcccttgggagatcaatcccctgtcctcctgttctttgctccgtgagaaagatccacctacgacctcaggtcctcagacccaccagcccaaggaacatctcaccaattttaaatcatgtaagcaagcctctttttactctcttctccaacctccctcactatccctcaaccactttctcctttcaatctttgcaccacccttcaatctctcccttctcttaatttcaattcctttcattttctggtagagacaaaggagacatgttttatccgtgtacccaaaactccggcgccagtcacggactgggaaggcagccttcccttggtgtttaatcattgcagagatgcctgattattcacccacgtttcaaaggtgtcagaccacgcagggacgcctgccttggtccttcacccttagcagcaagtcccgcttttctggggaaggggcaagagcttgctacaagtgccagaaatctgaccaccaggccaaggaatgcccgcaacccgggattcctcctaagccatgtcccatctgtgcgggaccacactggaaatcggactgttcaactcacctggcagccactcccagagcccctggaactctggcccaaggctctctgactgactccttcttggcttag

SEQ ID NO: 133968 - DNA, 1986 bp, Homo sapiens
atgtggccacaagccaagggacacaggcagccgccagcgctgagagaggcaagaacagattctcctttagagcccttgaagggagggtgccctactgagtttcagacttctagcccccagaactatagcaagaagttcttctccttgctgagtgtcacttcctacagttccttcgccttccacaagttttctgtagctgtttacaacatttctaacctgaagacagtggaccccgccaaattccccacaaggtattgctactgtttaaacaatcggaccaatgacttatcagattttacagctctactggtagatatcattggcaattctaccagctacctcacagagatttttaagtcaacctccatcctctcagataatcagtgtggtccagtttccacaccagtaaatgcaccaatatttaagtcttcatatttctgggatccacaaagttggaggaagaatccaaagctcaaaagtttaaggaacgtaggcagactcaagaaaacatctggaaggaatctttctgacttctgggagatagaagaaaaatatcccattatcaattacacatttaccagcggcttgtctggtgttttggctttattgctcacacaaagcctgtttggtggtctcttcacacggacgcgcatgaaatttggtgccgtcactcggatcgggggacctcccttgggaaatcaatccccgtcctcctgttctttgctccatgagaaagatccacctacgacctcaggtcctcagacagaccagcccaagaaacatctcaccaatttcaaatccgaggcaaaggagatatgttttatccgtgaacccaaaactccagcgccggtcacggactgggaaggcagccttcccttggtgtttaatcattgcagggatgcctctctgattatacactcacgtttcaagggtgtcagaccacgcagggatgcctgccttggtccttcacccttagcggcaagtcccatttttctggggaaggggcaacggctgaagactgacactgcccgattgcctcggaagccccctagaccatcacggatgccaagcttcggtgtcaagcatgttaatgttaccattgactgcctccctgaaggtgcagctaccaggggaactgccaggacttcaaagcccacaaccaaaagccagaaaacactaccaagtacaagccccggacactggacccagagcacaccctgggcatctgctctgagatcctctccctggacagagacagctgctccttcagaaacagaggagaccctgaacacaggcaggcctcctgagcttccagccagggccacagccacatggttcagtgcctcccacactctcccagccttggctaccaggagggtggccagaactcagtggttgacagctgacagacagacgtgggcttccatatcgtccgtgccctgggctcaaaccatcagtgagaaaaaacctggagggtctctctgggaaactcgttcttccccaccgactactgcagggaccgaggaagccatgaacactaccagccttttggcgcctgctgctgagataatggccacacctggcagcccatcccaggccagccctacctcgggagcattcacccatggcacacagactccgagtccaaccaaggcaacagcccccagatatccacaaacaggtaattccattctgacttttggaaggccattcctgccctttgcaggtgatctctttgcagagtggccattcactgctggtgaagagccagtcctggtcccaagaccccatcaagtttcaaaaactcgatcaccaccttctttccacctgactcttaaaactgttacagtagctttattgggtaatggtgaggaatgctatgtttacctgtctgtctcagagctacgtgagatcaggacaagattatattcacctgatgcagggcttaacgaagagaagatgcttactaaactcttactgatttaa

SEQ ID NO: 133969 - DNA, 432 bp, Homo sapiens
agagctaagactaaaagagtggatcatgacccatgaagagcaccatgcagccaaaaccctggggattggcaaagccattgctgtcttaacctctggtggagatgcccaaggtatgaatgctgctgtcagggctgtggttcgagttggtatcttcaccggagcccgtgtcttctttgtccatgagggttactgtcttggggcatgtgcagaggggtggaacgccatcatcctttgacagaattctgggcagcaggatgggtgtggaagcagtgatggcacttttggaggggaccccagataccccagcctgtgtagagagcctctctggtaaccaggctgtgcgcctgcccctcatggaatgtgtccaggtgaccaaagatgtgaccaaggccatggatgagaagaaatttgacgaagccctgtatctgacag

SEQ ID NO: 133970 - DNA, 289 bp, Homo sapiens
  misc_feature (1)...(289): n = a,t,c or g
cccatttntggtcattcctgctacagtntccaacaatgtccctggctcagacttcagcgttggggctgacacagcactcaatactatctgcacagcaaatgttgaacatctggtgcaaaagatgaaaacaactgtgaaaaggggcttggtgttaaggaatgaaaagtgcaatgagaactataccactgacttcattttcaacctgtactctgaggaggggaagggcatcttcgacagcaggaagaatgtncttggtcacatgcagcagggtgggagcccaaccccattt

SEQ ID NO: 133971 - DNA, 516 bp, Homo sapiens
tctcgtctcaacatcatcattgtggctgagggtgcaattgacaagaatggaaaaccaatcacctcagaagacatcaagaatctsgtggttaagcgtctgggatatgacacccgggttactgtcttggggcatgtgcagakgggtgggacgccatcagcctttgacagaattctgaccaaagatgtgaccaaggccatggatgagaagaaatttkacgaagccctgaagctgagaggccggagcttcatgaacaactgggaggtgtacaagcttctagctcatgtcagacccccggtatctaagagtggttcgcacacagtggctgtgatgaacgtbggggctccggctgcaggcatgaatgctgctgttcgctccactgtgaggattggccttatccagggcaaccgagtgctcgtygtccatgatggtttcgagggcctcgccaaggggcagatagaggaagctggctggagctatgttgggggctggactggccaaggtggctctaaacttggg

SEQ ID NO: 133972 - DNA, 3305 bp, Homo sapiens
  misc_feature (1)...(3305): n = a,t,c or g
tttcgtcgggccggctgaccgggtccgacacagacttttggttcaggctccctccatcctcacccctcccccaggttcccgccgccactcaccgaaccggaaccggctgccatgcgaaggggtttccggccgggcgcggaacgcaaaacccgggaaccgccgcgaaccggaaccgccttcacagcaccggaagaggcgctaggaggcagccatgcataaagacgagtttcatctgaaatttttcatgggtgtgaatcagtctcgccagttagtcaggactcctcagagaacagctggggaagcttctacttccagcatgctcataccaaagccaccaccaaagacagacatcttgaagagtctagatactatggatgatccagacaccgtgggaagcatacctgttttcaaaactgagtggatcatgacccatgaagagcaccatgcagccaaaaccctggggattggcaaagccattgctgtcttaacctctggtggagatgcccaaggtatgaatgctgctgtcagggctgtggttcgagttggtatcttcaccggtgcccgtgtcttctttgtccatgagggttatcaaggcctggtggatggtggagatcacatcaaggaagccacctgggagagcgtttcgatgatgtttcagcttgggaggcacggtgattggaagtgccccggtgcaaggactttttggaacccagaatgacgacattcgaactggctaacaccttggtgaagcgtgggactcaccaactctctgtgtcattgggggtgatggcagcctcactggggctgacaccttccgttctgagtggagtgacttgttgagtgacctccagaaagcaggtaagatcacagatgaggaggctacgaagtccagctacctgaacattgtgggcctggttgggtcaattgacaatgacttctgtggcaccgatatgaccattggcactgactctgccctgcatcggatcatggaaattgtagatgccatcactaccactgcccagagccaccaggaggacattttgtgttaagaagtaatgggccgccacttgtggatacctggcccttgtcacctctctggtcctgtgggggccgactgggtttttattcctgaatgtccaccagatgacgactgggaggaacacctttgtcgccgactcagcgagacaaggacccgtggttctcgtctcaacatcatcattgtggctgagggtgcaattgacaagaatggaaaaccaatcacctcagaagacatcaagaatctggtggttaagcgtctgggatatgacacccgggttactgtcttggggcatgtgcagaggggtgggacgccatcagcctttgacagaattctgggcagcaggatgggtgtgggaagcagtgatggcactttttggaggggaccccagataccccagcctgtgtagtgagcctctctgggtaaccaggctgtgcgcctgcccctcatggaatgtgtccaggtgaccaaagatgtgaccaaggccatggatgagaagaaatttgacgaagccctgaagctgagaggccggagctctcatgaacaactaggagggtgtacaagcttctagctccatgtcagacccccggtatctaagagtggttcgcacacagtggcttgtgatgaacgtgggggctccggctgcaggcatgaatgctgctgttcgctccacttgtgaggattggccttaatccagggcaaccgagtgctcgttgtccatgatggtttcgagggcctggccaaggggcagatagaggaagctgggctggagctatgttgggggctggactgggccaaggtggctctaaacttgggactaaaaggactctacccaagaagagcttttgaacagatcagtgccaatattaacttaagttttaacattcagggccttgtcatcattggggggctttggaggcttacacaggggggcctgggaactgatggagggcaggaagcagtttgatgagctctgcatcccatttgtggtcattcctgctacagtctccaacaatgtccctgggctcagacttcagcgttggggctgacacaacactctaatactatctgcacaagctatgacctgcatcaagcagtcagcagctaggcaccaagcgtcgggtgtctatcattgaaactttggttggctatttgtggctacctggcctaccatggctggacttggcagcctgggggccgatgcttgcctacatttttgaaggaagcccttcaccattcgagacctgcaggcaaaatgttgaacattgtggtgcaaaaaggatgaaaacaactgtgaaaaggggcttggtgttaaagggattgaaaagttcaattgggaactataccacttggctttcattttcaaacctggtactctgaggagggggaagggcatccttcgacagcaggaaggaatgtgcttggtcacatgcagcagggtgggagcccaaccccatttgataggaattttgccactaagatgggcgccaaggctatgaacatggatgtctgggaaaatcaaagagagttacccgtaatgggcggatctttgccaatactcccagattcgggctgtgttctggggatgcgtaagagggctctggtcctccataccagtggctgtagctgtaaggaccagacagattttgaagcatcgaatccccaaggaacagtggtgggctgaaactgaggcccatcctccaaaatcctttgcccaagtacgaggattgacttgggacactttcagaccatgccccacctgggagcacattcacccgggaagcggtccggggaaagctgcccgtctaaaacctctctggagtggagggggaatcggattaccctgatccatggtccagcttcacacccctaattaagtccaacatctttctccagtgtttttaagctgtttttttttcattagggtttcccttttaaatcctgtacccttgcagcccatgacccagttctggcccaggagctggaggagcaggcagtgggtgggagctccttttaggtagaatttaacatgacttctgccccagctttatctgtcacacaaggctgggcacctctaggtgctactgcctaggatatcacttactcagttagaattttcctaaaaataagctttatttatttcgtttgtgataacaaagagtcttggttcctctactacttttacttacagtgacaaattgtaacttacacttaattaaatgnccaactggtcactgtgaaaaaaaaaaaaaaaataaacaataaaaat

SEQ ID NO: 133973 - DNA, 444 bp, Homo sapiens
attggatcaagtaggtcttttagtactatgtgattaattttgttcttgcaaatgggacaagatataaatccaaatgttatccttgggccaagccatcgattttctaatactcgccgacagcactgtaagtggaatatgtgactacaatccagtgccgagagcgcttcggtgaaacatatcatgcacatgtcatcggcgtcttgcttcaggcttgtggcacttttgtcacagccgtgtagacagggcagacagtgctcttcgtttttaacacccccgcatggatggccacaaggatgcgtcttactacaggctatcttagcgtattcctggcaatctgcatcagaacaaacactgccaacagcagataactctgttccactcctggaaccacagaagcgacatgcttctgagctactcgtggtgggtttgcctcccacgcgtccg

SEQ ID NO: 133974 - DNA, 485 bp, Homo sapiens
  misc_feature (1)...(485): n = a,t,c or g
atggccccnnaatagaatctgtancgccgcacnaccggnccggaattnnngttgcgacgatttcgtatgagcggccccagtagcggcgagggcggcgctttggggaggaggagaagaaggaggaggagaaggaggtcgctgtctttgtagtctccccggggtcactaccagctgctgctgtcaggccgggccctggccgaccgctaccggaggatttataccgctgcgctcaatgacagggaccaggggggcggcagcgctggacacccagcctccagtctgaaaacttagagaatacagtaatcataccagatatcaaactacatagcaatccttctgctttcaatatttactgtaatgtacgccattgcgttctggaatggcagaaaaaggaaatatcattggcagccgcatctaagaactctgtgcagagtggagaatcagatagtgatgaagaagaggaatccaaagagccccctatcaac

SEQ ID NO: 133975 - DNA, 3468 bp, Homo sapiens
gtgtgtgctcatattgtccaagctattcgcatggaagctaccagagtccgtgaagaatgggaacatgctatatcaagcaaagaaaatgccaattctcagccaaatgatgaagatgcctcctctgatgcctactgctttgagctgctctctatggttttagcactgagtggctctaacgttggccggcaatatctggctcaacagctaaccctgcttcaggatctcttctcgctgcttcacacagcctctcctagagtccagagacaggtaacctctttactaagaagagttttgcctgaagtaacccctagtcgtctggccagcatcataggagtgaaatccctccccccagcagatatcagtgatatcattcactcaacagagaaaggagactggaataagctgggtatcttggacatgtttctaggatgcattgccaaagcactcactgtacagctaaaagccaaaggaaccaccatcactggaacagctggtaccactgtgggcaaaggagttacaacagttactcttccgatgattttcaattccagttatctccgacgaggtgaaagtcattggtggatgaagggctcaacccctacccagatctcagagatcatcattaaacttatcaaggatatggcagcaggtcatctgtcagaagcttggtcccgagtgacaaaaaatgctattgcagaaaccatcattgccttgaccaagatggaagaagaatttaggtctccactctggcttgctctcgcatccctatgtgttcttgatcaggaccacgtagatcgtctctcctcggggagatggatgggaaaggatggacaacaaaaacaaatgcctatgtgtgataaccatgatgatggtgaaactgcagcaatcattttatgcaatgtctgtggaaatttatgtacagactgtgacagattccttcaccttcatcgaagaaccaaaactcatcaaagacaggtcttcaaagaagaagaagaagctataaaggttgaccttcatgaaggttgtggtagaaccaaattgttctggttgatggcactggcagattctaaaacaatgaaggcaatggtggaattccgagaacacacaggcaaacccaccacgagtagctcagaagcatgtcgcttctgtggttccaggagtggaacagagttatctgctgttggcagtgtttgttctgatgcagattgccaggaatacgctaagatagcctgtagtaagacgcatccttgtggccatccatgcgggggtgttaaaaacgaagagcactgtctgccctgtctacacggctgtgacaaaagtgccacaagcctgaagcaagacgccgatgacatgtgcatgatatgtttcaccgaagcgctctcggcagcaccagccattcagaacaaaattaatcacatagtactaaaagacctacttgatccaataaaagaactctatgaggatgtcagaagaaaagccttaatgagattggaatatgaaggtctgcataagagtgaagctatcacaactcctggtgtgaggttttataatgacccagctggctatgcaatgaatagatatgcatattatgtgtgctacaaatgcagaaaggcatattttggtggtgaagctcgctgcgatgctgaggctggacggggagatgattatgatcccagagagctcatttgtggtgcctgttctgatgtttccagggctcaggtttgggaatatttgcattaccagttgagcatcccaaatctgaaatccaaaatgctccaagcagctttgactgagcagtggaggcttgaggctttcaaatttgcaaagcctgagaagaacctgaagcgacatcagactaaaggacctgaaagaagagagcttcaggaaaaagagccagagccgcaaaggtggagccgcgttggcgccctccgcgggaccagcgcctcggatgcgggcggagcgcggggggccgcggctgcgggagcgcgaagcggggggccaggggcgcctcatgtgagagccgcgggacctgcagccgccgccgtccccggagcacggggtggtgtgtgggggaagccgcccccggcagcagcaaaaatagagtcgggtgtggtggtgcatgcagatactctggaggctgaggtggaaggattgcttgatctcaggaggtcgaggctgcagatgaaacgaggaggaagagatagtgaccgtaattcatcagaagaaggaactgcagagaaatccaagaaactgaggactacaaatgagcattctcagacttgtgattggggtaatctccttcaggacattattctccaagtatttaaatatttgcctcttcttgaccgggctcatgcttcacaagtttgccgcaactggaaccaggtatttcacatgcctgacttgtggagatgttttgaatttgaactgaatcagccagctacatcttatttgaaagctacccatccagagctgatcaaacagattattaaaagacattcaaaccatctacaatatgtcagcttcaaggtggacagcagcaaggaatcagctgaagcagcttgtgatatactatcgcaacttgtgaattgctctttaaaaacacttggacttatttcaactgctcgaccaagctttatggatttaccaaagtctcactttatctctgcactgacagttgtgttcgtaaactccaaatccctgtcttcgcttaagatagatgatactccagtagatgatccatctctcaaagtactagtggccaacaatagtgatacactcaagctgttgaaaatgagcagctgtcctcatgtctctccagcaggtatcctttgtgtggctgatcagtgtcacggcttaagagaactagccctgaactaccacttattgagtgatgagttgttacttgcattgtcttctgaaaaacatgttcgattagaacatttgcgcattgatgtagtcagtgagaatcctggacagacacacttccatactattcagaagagtagctgggatgctttcatcagacattcacccaaagtgaacttagtgatgtatttttttttatatgaagaagaatttgaccccttctttcgctatgaaatacctgccacccatctgtactttgggagatcagtaagcaaagatgtgcttggccgtgtgggaatgacatgccctagactggttgaactagtagtgtgtgcaaatggattacggccacttgatgaagagttaattcgcattgcagaacgttgcaaaaatttgtcagctattggactaggggaatgtgaagtctcatgtagtgcctttgttgagtttgtgaagatgtgtggtggccgcctatctcaattatccattatggaagaagtactaattcctgaccaaaagtatagtttggagcagattcactgggaagtgtccaagcatcttggtagggtgtggtttcccgacatgatgcccacttggtaa

SEQ ID NO: 133976 - DNA, 398 bp, Homo sapiens
aatccttctgctttcaatatttactgtaatgtacgccattgcgttctggaatggcagaaaaaggaaatatcattggcagccgcatctaaaaactctgtgcagagtggagaatcagatagtgatgaagaagaggaatccaaagagccccctatcaagcttccaaaggtaagccactgagttctattaatatttagatgtgtaacctgcaggtgttctgggctataatgcatatatacgcattgctaaaatactttgctttatgtaaaattgcacactaaaaataacacgggcttatggggcaaaaataggtttgggagccaggaaaaggggaaactctggcaactttattaactaaggtgctaacaaagtcaataattgataattcactgggaagcgca

SEQ ID NO: 133977 - DNA, 14910 bp, Homo sapiens
  misc_feature (1)...(14910): n = a,t,c or g
tcttggagcgttctcagtttctcaacagatcttcacttgctaggcagccagaagccggcggcagtggcggcaccgcctcctcctcacattcccggggtggcggggttagatgagcggccccagtcgcggcgccgggggcgctgttcatgccggttcccgacggctccgtggctgctgcggggctggggctggggctacccgccgcggactccccgggtcactaccagctgctgctgtcaggccgggccctggccgaccgctaccggaggatttataccgctgcgctcaatgacagggaccaggggggcggcagcgctggacacccagcctccaggaataagaaaattttaaataagaagaaattgaaaagaaaacagaagagcaaatcaaaagtgaagacaagaagcaagtctgaaaacttagagaatacagtaatcataccagatatcaaactacatagcaatccttctgctttcaatatttactgtaatgtacgccattgcgttctggaatggcagaaaaaggaaatatcattggcagccgcatctaagaactctgtgcagagtggagaatcagatagtgatgaagaagaggaatccaaagagccccctatcaagcttccaaagattattgaggttggcctttgtgaagtttttgaattgatcaaagagacacgattttctcatccatccctgtgtctcaggagtctccaagccctgctcaacgtgctgcagggccagcagccagaagtgctccagtctgagccacctgaggtcctagagtctctcttccagcttcttttggaaatcaccgttcgaagtactgggatgaatgacagcacaggacagtccttaacagcactttcctgtgcttgcctctttagtctggtggcttcttggggagaaacaggaaggacacttcaggccatctctgctatcctcaccaacaatggaagccatgcttgccaaactattcaggtgccaacaattctaaattcgctacagagaagtgtacaagcagttttggtgggaaaaattcaaattcaggactggtttagtaatggcattaagaaagcagctttaatgcacaagtggccattaaaagaaatatctgttgatgaagatgaccaatgtctacttcagaatgatggattttttctttatctattatgcaaggatggattatataaaataggctctggatacagtggaacagttaggggccatatatacaattctacatcccgtattagaaacagaaaagaaaaaaagtcttggttagggtatgctcagggttatttattatatagagatgtgaataaccacagcatgacagccataaggataagccctgaaacactggagcaagatggtactgtgatgttaccagattgccacactgaaggtcaaaatattttattcactgatggagaatatattaatcagatagctgcttcaagagatgatggctttgttgtcagaatatttgccacaagcactgaacctgttctacagcaagaattgcaacttaaactggctagaaaatgcttacatgcctgtcgtatctcattattcgatctggaaaaggacttgcatattataagtacaggatttgatgaggagtcagcaattcttggtgcaggacgagagtttgcgctaatgaaaacagcaaatggaaagatatattacactggcaaataccagagtcttggaatcaaacaaggtggtccttcagcaggaaaatgggttgagctaccaattacaaaatctccaaagatagtacacttctcagttggacacgatggctctcacgcccttttagttgcagaagatgggagcatattctttacaggatctgctagtaaaggagaagatggagaatcaattaagagcagacggcaatccaaaccttataaacctaaaaagataattaagatggaaggaaagatttgtggtatatacagcctgcaataatggaagtagttctgttatttctaaagatggagaactctacatgtttggaaaagatgccatttactctgatagttcaagtgtggtaactgatttgaagggccattttgtaactcaggtagctatgggcaaagctcacgcttgtgttttaatgaagaatggagaggtgtggacatttggtgtaaataataaaggacagtgtgaacgagatactggtgccatgaaccaaggtgggaaagggtttggagttgaaagtatggcatcagcaatggatgaagccctggaagaagagctagatgaaaaagatgagaagtatatgatgtgccctccaggcatgcacaaatggaagctggagcagtgcatggtttgcactgtctgtggagactgtacaggttatggagccagctgtgtcagtagtggacggccagacagagtccccggagggatctgtggttgtggttccggagaatctggttgtgctgtgtgtggatgttgcaaggcctgtgcaagagagttagatggtcaagaggcaagacaaagaggaattcttgatgcagtgaaagaaatgatacctttagatcttcttttagctgtcccagtgcccggggttaacattgaagaacaccttcagttacgacaagaagaaaaacggcaacgtgtaatcagaaggcacagattagaggaaggaagaggcccccttgtatttgctggtcctatttttatgaaccatcgagaacaggctctagccagactcagatcccatccagcacacgtaaagcataaacgggacaagcacaaagatggaagtggagaaagaggcgaaaaggatgcaagcaaaatcacaacataccctccaggctctgtgcgatttgactgtgagctccgggcagtccaagtcagctgtggatttcaccattcagtggttttaatggaaaatggagatgtctatacatttggttatgggcagcatgggcagctaggacatggagatgtcaactccaggggatgtcccactcttgttcaagcattgccaggccctagcacacaagtcactgcaggcagcaaccatacggcagtacttttaatggatggacaggtcttcacatttggaagtttttctaaaggacaactgggcagaccaattttggatgtgccatattggaatgcaaagccagctcccatgcctaacattggatcaaaatatggaagaaaagctacttggataggtgcaagtggggaccaaacttttttacgaattgatgaagcacttattaattctcatgtacttgctacatcagaaatttttgccagtaaacacataataggcttggtacctgcttctatatcagaacctcctccatttaaatgccttctgataaataaagtggatgggagttgtaaaacttttaatgactcagaacaagaggatctgcaaggatttggtgtgtgtcttgatcctgtatatgatgtaatttggaggtttcgaccaaatactagagagctgtggtgttacaatgcggtggttgctgatgccaggcttccctctgcagcagacatgcagtccagatgtagtatcctaagtcctgaacttgccttaccaacaggatcaagggccctcactacccgatctcatgcagctttgcacattttaggttgtcttgataccttggcagctatgcaggacttaaaaatgggtgttgcaagtacagaggaagagactcaagcagtaatgaaggtttattctaaagaagattatagtgtggtaaacaggtttgaaagtcatggaggaggctggggttattctgcccattcagtagaagctatacgtttcagtgccgacactgatattttacttggtggtcttggtctgtttggaggtagaggagaatatactgctaaaattaagctgtttgaattgggtcctgatggaggagatcatgaaactgatggtgaccttcttgcagagactgatgtattggcttatgactgtgctgctagagaaaaatatgcaatgatgtttgatgagcctgttctcctgcaagctgggtggtggtatgtggcatgggcccgagtgtcaggacccagcagtgactgtggatctcatggacaggcatctattaccacagatgatggggttgttttccagttcaagagttcaaagaaatcaaataatggtacagatgttaatgcgggtcagatacctcagttattatacagacttccaaccagtgatggcagtgcttcaaaaggcaaacagcaaaccagtgaacctgtacacattttaaagaggtcttttgcaagaactgtctcagtggaatgttttgagtcattgttgagtattcttcactggagctggaccaccttagtcttaggagttgaagaacttagaggattaaaaggattccagttcacagctacactcctagatttagagagactgcgctttgtgggtacctgttgtctgaggttattgcgtgtctatacctgtgaaatttacccagtgtcagctacaggaaaagcagttgtagaagaaactagcaaattagcagagtgtattggaaaaaccagaactttgttaagaaaaattttatcagaaccacttgatcactgcatggtgaaattggataatgatcctcaaggatatctcagtcaacccttgagtcttctagaagctgtccttcaggaatgtcataatactttcactgcctgctttcattctttctacccaactcctgccttacagtgggcttgcctttgtgatctgctgaattgtttggatcaggatatccaagaagcaaacttcaagacatcaagtagccgactccttgcagctgttatgtcagctctgtgtcacacgtctgttaagctgacttccatcttcccgattgcgtatgatggagaagtattactacgatcaattgttaaacaagttagtacagagaacgactcaacactagttcatcgttttccccttttggtggcacatatggaaaaactcagccagagtgaagagaatatctcagggatgacaagcttccgtgaagttctggagaaaatgctggtcattgttgtgctaccagtcaggaacagcctgaggagagaaaatgaactcttctcctcccacctcgtctctaacacctgtggattactggccagcattgtcagtgaactgacagcgtcagccctgggatctgaggttgatggacttaattctcttcactctgtaaaagctagtgctaaccgatttacaaaaacaagtcagggcagaagttggaacactgggaacgggtcccctgatgcaatctgtttttcagtagacaaacctggaatagttgtggttggtttctctgtctatggaggaggtggaattcatgaatatgaattagaggtgttggttgatgatagtgaacatgcaggagattcaactcattcccacagatggacatctctggaattagtgaaaggaacgtacacaacggatgactcacccagtgatatagctgagatcagacttgacaaagtggttcctttaaaggaaaatgttaaatatgctgtgcgcttgaggaactatggaagccgtacagccaatggagatggaggaatgaccacagttcagtgccctgatggtgtgacattcacattcagcacgtgcagcttgagcagtaacggcacaaaccaaaccagaggacagatcccacagatactctactataggagtgaatttgatggagatttacaatcccaacttctgagtaaagccaatgaagaagataaaaactgtagcagagcattgtctgttgtaagcactgtcgttcgagcctctaaggacctcctgcacagagctcttgctgtggatgctgatgacattccagaactgctgagttcttccagtctgttttccatgctgctcccccttattatagcctacataggaccagtagctgctgctattcccaaggtggctgtagaagtctttggccttgtccaacaattgcttccgtcagttgccattttgaatcagaagtatgcaccgcctgccttcaaccctaatcagtcgacagatagcaccacaggaaaccagcctgaacagggcctctctgcttgtacaacctccagtcactatgctgtcatagagagtgagcacccgtataaacctgcctgtgtgatgcattacaaggtgacattcccagaatgtgtgaggtggatgacaatcgaatttgaccctcagtgtggtactgcacagtcagaagatgtccttcgtttgttgattcctgtcagaactgttcagaattcaggatatggaccaaaattgacatctgttcatgaaaatcttaattcatggatagaattaaagaaattttcaggatcctctgggtggcctactatggttttggtgttgccaggaaatgaggcccttttttcattggagactgcatcagattatgtgaaagatgacaaagcttctttctatggttttatgtgttttgcaattggatatgaatttagccctggacctgatgagggagtcatccaattggaaaaagaattagccaatcttggtggggtttgtgcagcagctctgatgaagaaggacctagcacttcctattggtaatgaattagaagaagaccttgaaattcttgaggaggctgcattgcaggtgtgcaaaacccattctggaattcttggaaagggtctagctctttctcattcaccaactatattagaagcacttgagggaaatttaccactccaaatccaaagcaatgaacagtcttttctggatgattttattgcctgtgtcccaggatcaagtggtggaaggcttgcaaggtggcttcagccagattcatatgcggatcctcagaaaacatctttgatcctgaataaggatgatattcgttgtggttggcctaccaccataactgttcaaacaaaagaccagtatggggatgtggtacatgttcccaatatgaaggtggaagtgaaagctgtccctgtttctcagaaaaaaatgtctttacaacaagatcaagcaaagaaacctcaaaggattcctggcagtcctgcagtaacagctgcatcttctaatactgacatgacttatggagggctggcatcaccaaagctagatgtttcatatgaaccaatgatagtgaaggaagctcgatatattgccataacaatgatgaaggtttatgaaaattattcatttgaagaactacgttgttgcatcaccaactcctaagagacccagtgagaatatgctgatccgtgtcaataatgatgggacttattgtgcaaattggactccaggggctattggactctacactcttcatgttaccattgatggcattgaaatcgatgctggtctggaagtaaaagtaaaagacccaccaaaagggatgataccaccaggaactcagttggtcaaaccaaagtctgaacctcagcctaataaggttcgaaaatttgtggccaaggacagtgcggggcttcgcatcccgtagccacccttcccttcagaagtgagcagataggcactagtgaaaagtcaatggaaactatcacttttattgatgagatccataatgatgatgggtgtgtgggctgaggctgaatgatgagacaataaagaagtatgtccctaacatgaatggttacactgaagcctggtgcctctcttttaatcaacatcttggcaagagtcttctggtccctgttgacgaatctaaaactaatactgatgactttttcaaagacataaactcctgctgcccacaggaagcaacaatgcaagaacaagatatgccattcttgcgaggagggccaggcatgtacaaggtagtgaagacgggaccttcaggtcacaacatcagaagctgccctaaccttagaggtatcccaattggaatgttagttctgggaaacaaagtcaaagcagtgggagaggtaaccaattctgaagggacatgggtgcaactggatcagaacagcatggtagagttctgtgagagtgatgaaggagaggcatggtccttagctagagacagaggcggaaaccagtacctccgacatgaagatgaacaagctcttctggatcagaattctcaaactcctcctccaagccctttctcagtgcaagcttttaataaaggggcaagttgcagtgcccaaggatttgattatggactcggaaatagcaaaggtgatcgaggaaacatctcaacatcttctaaaccagcctctacatcaggaaaatcagagctgtcctctaaacacagcagatcgcttaaacctgatggacgtatgagccggactactgctgatcagaagaagccaaggggcacagaaagtttatctgctagtgaatccctcatcttaaaatctgatgctgcaaagttgaggtcagattcccacagtaggtcattatcccccaaccataacaccttgcagacattgaaatctgatgggaggatgccttctagctccagagctgaatccccaggaccaggttctcggttgtcatctcctaagccaaagactctcccagccaataggtctagcccatcgggtgctagttctccacgctcctcctcaccacatgataaaaatctacctcaaaaaagtactgctcctgttaagacaaagcttgatcctcctcgggaacgttctaaatcagactcttacacacttgatccagataccctccgcaagaagaaaatgcccctcacagaacctttgagaggacggtcaacgtcaccaaaaccaaaatcagtaccaaaggattctacagattcccctggatctgaaaatagagctccctctccccatgtggtacaggaaaacctccacagtgaggtggtcgaagtctgcacctcaagtactttaaaaacaaatagtctaacagacagcacctgcgatgacagtcagtagaatttaagagttttggatggaaggtttcaaataaagttcattttagcattggaaaagcaccactgaaagatgaacaggaaatgagagcatctcccaaaataagtcgaaaatgtgctaatagacacaccaggcccaaaaaagaaaaatcgagttttcttttcaaaggagatggatccaagcctttagagccagccaagcaagccatgtctccttctgaggccgaatgtgccagagctgagatagcttccttcctctggcatgaaggcatagtacatgatgcaatggcttgatcttctttcctaaagtttcatcctgaactttccaaagaacatgctcctataaggagtagtttaaatagccaacaacctacagaggaaaaagaaaccaagttaaaaaatagacattcattagaaatatcatcctgcacctgaatatgtttaatattggcaccccccatggacccagatatatcctaagatggggtagcatcaacaaaaacaaggtattgtcctatgccttaaggaacccacctctgcatgaaaaatgtgaggatgggaaaactgagacccacttttgaaatgtcccatgcataacacaatgaagtcctaagtctcctcttcccttaactttacaacatttagtggctttttgggaagacatctctttggctactatcaaagctgcttcccagaatatgatttttccaagtcctggttcctgtgcagttcttaaaaagaaagagtgtgagaaaggaaggaataagaagtccaaaaaggaaaaaaagaaaaaagaaaaggcagaagttaggcccaggggtaatttgtttggagagatggcccagctggcagtaggaggaccagagaaagataccatctgtgaactgtgtggggagtcacatccatacccggtgacctatcacatgagacaagctcacccaggttgtggccgatatgctggtggacaaggttacaatagcattgggcatttttgtggaggatgggctggtaactgtggtgatggtggcataggaggaagcacttggtatctggtatgtgatcgctgtagagaaaaatacctccgcgaaaaacaggctgctgcaagggagaaggtcaaacaatctaggagaaaaccaatgcaagtcaagacccctcgtgccttgcccaccatggaagctcaccaggtgattaaaagcccaatgccagtctttcctgctgtccctgagcagtgcagcagaaccgagcattctgtgttaccatcctgcaaagccattccaatctcagttgcccagtgtaaaagaaggcatttctgaggatcttcctgtgaaaatgccttgtctctacctgcagacattagctaggcatcatcatgaaaattttgtgggctatcaagatgacaatctattccaggatgaaatgagatatctacgttcaacatctgtacctgccccgtatatatcagtaactcctgatgcaagtcctaatgtatttgaagagccagagagcaatatgaagtctatgccaccaagtttagaaaccagtcccataactgatactgatcttgcaaagagaactgtcttccaaagatcatactcagttgttgcttccgaatatgataaacaacactccattttacctgcacgagttaaagctattcctagaagaagagttaacagtggagacactgaagttggttcttcccttttgagacatccgtctcctgagctttctcggctaatctcagcccacagctctctttctaaaggagaacgaaatttccagtggccagttttagcttttgttatacaacatcatgatctagaaggtcttgaaatagcaatgaaacaggccctaaggaaatctgcttgtcgagtttttgctatggaggctttcaactggcttctgtgtaatgtcatccaaaccacttctctccatgatattctgtggcattttgtggcatcactgactcctgcaccagtggaaccagaggaagaagaggatgaagaaaataaaacaagcaaagaaaattcagaacaagagaaagatacaagagtatgtgaacatccactctcagacatagtgattgccggggaacgtgctcatcctttaccacacacctttcaccgcttgctgcagaccatctcagaccttatgatgtctctccccagcggcagttcattacagcaaatggccctgaggtgctggagtctcaaattcaagcaatctgatcaccagttccttcatcagagcaacgtctttcatcacattaacaatattttgtcaaagtcagatgatggcgatagtgaagagagttttagcatcagtatacagtctggctttgaagctatgagtcaggaattatgcatagtaatgtgcttaaaggacttaaccagcattgttgacataaaaacttcaagccgacctgccatgattggcagtttgacagacggctccacagaaaccttttgggaatcaggagatgaagataaaaacaaaactaagaacatcaccatcaactgtgtaaaggggaatcattgccccgctatgtgtcctgtttcaccgtggacatttccccgagatcttggggaataaagttacctcaatgaccttcttaactggcaaagcagtacaagattttgtnccagaataaagcagggttgatctggattccaggcacattggctgggtaacaagtgaacttccaggaggggataatcacatcataaaaattgaattaaaaggcccagaaaatacactgagagttcgacaagtcaaagtcctgggctgggaaagatggtgaaagcacaaaaatagctggccagatttccagccagtgtggccccagccagagggaactgtgaagctggagactcctgccgagtattcagactgattacgtctcaagtatttggaaagctcatctctggagatgctgaacctacaccagaacaagaggaaaaagcactattgtcatcacctgaaggagaagaaaaagtatacaatgcaacatcagatgctgacctgaaagaacatatggttggaatcatattcagcaggagtaagctgactaacttacaaaaacaggtgtgtgctcatattgtccaagctattcgcatggaagctaccagagtccgtgaagaatgggaacatgctatatcaagcaaagaaaatgccaattctcagccaaatgatgaagatgcctcctctgatgcctactgctttgagctgctctctatggttttagcactgagtggctctaacgttggccggcaatatctggctcaacagctaaccctgcttcaggatctcttctcgctgcttcacacagcctctcctagagtccagagacaggtaacctctttactaagaagagttttgcctgaagtaacccctagtcgtctggccagcatcataggagtgaaatccctccccccagcagatatcagtgatatcattcactcaacagagaaaggagactggaataagctgggtatcttggacatgtttctaggatgcattgccaaagcactcactgtacagctaaaagccaaaggaaccaccatcactggaacagctggtaccactgtgggcaaaggagttacaacagttactcttccgatgattttcaattccagttatctccgacgaggtgaaagtcattggtggatgaagggctcaacccctacccagatctcagagatcatcattaaacttatcaaggatatggcagcaggtcatctgtcagaagcttggtcccgagtgacaaaaaatgctattgcagaaaccatcattgccttgaccaagatggaagaagaatttaggtctccagtgagatgtattgcaacaactagactctggcttgctctcgcatccctatgtgttcttgatcaggaccacgtagatcgtctctcctcggggagatggatgggaaaggatggacaacaaaaacaaatgcctatgtgtgataaccatgatgatggtgaaactgcagcaatcattttatgcaatgtctgtggaaatttatgtacagactgtgacagattccttcaccttcatcgaagaaccaaaactcatcaaagacaggtcttcaaagaagaagaagaagctataaaggttgaccttcatgaaggttgtggtaggaaccaaattgttctggttgatgggcactgggcagattcttaaaacaatggaagggcaatgggtgggatttcccaggaacacacagggcaaacccaccacgagtagctcaaaagcatgtcgcttctgtggttccaggagtggaacagagttatctgctgttggcagtgtttgttctgatgcacattgccaggaatacgctaagatagcctgtagtaagacgcatccttgtggccatccatgcgggggtgttaaaaacgaaaagcactgtctgccctgtctacacggctgtgacaaaagtgccacaagcctgaagcaagacgcccatgacatgtgcatgatatgtttcaccgaagcgctctcggcagcaccagccattcagctggattgtagtcacatattccacttacagtgctgtcggcgagtattagaaaatcgatggcttggcccaaggataacatttggatttatatcttgtcccatttgcaagaacaaaattaatcacatagtactaaaagacctacttgatccaataaaagaactctatgaggatgtcagaagaaaaggctttaatgagattggaatatgaaggtctgcataagagtgaagctatcacaactcctgggtggtgaggttttataatgacccagctggctatgcaatgaatagatatgcatattatgtgtgctacaaatgcagaaaggcatattttggtggtgaagctcgctgcgatgctgaggctggacggggagatgattatgatcccagagagctcatttgtggtgcctgttctgatgtttccagggctcagatgtgtcccaaacatgggcacagactttttgggaatataaatgtcgctactgctgttcagtggctgtttttttctgttttggaacaacacattttttgtaatgcttgtcatgatgattttcaaagaatgactagcattcctaaggaagaactaccacactgtcctggcaggtccaaaggcaaagcagttaagaaggaactgaatgtccactccatgttgttcatccacccacctgggaaagaggtttgctctgggatgtggagtgtgcagaaatgcccacacttttaagaccacgcagatcctttgtctacagagagaaaaattgccttcatcccccacggaggatggcggtgaagtttaaaacccctgctcaggataaggacgggaccatttttacatccatgaaaatgaacccattccacagtgcaagaaggatacccaaatacccatgtacataattccttgcctatgaaaagtttcccccattattttggtttatccttccttttgaacaaaatgacatcaaacttgtgaggtgtttgcatgtggccattaccgtcattggccctgtgaagcattggacatttatagataattgatataaaagaatcgccatgcccatggactaagaacgatgctggctttcaagcaaaaaaagaaaaataatcattgtttattgtatactgcctttttgtaatcctgtacaattgcatcacgggtgggggataaaaagaggaatattctgggtttatttcctaggactgttatttaaaaaaaaaaaaaacattgtgttagggacagcatataaatgtaataagtatcacactgtatataaacatatcaatgtttgtcctgtataagaattactaaattacaaatgcaatttcatttaaacttctaggttaagtttgagcctgaaattttaatgaagtgcaataatgaggcacactcagtattgcacttcattatcttgcagctgtaaacatattggaatgtacatgtcaataaaaccactgtacatttttatacagtgataaagtctaaaaaaaaaaaaaaa

SEQ ID NO: 133978 - DNA, 1431 bp, Homo sapiens
atggctccgagcagccgctgggacgccatgggccctaaaaattcctacagatccgtgcatggtaggattgttccagaactgctagaaagttctgtggccagggttaggcccttacagtatgtgcaaagacaaccatcccaggcctcagcccgaagtggtgcaaaccccacccacaggccctctgcagaggtaaggcccgtcatccgcactggggagatgacacactcctcggtcattcctccgctggccccgggagttcggagggtgtctctaggctatgagtcttccccaagtggttccctgccacccctttttaaccaggagtcaccgtggagacggcaggactcctatagcccccagaatcctgccgttagtcacaaggcatccctgaactccactatactccagggccccgcggacgctggtgtggttggtggccaatcgtggaaccgcgcatgggagccagccaggggtgctgcgtcctgggacacctggcgcaacaaggcggtggtgcctcccaggcggtccggggagccaatggtgtccatgcaggctgcagaggagatccgcatcctcgcagtgatcactatccaggcgggcgtccgtggctacctggcgcgtcgcaggatccggctgtggcaccggggggccatggtcatccaagctacttggcgcggctaccgtgtgcggcggaacctggcacacctctgcagagccaccacgaccatccagtctgcctggcgcggctacagcacccgccgggacttagctcggcactggcagatgctccaccccgtcgcgtggggggagctgggcagccgggccggggtcatgtctgaccgaagctggttccaggatggcagagccaggacagtatctgaccatcgctgcttccagtcctgccaggcacacgcttgcagcgtctgccactccctgagctccaggatcgggagcccgcccagcgtggtgatgctagtgggctccagccctcgcacctgtcatacctgtggacgcacacagcccacccgtgtggtgcagggcatgggccagggcactgagggccccggggcagtgtcttgggcctccgcctaccagctggctgccctgagtcccaggcagccgcatcgcccaggacaaagcgggccacagccatccagtccgcctggaggggctttaagatccgccagcagatgaggcagcagcaaatggcagcgaagatagttcaaagccacctggcgagggccaccatacccggagctgtctgaagaacacagaggcgctcttgggaccagcagacccctcggccagctcacggcacatgcattggcctggcatctaggaccctggctccctgcagtggggacttcgtgggaggcactcatggctctctgggtctaatgaataaagtcctccacagcctagatcttgggt

SEQ ID NO: 133979 - DNA, 546 bp, Homo sapiens
ccagtgatgatcagccagagaagcctcactttgactctcgcagtgtgatatttgagctggattcatgcaatggcagtgggaaagtttgccttgtctacaaaagtgggaaaccagcattagcagaagacactgagatctggttcctggacagagcgttatactggcattttctcacagacacctttactgcctattaccgcctgctcatcacccacctgggcctgccccagtggcaatatgccttcaccgagctatggcattagcccacaggccaaggggatcacaaaggctacatgtgaatggggcgagcacatcattccactgggaagcatggcaattaacagcatctcaaaactgactcagctcacccagtcttccatgtattcacttcctaatgcacccactctggcagacctggaggacgatacacatgaaggtaggaaaggaacagaaggcagtcagttaaaatgcgaacaccaactgcctcctcctatgagtcatgttggaggtgggcaaagggagagtttggcccgaaaggaaaaataa

SEQ ID NO: 133980 - DNA, 442 bp, Homo sapiens
ttcctggacagagcgttatactggcattttctcacagacacctttactgcctattacccgcctgctcatcacccacctgggcctgccccagtggcaatatgccttcaccagctatggcattagcccacaggccaagataacttataatatcaaaatgaatagaagaaaatgtgttcactggaaactggctgttgagcccctccaatgggagctgaggagctgtgtctctgcaggcatggggactggccccaagcaaaaagtcagcagcatgaagccccggagctgtagcgtgtgcagcaggcgccaatccaacagcatgggaacaacagtgtcgcaatcattcctcagttatggcaagaatgtgctatttttccctgttaggtgttgcttttgagaactacaaataaaactctcccaccaagtgaaaaaaaaaaaaaaaaaa

SEQ ID NO: 133981 - DNA, 1754 bp, Homo sapiens
cgagccatggaggaggaggcatcgtccccggggctgggctgcagcaagccgcacctggagaagctgaccctgggcatcacgcgcatcctagaatcttccccaggtgtgactgaggtgaccatcatagaaaagcctcctgctgaacgtcatatgatttcttcctgggaacaaaagaataactgtgtgatgcctgaagatgtgaagaacttttacctgatgaccaatggcttccacatgacatggagtgtgaagctggatgagcacatcattccacttggggaagcattggcaattaacaagcatctcaaaactgacttcagcttcacccagtcttccatgttattcactttcctaattgcacccactcttgggcagacctgggaggacgatacacatggaagccagtggatgattcagccagagaagcctcactttggacttttcgcagtgttgatattttgaggttgggtttcatggcaatggcagtggggaaagtttgccttgttttacaaaagtggggaaaccagcattagcagaaggacactggaggttcttgtttcccgggacagagctgttatactggcattttctcacagacacctttactgcctattaccggtctgctcatcaccccacctgggcctgccccaggtgggcaatattgcctttcaccagctatggcattagcccacaggccaagcaatgggttcagcatgtattaaacctattcaccttacaacacaaacctggttcacagaaggagaccgattccttttgtggaattaagctagatcccagcaaagtgttttaaggaggcaagaacaagatcgtaatcccaaaaaagaaagggcctgtgcagcctgcaggtgggccagaaagggcccttcagggaccctccggtcccttccatttcctccatttttaaatcctcctctgggctctggggaaaccccacccgggaagtgagcacccctccctccaactccctaccagctccagagtggtggtttccatgcacagatggccctaggggtgacctccagttttgcgtgtggaccgtaggcctctttctagttgaatgaccaaaattgtaaggcttttagtcccaccgacattagccaggctcgtaagtgaggcctccagagcaggttgtgctgtcccctgcctctggaagcaatggggaatttggaatcttgtgtaagtgcccaaataagtcttgagtgctttcctcttcttcaacaatcaaccctcaaatccctttagcactgattgattagagaggtcccccaaaagaaaccactggttttggacccatggaagcattaggaactgcatttgttcatttcagggagccactagttcacatatggactattttaaattttaaagtaaattgtatgaaaaaaatccaattccttcaattggcattagcccacattttgagtaattcatgtggctggtagattctgtattagcacaaaggatatggaacatttcccatcacccacagaaagttctgttggacagccctgcaatagaaatattttcaaacgggctttcccccaaataatttttgttgttaatgttgatgtcttctattggatgggtcataatgttccatgaaacctctcaaggtacacaattgtatgttctttgtatcccttaccacaaatatcttctctctgctcatttcttttgcagcttcctataaagtttgtcttcctcatcaaaaaaaaaaaaaaagggcggccgct

SEQ ID NO: 133982 - DNA, 2838 bp, Homo sapiens
atggatgctctgatgctggccctgggcgctctgatgctggccctgggcctcggggatcccaaatctgcccaggtttccgatcccgatggggcagagcctggtcctggcagagccactggtacagatccactggtacagatccactggaaactgggcatctctgaggccctgagcatcccaggaggccgattgtacagagacctctggtcgctgaccccagtctgcctccacatccctggaatagcccatcatgggcccttcacccttggcaggatggacgtggtagaggtcgcgggtagttggtgggcacaagagcgagaggacatcattatgaaatacgaaaagggacaccgagctgggctgccagaggacaaggggcctaagtcttttggaagctacaacaacaacgtcgatcatttggggattgtacatgagacggagctgcctcctctgactgcgcgggaggtgaagcaaattcggcgggagatcagccgaaagagcaagtgggtgaaaatgctgggagaatgggacacctacaaaaacagcagaaagctcatagatcgagcgtaccagggaattcccatgaacatccggggcccgatgtggtcagtcctcctgaacattgaggaaatcaagttgaaaaaccccggaagataccaggtacgctcagccagagcacaaccaacaggacaggccgtgtcaggggcccaggtctccagctggagggaacgtcaagaccaccctggggagctgggggtgaagatcatgaaggagaagggcaagaggtcatctgaacacatccagcagatggacctggacgtaagcgggacattaaggaggcatatattcttcagggatcgatacggaaccaagcagcgggaactactttacatcctcctggcgtatgaggagtataacccggaggtgggctactgcagggacctgagccacatcgccgccttgttcctcctttatcttcctgaggaggatgcattctgggcactggtgcagctgctggccagtgagaggcactccctgcaggagcgcctcacgaagacgtccaggtgtggcccgtgggcacgtttttggaaccggttcgttgatgcctgggccagggatgatgacactgtgctcaagcatcttagggcctctatgaagaaactaacaagaaagcagggggacctgccacccccagcttgccaggacaacgagcctggagccagggagacaagggaatcggtgtccctgacccacggagctttcagggagagggcgcaggcgggaccccgggcccagggccagagccaagagttcagccagaagtgggaacgccaaacccgagcaagggtcgtcggcatccaggcctgtgccagcttcacgtggcgggaagaccctctgcaagggggacaggcaggcccctccaggcccaccagcccggttcccatggcccatttgggaggacctcagggttcctggagattcctgcagtggaactccatgccccgcctcccaacggacctggacgtaggggacccttggttccgccgttatgatttcagacagagctgctgggtccgtgccatatcccaggaggaccagccggccacctgctggcaggctgaacaccctgcggagcgggaaacccagagcgtctactgggagctgaaggcttatgtctacctcaatgctgtccgcgttcgctgtatgaacaagttcaggctgagctgcctggaggaggagcagctgctgttgctggtgaccagcacgttcgggaacggagactgctctggccagtttgaaatagaaaaaagttgtgagttactttttcagatggcagagtctgttgattatgattatgatgttcaagataccatcctcgatggcttgttaatattgccgtgttatggatcaatgacaactgatcaacagaggaggatatttttgccaccgccacctggaattagaaaatgtgtcatatccaccaatatttctgcaacgtctttgacaatagatggaaccagatatgtggtagatggtggctttgtgaagcagttaaatcacaaccccagattagggttggacatcctggaggtggttccaatttcaaagagcgaggcattacagcgaagtggccgagctggcaggacttcttcaggaaaatgctttcggatctatagtaaagatttttggaaccagtgtatgcctgaccatgtgatccctgaaattaagagaactagtttgacatctgtagttctgaccttaaagtgccttgccatacacgatgtcataaggtttccctatttggatccacctaatgagagacttattttagaagctcttaaacagctttaccagtgtgatgctattgacaggagtggccatgtcaccagattgggtttgtctatggtggagtttcctttgcctccacatctgacatgtgcagtaataaaagctgcttccctggattgtgaagatttactacttccaatagcagcaatgttgtctgtggaaaacgtcttcattagacctgttgatccagagtaccagaaggaagcagaacagagacatcgagaattggcagctaaagctggaggatttaatgactttgcaactttagctgtcatctttgaacaatgcaaatcaagtggcttccggaagttcctggtccacaacgtcaaggagctggaagtgctgctgatgtgcaacaaatcttactgtgccgagatcactcaccatgtttcctccaagaaccgcaaagccatcgtggaaagagctgcccaactggccatcaaagtcaccaaccccaatgccaggctgcgcagcaaagaaaatgagtag

SEQ ID NO: 133983 - DNA, 853 bp, Homo sapiens
tcaccatatcttccattatcagaaaggcccggaaaccgccaggacctcttgaataattacaccccccgctcttcaccccttagaagcagcgggcgcacacgaatgtacaaaggaaaaaacgtccgcccggggaattcttcctgagcgaggtggcccgaggacgcttccttcttccaggtctggccgccgcctgagtccactcccagtgcttgcaagattccaagttctcacctcttaaagaaaaccacccccgtagattcccatcatacactccttttttttaaaaaagttggtttcctccattcaggattctgttccttaggtttttttccttctgaagtgtttcacgagagcccgggagctgcctgctgcggccccgtctgtttgtttcagcttctgggtctgagtcatggccgggtggaggcacagccttctccactggccggagtcagtgccaggtccttgccctttgtggaaagtcacaggtcacacgaggggccccgtgtcctgcctgtctgaagccaatgctgtctggttgcgccatttttgtgcttttatgtttaattttatgagggccacgggtctgtgttcgactcagcctcagggacgactctgacctcttggccacagaggactcacttgcccacaccgagggcgaccccgtcacagcctcaagtcactcccaagccccctccttgtctgtgcatccgggggcagctctggagggggtttgctggggaactggcgccatcgccgggactccagaaccgcagaagcctccccagctcacgtggaacccccctcccacccaccgccacaataaagatcgcccccacctccaaaaaaaaaaaaa

SEQ ID NO: 133984 - DNA, 2019 bp, Homo sapiens
  misc_feature (1)...(2019): n = a,t,c or g
atgctgcccgctgagaagctggcggacccagcgggagcaccgggaccggtgcagatggcgcctgggagcccgggactcctggaaaggtggctgggggcagctcggctgcgggccccacctggtcctcctcactttcctgtgtgccctgccctgcctggaggcagagccagggacccccttgcccccgacccaaaacccccgagcctgctctgctcagttctggccccagaagcaagaagatctgttctttgctgtatttcagttctgctggtacgttgctcatcaatcaatctccaaaaaagtaaatcacgcgacggctttgccgttacgcacaaaaacaggttttgtcactttaaccggcatttcacggttgcgaatttgcacaatcgccgtttcgccaataccttccggcacgcgcgccagcgcaatgctgtaacccagcgtcggggagaaagacgcgccggctccggcaggctcacgctacggaatccgggcggcggcgcacgtgacccggcgttgctaggaaacgggagtggggcctgcggggacgcggctggagcctgcgcatttcttccttcctgctttcaaagttgcaatgagcgcagagcgagatgttttggaaagcccttggggaaaaaagttgacacgcttggggaactgggggttgagaggcctagactgggggtccggacccagccctcagactgggtgaggggcctagactgggggtcccggacccagccctcaggactgggtgaggggcctagactgggggtcccggacccagccctccggactggccctcaggactgggtgaggggcctagactgggggtcccggacccagccctccggactgggtgaggggcctagagtgggggtcccggactcagccctccggacntgggccctcatgaacggctccgagagcaggttcttcgtgagttcctcgcagggccggtcagagctggtaccgaattctattatgctgtcgattattgaccgctcaccgctcatgcggtctcctctggcggcacctctccggttctggcacgcctgttgcgcgaaaaacttgaatcactgcgtgccgttacatctgggccaggtagcgaaatacgccgggcaattacgcgggcgagtgaaacaacagttcgccacgatgggtgagcgtcgccgtttctgggagaaattgttcgttaacgaccgcctggcgcagtcgctggcaaacaacgatcagaaagccattactgaaacgaccgaacagttaatcaacgaaccgctcgaccatcgcggtgaagtggtgctggttggtgcaggtccgggcgatgccgggctgctgacactgaaaggactgcaacaaattcagcaggcagatgtggtggtctacgaccgtctggtttctgacgatattatgaatctggtacgccgcgatgcggaccgtgttttcgtcggcaaacgcgcgggataccactgcgtaccccaggaagagattaaccagatcctgctgcgggaagcgcaaaaaggcaaacgcgtggtgcggctgaaaggtggcgatccgtttatttttggccgtggtggcgaagagctggaaacactgtgcaacgcgggtattccgttctcggtggttccgggtattaccgcagcttctggttgctctgcctattcgggtattccactcacgcatcgcgattatgcccagagcgtacgcttaattaccggacacttaaaaaccggtggcgagctggactgggaaaacctggcggcagaaaaacagacgctggtgttctatatggggttgaatcaggccgcgactattcagcaaaagctgattgaacacggaatgccaggcgaaatgccggtggcaattgtcgaaaacggtacggcagtcacgcagcgcgtgattgacggtacgctcacacagctgggagaactggcgcagcaaatgaacagtccatcgctaattattattggtcgggttgttggcctgcgcgataaactgaactggttctccaaccattaa

SEQ ID NO: 133985 - DNA, 3035 bp, Homo sapiens
  misc_feature (1)...(3035): n = a,t,c or g
ttttttcaaaggggaagagtagcatgtttgtacctaggatggaccaagagatgtttgcccagaggagggggttgagcaaagcgacaggttaatagtaaaacaattaagatgacaaggaaaattactgggcttaagatttctaactacatttacttccttgacgaacgcttcggccgtgcgtagactggtcagcttccggggtgacttagagcagggctgtggtcactttcactggcatctgggtcctgtccgtaggatcagccggtttggatggtctgggtcttgctggcatggtccacttgtcctgggctgctgggtttcaagccgactgtggagatcgaaggcacagttccgtggtcgcccgcgggaacttcaagggtccttcctacccgcgttgctgagagtctgggtttacgcgtcacctcgggcgggacccgatcctccgctcctgaggcccccacaatgaagcagtcggacgcgtctccccaagaaaggtacccgccagcctctcatttttaaaggcagagatgtgcgtctcgccatgttgccgcgtctggtctcgagctcccgggctcaagcgatcttcccgcctcgacctcccaaggctctgggagtacagacgtgagccacagcggccggcccgtgtttaactcagataaaatctgggtaacacactttcaacgcttcaaccccctcgggcgcaccgctctgcgctcattccaactttgaaagcaggaaggaagaaatgcgcaggctccagccgcgtccccgcaggccccactcccgtttcctagcaacgccgggtcacgtgcgccgccgcccggattccgtagcgtgagcctgccggagccggcgcgtacatgcgagcgtgtgcgcgcgtgcgcaggcggggcgaccggcgtccccggcgctcgccccgcccccgagatcccgccgtgcgtgcgcgcgcccggtccgcgcctccgccgctttttatagcggccgcgggcggcggcggcagcggttggaggttgtacgcggattccggcgaggaatatggaatcatggcgtttgcgctgttcgtgctgctgggatctcgcgctgctgggcacccacggagccatccggggctgccggcacagtcttcactaccgtagaagacctttggctccaagatactcctcacctgcatccttgaatgacagcgccacagaggtcacagggcaccgcgtggcatgaaggggggcgtggtgctgaaagaaagatgcgctgcccggccagaaaaccggagtttcaaggtggactccgacgaccatgtggggatgaagtactcctggcgtcttcctcccccgagccccatgggcacgggccaaccatccaagcttccacggggcctcccagagttgaaggcttgtgaagttcgttcagaacacattcaacgagggggaagacgggccttgttgggtcttgcaagttcagagttcgtgccaccttgtcactgactggggccttggtacaagatcactgactctgagccacaaggcccttcattgaacgctcagagaacaaggttctttcgtaggtccctccgcaggcccggtcaaaagctaccaacattgagaacctgaacacatagggccgcccccggccaggaaccggtgcaacggcaccagctccaaagggctccgaccgaggccattacaattcctccgcgtgcgcacagccacctgagcagccctcttggcccttcctgggcatcgtgggttgaggtgctggtgcttggtcaccattcatcttcatctacgagaagcgccggaagcaccgaggacgtcctgggatgatgacgacgccggctctgcacccctgaaagagcagcggggcagcaccagaattgacaaaggcaagaaacgttccgccagagggaatttttcctgagggcaggttggcccgaggacgctcgcctggttccactgtctgcgccgccgccggagttccactcccagttgcttggaagatttccaaggttctcacctctttaaagaaaacccactcccgtaggaatcccattcattacacttccttcttttttaaaaaaagttggggttttcttccatttcagggattcttgtttcctttaggtttttttttcctttctggaagtgtttacgagaagccccgggagcttgcttgcccttgcgggccccgtcttttggtttttaagccctctggggtctgaagtcattggccgggttggggcgcaacagccttcttccactgggccgggagtcagtgccagggtccttgcccctttgtgggaaagttcacaggtcaacacgaaggggcccccgtgtccctgccttgtctgaaagccaaatgctgtctgggttgcgcccatttttgttgctttttatgttttaatttttatgagggcccacggggtctgttgttcgactcagccctcaggggacgaattctgaacctcttgggccacagaggaattcaatttgcccacacccgagggcgaaccccgtcacagcctcaaagtcactcccaagccccctccttgttcttgtgcatccgggggcagctctggagggggtttgcttggggaactggcgccatctgccgggactccagaacccgcagaagcctccccagctcacccctggaggacgggccgggttctctatagcaccaggggctcacggtgggaaccccccctcccacccaccgccacaataaagatcgcccccacctccaccctcnnnnnnnnnnnnnnnnggggggccccggggccggaaatcccaaattttaaaaggggaaatccggaaaacccccggggggttctttaaaggggggtgggggccccatcaaaatttttttatttaaaacccggttggccctttttttaggaaaaaaacccccctaaagttaaaatttgggccgggaacccctgggcttaaaaaattttttaaaggcccaaaaataaggccccatttttttttgggcccaaatttttttaagaaaaaattttaagagggctttattaaaaactt

SEQ ID NO: 133986 - DNA, 1050 bp, Homo sapiens
atggccatgacagtgaacttagtgaatagctgcagggtgggtccagtgacggacttcttagaagctatgccagtgacccccttctgcacggagctaaaccagccgaccctgcccaacatccgcaagtggaaggggccccggggatgctggaaggctgttgttgctgagaagccctcgagtcagctccagaagggagctgggtatgcaggattcctatgggacgcggctgccggcatggagctgagagacgcgggttcacaggagagctcgccaagcaacgggcacgggaagctggcgggccccagcccatacctcgggaggttcaaggtgggaagtcacgacctgacccttgttaaccttcacctggcagccctgaccctcctggggagcgagaatcccagcaagaatcacagtgatggccaccggttggcgagctttgcacagaccctacaggaaaccctgaaagaggagggcgccatctgcaatgcacatgcgccctctggtggtggcctgagtggcttcccttcagattcctttccctgcagttgttattacggaagcacacccgtggccaggaaaaaaagatttgccaagtgtcgtggatacatttatgacttcgtttatgaactgctttccctaaagcctccttcacaaggagaaaaggatgtcattatcttaggggattttggccaagggccagacagcaatgactatgatatcctgaggaaagaaaagttccaccacctgatccccgcgcacaccttcaccaacatcagcaccaagaaccctcaaggctcgaagtctctggacaacatctggatcagtaaaagcttaaagaaggttttcacaggtcactgggctgtggtgagagaaggcctcacgaacccttggattccggataactggtcttggggcggggtggcttctgaacactgcccagtgctagccgagttctacactgaaaaggactggagcaagaaggatgcccctcggaacggcagcggggtggccttggagcgaagtgaagccaacatcaagcacgagcgatga

SEQ ID NO: 133987 - DNA, 384 bp, Homo sapiens
ctgtgaaaaccttctttaagcttttactgatccagatgttgtccagagacttcgagccttgagggttcttggtgctgatgttggtgaaggtgtgcgcggggatcaggtggtggaacttttctttcctcaggatatcatagtcattgctgtctggcccttggccaaaatcccctaagataatgacatccttttctccttgtgaaggaggctttagggaaagcagttcataaacgaagtcataaatgtatccacgacacttggcaaatctttttttcctggccacgggtgtgcttccgtaataacaactgcagggaaaggaatctgaagggaagccactcaggccaccaccagagggcgcatgtgcattgcagatggcgccctcct

SEQ ID NO: 133988 - DNA, 2210 bp, Homo sapiens
atggccatgacagtgaacttagtgaatagctgcagggtgggtccagtgacggacttcttagaagctatgccagtgacccccgtgagagaagacaggactctgaaacaggctccagcagtggggctggagaacagaaaggaagcacccaagacacatgcgacagtggaatcagtgcgctggtgggaggcgaggaaggagttcgagcagcgggaaggatggaagtgctttggaccaagatgggcactgggtggaggaaggaataatgtgttccctttgggacctgctgctttctgcacggagctaaaccagccgaccctgcccaacatccgcaagtggaaggggccccggggatgctggaaggctgttgttgctgagaagccctcgaatcagctccagaaggtggcgctagggctctggcaccaagactctgtctccctctccgctgcagggagctgggtatgcaggattcctatgggacgcggctgccggcatggagctgagagacgcgggttcacaggagagctcgccaagcaacgggcacgggaagctggcgggccccagcccatacctcgggaggttcaagagcagttcttgaacctgacagtcacctcaaaccccagcccagggagtatctgccagctgagggttgggagcagcccctgtgttgaggctacaaggccctgtgccaccttgcacactgtgggaagtcacgacctgacccttgttaaccttcacctggcagccctgaccctcctggggagcgagaatcccagcaagaatcacagtgatggccaccggttggcgagctttgcacagaccctacaggaaaccctgaaagaggagggcgccatctgcaatgcacatgcgccctctggtggtggcctgagtggcttcccttcagattcctttccctgcagttgttattacggaagcacacccgtggccaggaaaaaaagatttgccaagtgtcgtggatacatttatgacttcgtttatgaactgctttccctaaagcctccttcacaaggtgtggcagaaatgccacctcctgctgtgggacaacaagggtcaagcagagcccaggggaatcccgcagagcccagctggggggcgagtgttctttcaggatttctactcgctttgcttggaaaatacttcataactatcccacttcctctaggtctgtctctcagagcaggagttgcattttattcatctctggatttcctgcatagagaaaaggatgtcattatcttaggggattttggccaagggccagagcagcaatgactatgatatcctgaggaaagaaaagttccaccacctgatccccgcgcacaccttcaccaacatcagcaccaagaaccctcaaggctcgaagtctctggacaacatctggatcagtaaaagcttaaagaaggttttcacaggtcactgggctgtggtgagagaaggccgcacgaacccttggattccggataactggtcttggggcggggtggcttctgaacactgcccagtgctagccgagttctacactgaaaaggactggagcaagaaggacgcccctcggaacggcagcgggggtggccttggagcgaagtgaagccaacatcaagcacgagcgattgattgacaccaaatccattgtgtccaccctggggacccagggaagggcacaagccaaaggaatgagccctgtggggttgaacccttcaagggcaaaaactgcccttttaaaattttaatcctcaaaaaccatcagcaacttgaaagcccttgcccccaagcccttcctctgtggacccattcaggaccctcccagtgggggtggccgttccccaggcgcgtaaccccacccaggtgggcaaagcagaaaaccctgcggggaagcggagacgcccttttatcctcctggatgcccacagacctgagcagcattgggctggctgtccgctgcctgactggatggcagcacaaggacaatatgagcagagggaggagaagaagggggtgctcaggctgcgggccacagtccagcagcgccagaagcactcatttctgaaccaccaggactatgacgttcctgctgcgcattacagaaagcttttaactgtgatcaggcactctgctcagatacattgagtggcgatttttagttttgttttgaaaaaataaacagattaacctgcaaaaaaaaaaaaaaaaaa

SEQ ID NO: 133989 - DNA, 551 bp, Homo sapiens
  misc_feature (1)...(551): n = a,t,c or g
nnnnnnnnnnnnnnnnnnnnnnnnnnnnnnnnnngaaggaaaatatcagacatagctttattgctgactcctgcccccttcagagcccatagtcacaggcctcaggggttttctgtaagtagagctctaggaaaccttgccagtctttctcactagtaagcagggctgagactgtgggatcttccttcatggctgccatccacagtttcagttttggggtgtggtctacacactcatttaacttcattgcttccagccgttcaaaccagggccagatgaggtaatcaatcatagagatagaattgccaccaaagaaggtcgtcttcttattagtcagaacctcctctagcttggtaaattctttacgaaattcttctggcaagctttctcataggggtcatccggcaacagcttcttccctgggtatgcttcatccaggtactcacaggtggtggcagactcgtagatcagctgaccctgactgttttccagaactgcaccagaccaaagggattttttcttaaagaccactcaggcntatttttcaggtg

SEQ ID NO: 133990 - DNA, 1629 bp, Homo sapiens
atgagatatggtagcagtcttaactgctacctgatctctcgatcagacttaggtgtcagactgatgggtgaagccagctgggcttctggatcgggcattgaacctggggtggacgccttcgtcctcttactttcgggaacaccctactctgtctatggagtagctgttttttcaccactttactttcttaataaacttgcttttgttttgcacggtggactcgctctgaattctttcttatgcgagatccaagaaccctctcttgggtctggatcaggacccctttcccgtaacatctatgcaggaggaataacatgtgttccatcttattttacaggaagcgcgcccccggggccggtcccggagggctcgatccgcatctacagcatgaggttctgcccgtttgctgagaggacgcgtctagtcctgaaggccaagggaatcaggcatgaagtcatcaatatcaacctgaaaaataagcctgagtggttctttaagaaaaatccctttggtctggtgccagttctggaaaacaggcagggtcagctgatctacgagtctgccatcacctgtgagtacctggatgaagcataccccagggaaaaagctgttgccgggatgaccccctatgaagaaaactttgccaaaaagatgatctttaaaatttgtttttctaagggtttgttgcctaaagaaaatttcaacctcctaattttgaaaaaacctgtttttttaaaaccaaaaaaaaggcttttacacctgagaccttctctggaatgttgttgcccttggatgatcaagggagcctccatgtccagagacatcgccaagtttacaccactaccctcacccagggcagccagtgaccggctgatggagcccaaggggaaggggtcattagaagcagaactgaagaaacttcaaaactctattcaagaaagcacacaggcctttgatgaacatttgaaaagactttttgaaaggagagtgaaggcagagatggttaccaaccaggaggaactgaaaataagtaaccttgcattttctttattgttggatgaagaattaagctctagagaaaaattcctgaacaactaccttacaaggaaacagcacgagaaaagccagacttcagaagctgttcggaaatctagagaagacctggatgtgtgcaaggagcactatgacaacttactggcagaagacaaagttatggatcgcagctttaaaaaggaattttctgaaattcctggtcatcaagtggatatactctacaaactttttaaacgccgaccaaggatttccaaacagaaaacgcactcagaaacaaccagcgttgtccctttcggagaactaccaggatctggcaagttgaataaggatgcctttgcccagttaatgaaagctatggatgagttggacaatattagtaacatgccagaaggcttggaccctttggtctggaatcatttctgcatgacaagacgagcaaaagtggaaaatgaacagaaagtaaagcagaaagcagctgacttattggaaatggcaactttcctccagaagagagttgaggaggaagagaaggtgcaacaggagattgagagagtgttccatgaactcatcctgtaa

SEQ ID NO: 133991 - DNA, 1221 bp, Homo sapiens
atgaacccattaggtgattacagcattgaacctggggtggacgccttcgtcctcttactttcgggaacaccctactctgtctatggagtagctgttttttcaccactttactttcttaataaacttgcttttgttttgcacggtggactcgctctgaattctttcttatgcgagatccaagaaccctctcttgggtctggatcaggacccctttcccgtaacatctatgcaggaggaataacatgtgttccatcttattttacaggaagcgcgcccccggggccggtcccggaggctacgatccgcatctacagcatgaggttctgcccgtttgctgagaggacgcgtctagtcctgaaggccaagggaatcagacaacaagatgtgcgaactcgatattttacacgactctctttaccaattctgccccgaattacacttaaaacgactcaacagcttaacgttggcttgcacgcattacttgactgtaaaactctcactcttaccgaacttggccgtaacctgccaaccaaagcgagaacaaaacataacatcaaacgaatcgaccgattgttaggtaatcgtcacctccacaaagagcgactcgctgtataccgttggcatgctagctttatctgttcgggcaatacgatgcccattgtacttgttgactggtctgatattcgtgagcaaaaacgacttatggtattgcgagcttcagtcgcactacacggtcgttctgttactctttatgagaaagcgttcccgctttcagagcaatgttcaaagaaagctcatgaccaatttctagccgaccttgcgagcattctaccgagtaacaccacaccgctcattgtcagtgatgctggctttaaagtgccatggtataaatccgttgagaagctgggttggtactggttaagtcgagcctacgccatagcccgaacgagcagctcagagcgttttgatatcatgctgctaatcgccctgatgcttcaactaacatgttggcttgcgggcgttcatgctcagaaacaaggttgggacaagcacttccaggctaacacagtcagaaatcgaaacgtactctcaacagttcgcttaggcatggaagttttgcggcattctggctacacaataacaagggaagacttactcgtggctgcaaccctactagctcaaaatttattcacacatggttacgctttggggaaattatga

SEQ ID NO: 133992 - DNA, 1075 bp, Homo sapiens
aaaataaaagcatgctattattcatattagtgaaggaaaaatatcagacatagctttattgctgactccttgccccctttcagagcccatagtcacaggcctcagggctggttctgtaagtagagctctagggaaaccttgcccagtctttctcactagtaagcagggctgaagactgtgggatcttcctttcatggctggccatccaacaggtttcaagtttgggagtgtggtctaacaaactcattttaaacttcaattgcttcccagcccggttcaaaacccaggccccagatgagggtaatcaatcattagagataggaattgccaccaaaggaagggtcgtcttccttattaagtcaagaaccctcctcctaagcttggtaaaaatctttaacgaaaattctctcttttagggccaggcataggtcttctttatttttgggctttctaataaaggcttccctaccaggggatggcaaccttaggaaaaacaactcctaaggatcatcccttttttcttggcaagctttctcataagggggtcatcccgcaacagcttctttccccggggtatgcttcatcccaggtacttcacaaggtgatggcagactccgtagatcagctgacccctgactgttttcgcagaactggcaccagaccaaaagggatttttctaaaggaaccactcaggcttatttttcagggttgatattgatgacttcatgcctgattcccttggccttcaggactagacgcgtcctctcagcaaaacggggcagaacctcatgctgtagatgcggatcgaagccctccgggaccggccccgggggcgcgcttcctcgaagcaccacccgctccgtcccaaggcttcacgacttcagagcctgtggcccgacctcatggctcactcaccggtccagagcgttctctccaaaggctcctgttcagctcagtgtgtttcagtttcctcacctttacagggacagttgcagacaagatctgaggccaattctccaagtggcttttattggctttacaagtcaagtttgattcccagcaacgtcccctgcac

SEQ ID NO: 133993 - DNA, 564 bp, Homo sapiens
  misc_feature (1)...(564): n = a,t,c or g
aggagcnnnnnnaaatgaaattganggtcgtgaaacggccgagctgaccctgacacccattaggctcagcaaattaccaaggctgtactgctgcaaagcttcacagacagcctccattacttcaatcaagcccaaatttcatcctcatctgttacctatctcggcataattctcataaaaacacacgtgctctccctgccaatcgtgtctgactgatctctcaaaccccagcaccttctacaaaacaacaactcctttccttcctaggcatggttagcgtggtcagaattcttacacaagagccaggaccacaccctgtagcctttctgtgcaaacaatttgaccttactgttttagcctagccctcatgtctgcgtgcagcggctgccactgctttaatacttttagaggccctaaaaatcacaaactatgctcaactcactctctacagttctcataacttccaaaatctattttcttcctcatacctaacgcatatactttctgctccccagctccttcagctgtactcactctttgttgagtctgccacaatcaccattg

SEQ ID NO: 133994 - DNA, 451 bp, Homo sapiens
  misc_feature (1)...(451): n = a,t,c or g
tttcgcactggcgaanncggcacgagnnnnnnnnnnnnnnnnnnnnnnnnnnnnnnnnnnnnnnnnnnnnnnnnnnnnnnnnnnnnnnnnnnnnnnnnnnnnnnnnnnnnnnnnnnnnnnntttggtgccgtcactcggatcgggggacctcccttgggaaatcaatccccgtcctcctgttctttgctccatgagaaagatccacctacgacctcaggtcctcagacagaccagcccaagaaacatctcaccaatttcaaatccggtgcagctaccaggggaactgccaggacttcaaagcccacaaccaaaagccagaaaacactaccaagtacaagccccggacactggacccagagcacaccctgggcatctgctctgagatcctctccctggacagagacagctgctccttcagaaacagaggagaccctgaacacaggcaggcct

SEQ ID NO: 133995 - DNA, 481 bp, Homo sapiens; identical to SEQ ID NO: 132706

SEQ ID NO: 133996 - DNA, 496 bp, Homo sapiens
  misc_feature (1)...(496): n = a,t,c or g
tttccgatgggcacagctttattctggaacggtgaacccagtgggnaggatcctgcaggcggacggcagttggggtactatagatgactaagtagggtccagtccatcgaggttgtagagtttgaggggtcaggttcttaataagaactgatcgtccagctagggtgtcttcatatagttgggaatccgatttgaaattcatgagatgttccttgggctggttggtctgaggactgaggtcgtaggtggatctcctcacggagtggncnnaaggacaggggacccgtctcctgaaggagtcctcctgtcccgggtcttcagcaccaaatgtcacacgcgtccatgtgaagagactaccaaacaggctttgtgtgagcaacaacgctgtttatttcaccagtttgatagcatttgagctgaagacatctcttcctttttctgcaaaatatctcagtagctaatatgttgctcttcatcactcaataagcagcaaaac

SEQ ID NO: 133997 - DNA, 561 bp, Homo sapiens
  misc_feature (1)...(561): n = a,t,c or g
agagagtcagcgaagggagataagggtggggccgttttataggatttgggtaggtaaagganaattacagtcaaagagggtttgttctctggcaggcaggagtgggggttgcaaggtgctcagtgggggtgatttttgagccaggatgagccaggaaaaggactttcacaaggtaatgtcatcacttaaagcaaggaccggccatttacacttcttttgtggtggaaggtcatcagttaaggtggggcagagcatattcacttcttttgtgattcttcagttacttcaggccatctgggcatatacgtgcaagtcacaggggatgcgatggcttggcttgggctcagaggcctgacattcctgccgtcttatattaataagaaaaataaaacaaaatagtgttgaagtgttggggtggcaaaaatttttggggggtgatatggagagagaatgggcgatgtttctcagggctgcttcgagcgggattaggggcggcgtgggaaccttccactgtgagagttacccgaagctcggcatccgtgatggtctagggggctcacg

SEQ ID NO: 133998 - DNA, 1677 bp, Homo sapiens
atggccccacccctatctccctttgctgactctcttttcggactcagcccacctgcacccagagacaaaggagacacgttttatccgtggacccaaaactccggtgcccgtcacggactgggaaggcagccttcccttggtgtttcatcattgcagggacgcctctctgatcattcacccacgtttcagaggtgtcagaccacgcagggacgcctgccttggtccttcacccttagtggcaagtcttgcttttctgaggaaggggcaatcccaaccccaagtgtcgctgagtctttccagtcttccttttctacagacccatctgacctttcccctcctccccagcctgctcatcgccaggccgagctaagtcccaattcttcctcagcctccactcctccaccctataatcctcctaccacctcccctcctcacacccggtccggcttacagtttagttccgcaactagctcttccccacctgcccaacaatttcctcttagagaggtggctggagctgaaggcatagtcaacgcacatgtacctttttctctatcagacctctctcagatcagtcagcatttaggctctttctcatcagaccccactaaatatatacaggaattccgatatctaactctgtcctacaacttaacctggagtgacctaaatgtcatcctgacttctaccctctccccagatgaacgggaaagagtttttcctgtatcccaatctcacgctgataaccgtcggcttcatgagccagacctccaggaaggcattagagcagttccccgagaggatcccccagtggaactaccaggcaaattccccaggaaaaaacttcaaaaattagaatctggccctcaaaccccacaacaggaattaatcaaccttgccttcaacgtgtacaataatagagaggaagcagccagacggcaatgcatttctgagttacaattacttgcctccactcagcagaagactgacaccgcccaatcgcctcagaagccaacagaaccatcacagatgctctggataactctcacagtggaggtggctgccgctgctttaatacttttagaggccctcaaaatcacaaactatactcaactcactctctacagttctcataacttccaaaatctattttcttactcatacctgacgcatatgctttctgcttcccggctccttcagctgtattcactctttgttgagtctcccacaattaccattgttcctggcccggacttcaatccggcctcccacattattccggataccacacctgaccctcatgactgcatctctctgatccacctgatgttcaccccatttccccacatttccttcttccctgtttctcaccctgatcacacttggtttattgatggcagttccaccaggcctaatcgccactcaccagcaaaggcaggctatgctatagtatcttccacatctatcattgaggctaccactctgcccccctccactacctctcagcaagccgaactagttgccttaactcaagctctcactcttgcaaaggactacgcgtcaatatctatactgattctaaatatgcctttcatattctgcaccaccatgcggtcatatgggctgaaagaggttttctcactacacaagggtcctccatcattaatgcctctttaa

SEQ ID NO: 133999 - DNA, 3504 bp, Homo sapiens; identical to SEQ ID NO: 119696

SEQ ID NO: 134000 - DNA, 1710 bp, Homo sapiens; identical to SEQ ID NO: 120826

SEQ ID NO: 134001 - DNA, 1566 bp, Homo sapiens; identical to SEQ ID NO: 117138

SEQ ID NO: 134002 - DNA, 798 bp, Homo sapiens
atgattcaagagcatgcagacaaacaggtgcagaggctgcagggagtgcttttgggctccatccccacagcagcatcaagggcccgcctgcacccaggtgaaataaacaaccatgttgctcatacagagcctgtttggtggtctcttcacatggacgcgtatgaaatttggtgccgtggctcggatcggaggacatcccttgggagatcaatcccccttcctcctgctctttgctccctgagaaggatccacctacgacctcaggtcctcagatcgaccagcccaagaaacatctcaccgatttcaaatccgggacacctctctgattatacacccacgtttcaagggtgtcagaccatgcagggacgcctgccttggtccttcacccttagcggcaagtctcgcttttctggggaaggggcaactcaacgccaatatcccatcccacagcaagctttgaaaggattaatgcctgctatcactcgcctgctacagcatggccttttaaagcctataaactctccttaccattcccccattttacctgtcctaaaaccagacaagccttacaagttagttcaggatctgcgccttatcaaccaaattgttttgcctatccaccccatggtgccaaacccatatactcttctatcctcaatacctgcctctacaacccattattctgttctagatctcaaacaagctttctttactattcctttgcacccttcatcccagcctctcttcgcattcacttggactgaccctgacacccatcaagctcagcaaattacctag

SEQ ID NO: 134003 - DNA, 2628 bp, Homo sapiens
atggaaggccttgccaagaagacaacagaacaaagacaggaaggacgtgagggagtgaaccatggaatatttgcagctgtgacaaccagaaatgtctccagatattggcaaatatcccctggaggagacacaaaatcacccctgatagaaaaccctcggcacacaggcatctacagctgcattcatggagtgcacattgaagaaaagaagaagtctccagacttcaatctgacgggatcccagagcaacatgttaaaactcctccggtcagccaaaaacatttccagcatgtccaacatgaactcctcaagaatggactcacccaaaagagctgctgacttcatccaaagaggttccctcatcatggacatggtttcagataaggggaatttgatgtactcagacaacaggtcctttcaggggaaagagagcatttttggagacaacatgaacgaactccaaacatttgtggccaaccggcagaaggataacctcaataactatgtattccagggacaacatcctcttactctcaatgagtccaaccctaacacggtggaggtggccgtgagcacagaatccaaagcgaactctagaccccggcagctgtggaagaaatccgtggattccatacgccaggattcactatcccagaatccagtctcccagagggatgaggcaacagcagagaataggacccactccctaaagagccctaggtatcttccagaagagatggcccactctgacatttcagaaacgtcaaatcgggccacgtgccacagggaacctgacaacagtaagaaccacaaaaccaaggacaactttaaaaggtcagtggcctccaaataccccaaggactgtagtgaggtcgagcgcacctacctgaaaaccaaatcaagctcccctagagacaagatctacactatagatgtgcgaagcctggctggccgatggggaacccttattgacatcatgaagaccaaaagctttaggagacaaggtaacccaaccaccggggagcagggttaccaaaagggacgtggcccagaaaaaaaggccctttctttccacaagaaaagccttagggttagcccgccagcattccttcgaaaaaaccatggggaaaaaaactatgggggcgcgacccttatcaaggccgtctcggggcgcataagctttagagcagcgggaccggtttttgggggggtcccaaccccaagtgttgctgagtctttccagtcttccttttctacagacccatctgacctttcccctcctccccagcctgctcatcgccaggccgagctaagtcccaattcttcctcagcctccactcctccaccctataatcctcctaccacctcccctcctcacacccggtccggcttacagtttagttccgcaactagctcttccccacctgcccaacaatttcctcttagagagatgaacggaaaagagtttttcctgtatcccaatctcacgctgataaccgtcggcttcatgagccagacctccaggaaggcattagagcagttccccgagaggatcccccaatggaactaccaggcaaattccccagttgaagggcttaaaaaagcagcttacaaagctgttaattatgacaaacttaaaaaaactacccaaggtaaagatgaaaacccagcccagttcatggcccgcttagcagcaaccattagatgctataccgccctagacccagaggggccagaaggccgccttattcttagtatgcattttatcacccaatccactcctgacattaggaaaaaacttcaaaaattagaatctggccctcaaaccccacaacaggaattaatcaaccttgccttcaaggtgtacaataatagagaggaagcagccagacggcaatgcatttctgagttacaattacttgcctccactgtgagacaaaccccagccacatctccagcacacgagaacttccaaacgcctgaaccgcagcagccaggcgttcctccagaacctcctcccccaggagattgctacaagtgccagaaatctagccaccaggccaaggaatgcccgcagcccgggattccttctaagccacgtcccatctatcttctcggcttagcagcagaagacttgacaccgccaatcgcctcagaagccaacaggaccatcacagatgctctggataactctcacagtggaggatgtgtcttggaaatgaactataatgaaggacgaccgaagatagctgtcattcaccgcctgggatggcaacgagtgtttgtaagggtccgaggggcatctcccaataaccaagcgttggtcatccctgtgggagtggaggaaagggttatcggaggtggggtcttgcaagagaaacttggtccggtgcctacgaactgctattcgatggggggggaagctggggtcattcactgcaaggggcatcaaaaggcatcagatcccattgctctaggcaacgcttatgctgataaggtggctagacaagcagctagctctccaacttctgtccctcacggccagtttttctccttcacattggtcactcccacctactcccctgctgaaacttccacctatcaatctcttcccacacaaggcaaatag

SEQ ID NO: 134004 - DNA, 585 bp, Homo sapiens
atggcaactgcagttcacttacccgcttctcaacccggtacgcaccagaaaatcattgatatggccatgaaggcgttggatgccgggcaacagcccgcattatgggcgttggcctcaacagattttacgtcacttaaaaaactcaggccgcagtcggtaacctcgcgcaacagccgggcagtgacgtcatcgtctgaacgaaagggagggacgcctgattattcacccacgtttcaaaggtgtcagaccaccaggagcttgtacacgtgccggaaatctggccaccaagccaaggaatgcccgcagcccggattcctcctaagccgtgtcccatctgtgcgggaccccactgaaaatcgactgttcaactcacctggcagccactcccagagcccctggaactctggccaaggttctctgactgactccttcccagatcttctcggcttatcggctgagactgacactgcccgatcgcctcggaagccccgtagaccatcacggacccgagcttcagtttctcaattcatccaaaaccatatccaggccatcaccatcattctatatgacaaatgtttcttctaa

SEQ ID NO: 134005 - DNA, 462 bp, Homo sapiens
attattgatggcagttccgccaggcctaatcgccactcagcagcaaaggcaggctatgctacagtatcttccacatctgtcattgaggctgaaagaggtttcctcactacgcaagggtcctccatcattaatgcctctttaataaaagctctgctcaaggctactttacttccaaaggaagctggagtcattcactgcaaaggccatcaaaaggcgtcagatcccattgctctagacaacgcttatgctgataaggtggctagacaagcagtattttacattgtgtggaatcatgtaccaaaaataacaggacttatggaggaaatggggctggatgcagacctttcaaaacaacctaaacttacacaactggtggaaggagaaggtccttctcagaaagttcctatgttcttaaatatgattcatcgaagggtgaaagaactaagagtagcagcagaatag

SEQ ID NO: 134006 - DNA, 825 bp, Homo sapiens
atggtctatggggcttccgaggagatcaggcagtgtcagtcttcagccggtaagccaagaaggagtcagtcagagagccttgggccagagttccaggggctctgggagtggctgccaggaaagcgggacttgccgctaagggtgaaggagaaggggttgaggggtacttgcccctgccccaggaaagcgggacttgctgctaagggtgaaggagaaggggttgaggggttcttgcccctgccccaggaaagcagagaagggaacaggaggacaggagactggtctcctaagggaggtcccccgatccgagtcacggcaccaaatttcatgcgtgtctgtgtgaagagaccaccaaacaggctttgtgtgagcaacatggctgtttatttcacctgggtgcagaaaaagaaatcatctttggcattttcttcagttgtcacatcagatcttaaaagcaagaagagaagactttcagggaagagcctggagaccagctcggcgtccctgatggtctacggggcttccgaggcgaccgggcagcgtcagtcttcagccgctaagccgagaaggagtcagtcagagagtcttgggccagagttccaggggctccgggagtggctgccagaatccaagcctcaatcattatttaaggagccagagaggagcattaagaaaacatttcaaagatctttgaaggcttctgaggaccgatcagagattgaccttcagcatcacccagacagaggaactcttgctgccagtgtagtcttggtaactgaatcattacagaaaacatactccataacagatggagatgtttcctaa

SEQ ID NO: 134007 - DNA, 1795 bp, Homo sapiens
catgggcttctaaaacctataaactctccttacaattcccccattttacctgtccaaaaaccggataagtcttacagattagttcaggatctgcgtcttatcaaccaaattgttttgcctatccaccctgtggtgcccaacccgtacactcttttgtcctcaataccttcctccacaactcactattccatgcttgatcttaaagatgcttttttcactattcccctgcacccctcgtcccagcctctctttgctttcacctggactgaccctgacacccatcagtcccagcagcttacctgggctgtgctgccgcagggtttcagggacagccctcattacttcagccaagctctttctcatgatctactttccttccacccctccgcttctcaccttattcaatatattgatgaccttcttctttgtagcccctcctttgaatcttctcaacaagacacacttctgctccttcagtgtttattctccaaaggatatcgggtatccccctccaaagctcaaatttcttctccatccgttacctacctcggcataattcttcataagaacacacatgctctccctgccgatcgctggccatcatgtctccgtgcagccgctgctgctgccctaatacttgtagaggccctcaaaatcacaaactatgctcaactcactctctacagctctcataatttccaaaatctattttcttcctcacacctgacacatatactttctgctccccggctccttctgctatactcactctttgttgagtctcccacaattaccattgttcctggcctggacttaaatgcggcctcccacattattccggataccacacctgaccctcatgactgcatctctctgatccacctgacattcacatttccccaaatttccttcttccctgtttctcaccctgatcacacttggtttattgatggcagttccaccaggcctaatcaccactcaccagcaaaggcaggctatgctatagtatcttccacatctatcattgaggctaccgctctgcctccctccactacctctcagcaagccgaactagttaccttaactcaagccctcactcttgcaaaaggactacgcatcaatatctatactgattctaaatatgcctttcatattctgcagcaccatgcagtcatatgggctgaaagaggtttcctcactacacaagggtcctccatcattaatgcctctttaataaaaactctgctcaagaccactttacttccaaaagaagctggggtcattcactgcaaggggcatcaaaaggcatcagatcccattgctctaggcaatgcttatgctgataaagtggctagacaagcagctagctctccaacttctgtccctcacagccagtttttctccttcgcttcagtcactcccacctactcccccacggaaacttccacctatcaatctcttcccacacaaggcaaatggttcttagaccaaggaaaatatcttcttccagcctcacaggcccattctattctgtcatcatttcataacctcttccatgtaggttacaagccgctagaccgtctcttagaacctctcatttcctttccatcatggaaatctatcctcaaggagatcacttctcagtgttccatctgctattctactacccctcagggattgttcaggccccctcccttccctacacatcaagctcggggatttgcccctgcccaggactggcaaattgactttactcacatgcctcgagtcagaaaactaaaatatcttagtctgg

SEQ ID NO: 134008 - DNA, 1796 bp, Homo sapiens
gctggccatcatgtctccgtgcagccgctgctgctgccctaatacttgtagaggccctcaaaatcacaaactatgctcaactcactctctacagctctcataatttccaaaatctattttcttcctcacacctgacacatatactttctgctccccggctccttctgctatactcactctttgttgagtctcccacaattaccattgttcctggcctggacttaaatgcggcctcccacattattccggataccacacctgaccctcatgactgcatctctctgatccacctgacattcacatttccccaaatttccttcttccctgtttctcaccctgatcacacttggtttattgatggcagttccaccaggcctaatcaccactcaccagcaaaggcaggctatgctatagtatcttccacatctatcattgaggctaccgctctgcctccctccactacctctcagcaagccgaactagttaccttaactcaagccctcactcttgcaaaaggactacgcatcaatatctatactgattctaaatatgcctttcatattctgcagcaccatgcagtcatatgggctgaaagaggtttcctcactacacaagggtcctccatcattaatgcctctttaataaaaactctgctcaagaccactttacttccaaaagaagctggggtcattcactgcaaggggcatcaaaaggcatcagatcccattgctctaggcaatgcttatgctgataaagtggctagacaagcagctagctctccaacttctgtccctcacagccagtttttctccttcgcttcagtcactcccacctactcccccacggaaacttccacctatcaatctcttcccacacaaggcaaatggttcttagaccaaggaaaatatcttcttccagcctcacaggcccattctattctgtcatcatttcataacctcttccatgtaggttacaagccgctagaccgtctcttagaacctctcatttcctttccatcatggaaatctatcctcaaggagatcacttctcagtgttccatctgctattctactacccctcagggattgttcaggccccctcccttccctacacatcaagctcggggatttgcccctgcccaggactggcaaattgactttactcacatgcctcgagtcagaaaactaaaatatcttagtctggacataattcctcggtttggccttcccacctctatacagtctgataacggaccagcctttactagccaaatcacccaagcagtttctcaggctcttggtattcagtggaaacttcatatcccttaccatcctcaatcttcaggaaaggtagaacggactaatggtcttttaaagccacacctcaccaagctcagcctccaacttaaaaaagattggacagtacttttacctcttgctcttctcagaatcagagcctgtcctcgagatgctacagggtacagtccatttgaacttttatatggacgcactttcttgcttggccccagcctcatcccagacaccagccctctaggtgactatcttccagtcctccagcaggctagacaggaaattcaccaggcttctaatcttctcttacctactccagatcgccagccatatgaagacaacctagctggacgatcagttgttgttaagaatctgacccctcaaactctacaacctcgatggacgggaccctacttagtcatctatagtccccgactgccgtccgcctgcaggatcctccccactgggttcaccattccagaataa

SEQ ID NO: 134009 - DNA, 629 bp, Homo sapiens; identical to SEQ ID NO: 127043

SEQ ID NO: 134010 - DNA, 512 bp, Homo sapiens
tccgataacggatgagcctttactagttaaattacccaagcagtttctcaggctcttggtattcagtggaaccttcaaatcccttaccatcctcaatcttcaagaaagaattagagcctgtcctcgagatgctacagggtacagtccatttgaacttttatacggacgcactttcttactcagccccaaccttgtcccagacaccagccctctaggtgactatcctccagtcctccagcaggctagacaggaaattcgccaggctgctaatcttctcttgcctactccagattctcaaccatatgaacacaccctagctggacaatcagttcttgttaagaatctgacccctcaaactctacaacctcgatggactggaccctacttagtcatctatagtaccccaactgccgtccacctgcaggatcctccccactgggttcaccgttccagagtaaagctgtgtccatcagtcagccagcctaatccccctcttcctcctggagtcacaa

SEQ ID NO: 134011 - DNA, 619 bp, Homo sapiens
cctccactgtgagagttatccagagcatctgtgatggtcctgttggcttctgaggcgattggcggtgtcaagtcttctgctgctaagccgagaagatagatgggacgtggcttagaaggaatcccgggctgcgggcattccttggcctggtggctagatttctggcacttgtagcaatctcctgggggaggaggttctggaggaacgcctggctgctgcggttcaggcgtttggaagttctcgtgtgctggagatgtggctggggtttgtctcacagtggaggcaagtaattgtaactcagaaatgcattgccgtctggctgcttcctctctattattgtacaccttgaaggcaaggttgattaattcctgttgtggggtttgagggccagattctaatttttgaagttttttcctaatgtcaggagtggattgggtgataaaatgcatactaagaataaggcggccttctggcccctctgggtctagggcggtatagcatctaatggttgctgctaagcgggccatgaactgggctgggttttcatctttaccttgggtagtttttttaagtttgtcataattaacagctttgtaagctgcttttttaagcccttcaa

SEQ ID NO: 134012 - DNA, 1755 bp, Homo sapiens; identical to SEQ ID NO: 119697

SEQ ID NO: 134013 - DNA, 579 bp, Homo sapiens
tcaatttgcaaataggaccgaagagctccctgttcccctcatgacaccaacacgacaaaaaagagttattccactaattcccttgcttgttggtttaggactttctgcctccactattgctctcggtactggaataggaggcatttcaacctctgtcacgaccttccatagcctctctagtgtcttctctgctagcatcacagacatatcacaaactttatcagtcctccaggcccaagttgactctttagctgcagttatcctccaaaaccaccgaggccttgacttactcactgctgtctggtctgcagatctcgaagcacaaaggtccttattacttatatttcttcttgtgccattattcacttttagatctccagtgtcctcatactgagtggcatttgaacaacttcctttttggcattttagcaatactccctgagaaaccaacaggatcaaggagatcaaagtcaaagtgagaataccattcacggttccagatattcccagtaagattttataccagtgcaacgtcactgaataatcctccaccttcaagtaggctccggtgtctgtcat

SEQ ID NO: 134014 - DNA, 1158 bp, Homo sapiens; identical to SEQ ID NO: 120813

SEQ ID NO: 134015 - DNA, 1287 bp, Homo sapiens; identical to SEQ ID NO: 114506

SEQ ID NO: 134016 - DNA, 1296 bp, Homo sapiens; identical to SEQ ID NO: 119702

SEQ ID NO: 134017 - DNA, 976 bp, Homo sapiens
atggatgaggagaaaagggaacacttaaatgctcttggtcgaagggcactgggtgaaggtccaatgtatcagtgcacacgggggagtggggcggggaattatctcaccacctacgtacgggagcccgaacaaaaggctctggccattttatggacccaggggtggggatggggccctgtaaataacagtgaaaggttgctcgtagatactcaacgttttctcatacaccatgaaaatcgaacctcctcctctgtgcagttacctcatcagtccccattacaacctctgatggctgtggccctagctggatccctaggagtctgggtacaagacacccctttcagcactccttctcatctttttactttgcatctccagttttgcctcgcacaaggtgtcttcttcctctgtgtatcctctacctacatgtgtctacctgctaattggacaggcacatgcacactagttttccttactcccaaaattcaatttgcaaataggaccgaagagctccctgttcccctcatgacaccgacacgacaaaaaagagttattccactaattcccttgcttgtcagtttaagactttctgccttcactattgctctcggtactggaatagcaggcatttcaacctctgtcacgaccttccgtagcctctctaatgacttctctgctagcatcacagacgtatcacaaactttatcagtcctccaggcccaagttgactctttagctgcagttgtcctccaaaaccgccgaggccttgacttactcactgctcccccaactatctttttatctggatgttcatgtgtaccctttattaatatcataaactggtaaacattgagtgtttctccaagttctctgagcctctctatcaaattaatcaagtgtgatgaggggtcgagggaaccctcaatctgtagctggttggtcagcagttccagaggcccagacttgacactggcat

SEQ ID NO: 134018 - DNA, 1187 bp, Homo sapiens
atggcatcatctgctcagcttctggggagctctcaggaaacttacaatcatagcaaaaggcaaagagggggtgagatgtctcacatggctggagctaggaggaagagagagagaggagagatgctacacacttttaaacaaccagatctcatgaggtggtcttcagtatgtcggaagaacaaagagaaggttggaaattccaggaaaagaagaaatgttagatattgtttctccagaaagttcaatggcactagtaaagttttcgagagctggcaagtggtggtggtgggtgaaataaacagccatgttgctcacacaaagcctgttcggtggtctcttcacacagacgcgcatgaaatttggtgccgtgactcagatcggcggacctcccttgggagatcaatcccctgtcctcctgttctttgctccatgagaaagatccacctacaagctcaggtcctcagaccgaccagcccaaggaacatctcaccaattttaaatcggagaaaaaggagacacgttttatccgtggacccaaaactccggcaccggtcatggactagggaaggcagccttcccttggtgtttaacctttgcagggatgcctctctgattattcacccaggtttcagaggtgtcagaccacgcagggacacctgccttggtccttcacccttagcagcaagtcccacttttctgggggaaggggcaagagcttgctacaagtgccagaaatctggccaccaggccaaggaatgcctgcagcccaggattcctcctaagctgtgtcccatctgtgcgggaccccgctggaaatcggactgtccaactcacctggcagccactcccaaagcccctggaactctggccaaaggctctctgactgactccttccccagatcttcctcagcttagcagctgaagactgatgctgcctgatcgccttggaagccccctggaccattacggatgctgagctttggataactcttacagtagaggattcccaactatatgaagacaccctagctggacgatcagttcttattaagaacctgacccctcaaactctacaacctcgatggactggaccctacttagtcatctatagtaccccaactgccgtcctgcctgcaggatcctccccactgggttcaccgttccagaataaagctgtgcccatcgga

SEQ ID NO: 134019 - DNA, 1241 bp, Homo sapiens
aagtgtctacctagaccaagaggtattttagtttcctgactcggggcatgttgagtaacgctgatttgccagtcctaggcggtggcaaatccctgagcttgatgtgtagggaagggagggggcctgaataatccctgaggagtagtagaatagcagatggaacactgagaagttatttccttgaggatacatttccacgatggaaaggaaatgagaggttttaagaggcgggctagtgacttgtactatagcatagcctgcctttgctggtgtgtggcgattaggcctggtggaactgccattaataaatcaagcgtgatcagggtgaggagcaggaaagaaggaaatatgcggaaatggggtgaatgtcaggtggatcagagagatacagtcatgagggtcaggtgtggtatccagaataatgtgggaggccggactgaagtctgggccaggaacaatgggtaattgtgggagactcaacaaagagtgagtacagctgaaggagccaggggaacagaaaagtatatgcgtcaggtgggaggaagaaaatagattttggaaattatgagagctgtagagagtgagttgagcatagtttgtgattttaagggcctctaaaactattagggcggcagcagctgctgcacggagacatgatggccagcctaaaacagtaaggtcaagttgtttggacaaaaaggctacaggacgcgatctcggtccttgtgtaagaaagaagagagtaaaaagaggccgcttaccggatttgaaattggtgagatgtttcttgggctggtcggtctgcaggttagcaccacctgcctggctgacctggctcacaggtgcgcggttgccaggtaacgcttggtatctcagggtgccttcagaagcccagcagttggcttggggaggtgtggcacggcctggggcgatggtgggggcagggcagatggagtcactatcagggcagctggcagcaccactactcctcacctctgtagcaagtggaaacaagccggctcgccctgctgacaagtcactctgttaatctcacctccttttcctgtagtttgaattggcttcactcagtcacctgccactcacctcctgctgtgtggcccggttcctgtcagaccacagactggtactggtcctcttcactgatgatatgattttatacctagaaaatcctgaaggctctgccaaaaggctccttgagctgataaatggcttcagtgaag

SEQ ID NO: 134020 - DNA, 1778 bp, Homo sapiens
cttgatgtgtagggaagggaggaggcctgaacaatccatgaggggtagtagaatagcagatggaacactgagcagtgatctccttgaggatagatttctatgatggaaaggaaatgagaggttctaagagacgggctagcggcttgtaacctacatggaagaggttatgaaatgacgacagaatagaatgggcctgtgaggctggaaggatatgttttccttggtctaagaaccatttgccttgtgtgagaagagactgataggtggaagtttcagcaggggagtaggtgggagtgaccgatgtgaaggagaaaaactggccgtgagggacagaagttggagagctagctgcttgtctagccaccttatcagcacaagcgttgcctagagcaatgggatctgatgccttttgatgccccttacagtgaatgaccccagcttcctttggaagtaaagcggccttgagtagagttattattaaagaggcattcatgatggaggacccttgtgtagtgagaaaacctctttcagcccatatgaccgcatggtggtgcagaatatgaaaggcatatttagaatcagtatagatattgacgcgtagtccttttgcaagagtgagggcttgagttaaggcaactagtttggcttgctgagaggtagtggaggggggcagagtggtagcctcaatgatagatgtggaagatactatagcatagcctgcctttgctggtgagtggcaattaggcctggtggaactgccatcaataaaccaagtgtgatcagggtgagaaacagggaagaaggaaatgtggggaaatggggtgaacgtcaggtggatcagagagatgcaatcatgagggtcaggtgtggtatccagaataatgtgggaggcctccagaaaagtgggaaaggggtcggggcacagagatacgaggtcggggcatagaaataagggattggggcacagagatataagaggttggggcacagaaataagggatcggggcacagagatatatggggttagggtacttgcccctccccgagcaaagaacaggaggacaggggattgatctcccaagggaggtcccctgatctgagtcacagcaccaaatttcactcgcatccgtgtgaagagaccaccaaacaggctttgtgtgagccataaagctgtttatttcacctgggtgcaggtgggctgagtccgaaaagagagtcagcgaagggagataggggtggggccgttttataggatttgggtagataaaggaaaaaggggggttgttctctttctcagcaagtaacttgtggaaacaagttacttcctccttcctttgttctcctctgcctttgtctcttttgaaaagttctaagttgctagccaatcgggacaaatacagaatgtgtggtcctgttccagccaatggaaaccggacacagcagtagagtaaacatgtcaggttataaatgaccctgtctcctttgttcggtgtactctcgtggcaaaactgctggcgagtgtaccctttctgcctgttgtttggtggccccctttcagtgatggatccagaaggcagcccaagtggctgcctaattctcttggactgggggctgactctgttactctgtctactggtggggtattccaacccaatgtgcgtggacttaattgcaatggaaaaatagtcatggggagatgtcccttggagttcgttcccattcccgctacttcccccatcagcaggaagaagccagagcgatcgacggccttttcccat

SEQ ID NO: 134021 - DNA, 1962 bp, Homo sapiens
agcccaagaaacatctcaccaatttcaaatctgatctattcggcttagcgactgaagattgacgctgcccgatcgcctcggaagtcccctggaccatcacagaagccgagcttcgggtaactctcacagtggagggtaagtccatcccctgtttaatcgatacgggggctacccactccacgttgccttcttttcaagggcctgtttcccttgcccccataactgttgtgggtattgacggccaagcttcaaaacccctgaaaactcccccactctggtgccaacttggacaacactcttttatgcactcttttttagttatccccacctgcccacttcccttattaggccgaaatattttaaccaaattatctgcttccctgactattcctggagtacagctacatctcattgctgcccttcttcccaatccaaagcctcctttgtgtcctctaacatccccacaatatcagcccttaccacaagacctcccttcagcttaatctctcccactctaggttcccacgccgcccctaatcccacttgaagcagccctgagaaacatcgcccattctctctccataccaccccccaaaaattttcgccgctccaacacttcaacactattttgttttatttgtcttattaatatcagaaggcaggaatgtcaggcctctgagcccaggccaggccatcgcatcccctgtgacttgcacgtatacatccagatggcctgaagtaactgaagatccacaaaaggaagtaaaaacagccttaactggatgacattccaccattgtgatttgtttcctggccccaccctaactggattcaatgtactttgtaatcttcccccacccttaaggaaggttctttgtaattctccccacccttgagaatgtactttgtgagatccacccctgcccaccagagaacaaccccctttgattgtaattttttattaccttcccaaatcctataaaacagccccacccctatcttccttcactgactctcttttcggactcagcccacctgcacccaggtgaaataaacagccatgttgctcacacaaagcctgtttggtggtctcttcacacagatgtgcatgaaatttggtgccgtgactcggatcgggggacctcccttgggagatcaatcccctgtcctcctgttctttgctccatgagaaagatccacctacaacctcaggtcctcagactgaccggcccaaggaacatctcatcaattttaaatcggcagctgaagactgacgctgcccaatcgcctcggaagcctacaggatcatcacagacgctctgggtaactctcacagtggaggcatgctttaaaaggattaaagtctgttatcactcgcctgttatagcatggccttttaaagcctataaactctccttacaattcccccattgtacctgtcctaaaaccagacaagacttacaggaaggtggagtcattcactgcaaagaccatcaaaaggtgtcagatcccattgctgtaggcaaggcttatgctgataaggtggctagacaagcagctagctttccaacttctgtccctcacggccagtttttctccttcatatcagtcactcccatctactcccctgctgaaacttccacctatcaatctcttcccacacaaggcaaatgtttcttagaccaaggaaaatatctccttccagcctcacaggcccattctattctgtcgtcatttcataacctcgtccatgtaggttacaagccactagcccatctcttagaaactctcatttcctttccatcctggaaatctatcctcaaagaaatcacttctcagtgttctatttgctattctactaccgctcggggattgttcaggcttccttcctttcttacacatcaagctcgaggatttgcccctgcccaggactggcaaattgactttactcacatgccctga

SEQ ID NO: 134022 - DNA, 2501 bp, Homo sapiens
atggaggacagggtggggccgagtgaggagaggagccagcagaagttatccataacacctgccaggctggcgggtggtgacagtcttaaccctgctggaaggacaggtgacctcttagtggagacatcccctttgctggcagctgtcttcccagcccacgacaacagcctctgcaacaagccttactggttagttcaggatctgcgccttatcaaccaaattgttttgcctatccaccccatgatgttactaggggagatatcagtcaccaaggccttggctggctccctgataaaagcccttgcagtattccacactgcagaatccccaggctatgctctcctggattcttactacctgctccagaaagggagtgtttgcatctccatcctccaagaagaggaagcattttcttggccggggaaaggagagtgtcgagataagtcctgggcctctctgggcctaatacccgcatttccccagggaggacagtggaaacaggccctggggcttctggaccacagctgcctctgctttggggaattaggcaccaggttggcagccccagcatccttcagcaccttcccaataacaaaccgagagcgggagagaaaaactgacaagctgattccaaaattcatgtggaaatgcaagggacccagaataaccaaaacaatcttggaaaagaatgaagttggagaatttacacttcttgatttcaaaacttaccacaaatttgcagtaatcaaaactatgtggtactggcataaggacagatacattgatcaacagaatgacattgaaagtccagaaataaattcatatgtttatggtcaactgatttttgacaaagactcagcccgcctgcacccaggtgaaataaacagtcttgttgctcacacaaagcctgtttggtggtctcttcatatggacgcgcatgaaatttggtgccgtgactcggatcgggggtcctcccttgggagaatcaatcccctgtcctcctgttctttgctccgtgagaaagatccacctacgacctcaggtcctcagaccgaccagcccaacgaacatctcaccaatttcaaatccgggagagacaaaggagacacgttttatccgtggacccaaaactccggcgccggtcacggactgggaaggcagccttcccttggtgtttaatcattgcagggacggcctctctgatcattcagccacatttcaagggtgtcagaccatgcagggatgcctgccttggtccttcacccttagcggcaagtcccgcttttctggggaaaaggcaacacgctttaaaaagattaaagcctgttatcactcacctgctacagcatggccttttaaagcctaaaaactctccttacaattcccccattttacctgtcctaaaaccagacaagccttacaagtttgttcaggatctgtgccttatcaaccaaattgttttgcctatccaccccatgctgtactcactctttgttgagtctcccacaattaccattgtttctggcccggacttcaatccggcctcccacattattccggataccacacctgaccctcatgactgcatctctctgatccacctgatgctctccccatttccccacatttccttcttccccatttctcaccctgatcacacttggtttattgatggcagttccaccaggcctaatcgccactcaccagcaaaggcaggctatgctataatatcttccacatctatcgttgaggctaccactctgcctccctccactacctctcagcaagccaaactagttgccttaactcaagccctcactcttgcaaaaggactacgcgtcaatatcttactgattctaaatatgcctttcatattcggcaccaccatgcagtcatatgggctgaaagagggattgttcaggtctcctccctttcctacacatcaagctaggggatttgcccctgcccaggactggcaaattgactttactcacatgcctcgagtcagaaaactaaaatatctcttagtctgggtagacgctttcactggatgggtagaggccttccccacagggtctgagaaggccactgcggtcatttcttcccttctgtcagacataatccctcggtttggccttcccgcctctacacagtctgataacggaccggcctttactagccaaatcacccaagcagtttctcaggctcttggtattcagtggaaccttcatatcatttaccgtcctcaatcttcaggaaaggtagaacggactaatggtcttttaaagacacacctcaccaagctcagcctccaacttaaaaaggattggacagtacttttaactcttgctcttctcagaatcagagcctgtcctcgagatgctacagggtacagtccatttgaactcttatatggacacactttcttgcttggccccaacctcatcccagacaccagccctctaggcaactatcttccagtcctccaacaggctagatag

SEQ ID NO: 134023 - DNA, 5773 bp, Homo sapiens
atgctggcagcccttgcagcccttgcttgctctcagcgcctcttcggccttggcgcccactctggccgagcccttcagcctgccactgcactgtgggagcccctttctgggctggccaaggccgaagctggctccctcagcttgcggggaggtgtggagggagaggcgcagacaggaacggggctgcatatggcgcttgtgggccagcatgagttctgggtgggcgtgggcttggtggaccccaccctcagagcagccggccagctccaccagccctgggcagtggctgaagctaaagtcatagtcaaggttaatgctcctctttctttatctgacctctcccaaaatcagttagcatttaggctctttttcatcgaatataaaaacccagcccagttcatggtttgtttggcagcaaccctgacacgatttacagccctagaccctgaaagatcctctacctacatgtgtctacctgctaattggacaggcacatgcacactagttttccttactcccaaaattcaaattgcaaataggaccgaagagctccctgttcccctcatgacaccgacacgacaaaaaagagttattccactaattcccttgcttgtcggtttaggactttctgcctccactattgctctcagtactggaatagcaggcatttcgacttctgtcacgaccttccgtagcctttctaatgacttctctgctagcatcacagacatatcacaaactttatcagtcctccaggcccaagttgactctttagctgcagttgtcctccaaaaccgccgagaccttgacttactgctttccaatcttctcttccacggctttcctgcaatattttccactagaggcacaccttgtttttccattgttgtttcttgtactgtagttagtctccactcctgtgatctcccctggttgatgagatgtcttggaagagccttaatgacaactgagttccttttggaagatctatcccacttcctgggcgtggggggtggtatgccagaggctggcccgcagcagccagcccaagaagaggccagggcctcttgatccatttgtcggggtaccccagaaggagccaagggggcagccaggggacccaggcaggggttgcccaagggcacagcaacttgcaggcctttggcaagggccaaaaaatggtgagtggaaagccagggggcccctggaaaagaacccataagggggccgtttagctgggagtcctgcatttgccgtttgtgtttcatccggcgattttgaaaccaggtttttatctggacctctgagagctgcatctccctggccagccaattccgctccagagggcccaggtactggtggtgccggaagacgccctccaaggcacggacctgctccgtggtgaaggtcaacccagccacagtcctctccggcgcatgcagatttgacgagctagcctccttggtactgacagcctgagggggctcccgggtgccgaacgtctggcccgggccagggaggctcccgggggagacgtcggcaggcctgggggtgtgggtcgaccctgagcagctgctcaggcagagccagtccacggagccaaagctggagggctgcaatatccactgttctgcagcctccactgctgatacccaggcacacagggcctggagtggacctccagcaaacaccaacaaacctgcagctgagggtcctgactgttagaaggaaaactaacaaacagaaaggacatccacaccaaaaccccatctgtacgtcaccatcatcaaagaccaaaggatcaaattcacacataacaatattaaccttaaatgtaaatgggctaaatgctccaattaaaagacacagactggcaaattggataaagagtcaagacccatcagtgtgctgtattcaggagacccatctcacgtgcagagacacacacaggatcaaaataaagggatggagggagatctaccaagcaaatggaaaacaaaaaaaggcaggggttgcaatcctagtctctgataaaacggactttaaaccaacaaagatcaaaagagacaaagaaggccattacatgatggtaaagggatcaattcaacaagaagagctaactaccctaaatatatatgcacccaatacaggagcacccagattcataaagcaagtccttagagacctacaaagagacttagactcccacacattaataatgggagactttaacaccccactgtcaacattagacagatcaacgagacagaaagttaacaaggatatccaggatttgaactcagctctgcaccaagtggacctaatagacatctacagaactctccaccccaaatcaacagaatatacattcttctcagcactacaccacatttattccaaaattgaccacatagttggaagtaaagcactcctcagcaaatataaaacaacagaaattataacaaactgtctctcagaccacagtgcaatcaaactcgaactcaggattaagaaactcactcaaaaccgctcaactacatggaaactgaacaacctgctcctgaatgactactgggtacataacaaaatgaaggcagaaataaatacattatttgaaaccaacgagaacaaagacacaacataccagaatctctgggacacattcaaagcagtgtgtagagggaaattcatagcactaaatgcccacaagagaaagcaggaaagatctaaaattgacaccctaacatcacaattaaaagaactagagaagcaagaacaaacacattcaaaagctagcagaaggcaagaaataactaagatcagagcaaaactgaaggaaatagagacacaaaaaatccttcaaaaaatcaatgaatccaggagctggttttttgaaaagatcaacaaaattgatagaccactagcaagaccaataaagaagaaaagagagaagaatcaaatagatgcaataaaaaatgataaaggggatatcaccactgatcccacagaaatacaaactaccatcagagaatactataaacacctctatgcaaataaactagaaaatctagaagaaatggataaattcctcaacacatacaccctcccaagactaaaccaggaagaagttgaatctctgaataaaccaataacaggctctgaaattgaggcaataattaatagcttaccaatcaaaaaaagtccaggaccagatggattcatagccaaattccaccagaggtacaaggaggagctggaggccagcatcatcctgataccaaagcctggcagagacacaaccaaaaaagagaattttagaccaatacccctgatgaatattgatgcaaaaatcctcaataaaatactggcaaaccgaatccagcagcacatcaagaagcttatccaccatgatcaagtgggcttcatccctgggatgcaaggctcgttcaacatatgcaaatcaataaacgtaatccaggatataaacagaacgaatgacaaaaaccatatgattatctcaatagatgcagaaaaggcctttgacaaaattcaacaacccttcattctaaaaactctcaataaattaggtattgatgggacgtatctcaaaataataagagctatctatgacaaacccacagccaatatcatactgaatgggcaaaaactggaagcattccctttgaaaactggcacaagacaggggtgccctctctcaccactcctattcaacatagtgttggaagttctggccagggcaatcaggcaggagaaggaaataaagggcattcaattaggacaagaggaagtcaaattgtccctgtttgcagatgacatgattgtatatcgagaaaaccccatcgtctcaacccaaaatctccataagctgataagcaacttcagcaaagtctcaggatacaaaatcaatgtgcaaaaatcacaagcatttttatacaccaataacagacaaacagagagccaaatcatgagtgaactcccattcacaattgcttcaaagagaataaaatacctaggaatccaacttacaagggatgtgaaggatctcttcaaggagaactacaaaccactgctcaaggaaataaaagaggatacaaacaaatggaagaacattccatgctcatgggtaggaagaatcaatatcgtgaaaatggccatactgcccaaggtaatttatagatttaatgccatccccatcaagctaccaatgactttcttcacagaattggaaaaaactactttaaagttcatatggaaccaaaaaagagcccgcattgccaagtcaatcctaagccaaaggaacaaagctggaggcatcacactacctgacttcaaactatactacaaggctacagtaaccaaaacagcatggtactggtaccaaaacagagatatagaccaatggaacagaacggagccctcagaaataatgccacatatctacaaccatctgatctttgacaaacctgacaaaaacaagaaatggggaaatgattccctatttaataaatggtgctgggaaaactggctagccatatgtaggagaaagctgaaactggatcccttccttacaccttatacaaaaattaattcaagatggattaaagacttaaatgttagacctaaaaccataaaaaccctagaagaaaacctaggcaataccattcaggacataggcatgggcaaggacttcatgtctacaacaccaaaagcaatggcaacaaaagccaaaattgacaaatgggatctaattaaactaaagagcttctgcacagcaaaagaaactaccatcacagtgaacaggcaacctacagaatgggagaaaatttttacaatctacccatctgacaaagggctaatatccagaatctacaaagaactcaaacaaatttacaagaaaagaacaaacaaccccatcaacaagtgggtgaaggatatgaacagacacttctcaaaagaagacatttatacagccaaaaggcacatgaaaaaatgctcatcatcactggccatcagagaaatgcaaatcaaaaccacattgagataccatctcataccagttagaatggcgatcattaaaaagtcaggaaacaacagaccaagctccaatgtcttctctgtgaaactttctgagatccaatccttggctctcatagagactaggtgcttaatgaatgctgatgaacagggtgtgccactgattcaagaaatgctggaatcttgggcaagtatttgcaaagttcccaagtatccaaatgccgaagcagtgcggccagaagagcaaacaccccacctgcacccaggtgaaataaacagccatgttgctcacacaaagcttgtttggtggtctcttcacacggacacgcatgaaatttggtgccgtgactcggatcgggggacctcccttgggagatcaatcccctgtcctcctgctctttgctccgtgagaaagatccacctacgacctcaggtcctcagaccgaccagcccaagaaacatctcaccaatttcaaatccgcacacaagaacttccaaacgcctgaaccgcagcggccaggcgttcctccagaacctccttccccaggagcttgctacaagtgccagaaatctgaccaccaggccaaggaatgcctgcagcccaggattcctcctaagccgtgtcccatctgtgcgggaccccactggaaattggactgttcagctcacctggcagccactctcagagcccctggaactctggcccaaggctctctga

SEQ ID NO: 134024 - DNA, 6458 bp, Homo sapiens
taagcagagtagttaataaaaagcttttttttttcatgttttaaaaatgtgacgttgtcaggcctctgagcccaagctaagccatcatgtcctctgtaacctgcacgtacacatccagatggccggttcctgccttaactgatgacattccaccacaaaagaagtgaaaatggcctgttcctgccttaactgatgacactatcttgtgaaattccttctcctggctcatcctggctcaaaagctcccctactgagcaccttgtgacctccactcctgtctgccagagaacaacccccctttgactgtaattttcctttacctacccaaatcttataaaacggccccacccctatctcctttcgctgactcttttcagactcagcccgcctgcacccaggtgaaataaacagccttgttgctcacacaaagcctgtttggtggtctcttcacacggacgcgcatgaaatttggtgctgtgactcggatcgggggacctcccttaggagaccaatcccctgtcctcctgctctttgctccgtgacaaagatccacctacgacctcaagtcctcagacccaccagcccaagaaacatctcaccaatttcaaatccggctgctcctcaccaggccgagctaggtcccaatccttcctcagcctctgctcctccaccctataatctttttatcacctcccctcctcacacctggtctggcttaccgtttcgttccgtgactagccctccccctcctgcccagcaatttactcttaaaaaggtggctggagctgaaggcagtcaggatgatcgggaaagagttttttctctagcccaatctcacgctgataaccaccggcttcacgagccagacctccaggaaggcagtagagtagttccccaagaggatccccaatggaactctcaggcaaattccccagatctgcttggcttagcgactgaagatcgacgctgcccgatcgcctcggaagccccttggaccatcacagacgctgagcttcagctccttcagctatgctcactctttgttgagtctcccacaattaccattgttcctggcccggacttcaatccggcctcccacattattccggataccacacctgaccctcatgactgcatctctctgatccacctgacgttcaccccatttccccacatttccttcttccctgtttctcaccctgatcacacttggtttattgatggcagttccaccaggcctaattgccactcaccagcaaaggcaggatatgcaatagtatcttccacatctgttattgacgctaccgctctgcccccctccactacctctgagcaagccgaactagttgccttaactcaggccctcactcttgcaaaaggactatgcatcaatatttatactgactctaaatatgccttccatattctgcaccaccgtgtggtcacatgggctgaaagaggttacctcactacacaagggtcctccatcattaatgcctctttaataaaaactctgctcaaggctgctttacttccaaaggaagctggggtcattgactgtaaggggcatcaaaaggcatcagaacccattgctctaggcaacgcttatgctgataaggtggctagacaagcagctagctctccaacttctgtccctcatggccagtttttctccttcacatcagtcactcccacctactcccccgctgaaacttccacctatcaatctcttcccacacaaggcaaatggttcttagaccaaggaaaatatctccttccagcctcacaggcccattctattctgtcgtcatttcataacctcttccatgcagtttacaagccgctagcccgtctcttagaacctctcatttcctttccatcacggaaatctatcctcaaggagatcacttctcagtgttccatctgctattctactacccctcagggattgttcaggccccctccctttcctacacatcaagctcagggatttgtctctgcccaggactggcaaattgactttactcacatgccccgagtcagaaaactaaaatatctcttagtctgggtagacactttcactggatgggtagaggcctttcccacagggtctgagaaggccactgcagtcatttcttcccttctgtcagacataattcttcagtttggccttcccacctctatacagtctgataacagaccagcctttactagtcaaatcacccaagcagtttctcaggctcttggtattcagtggaaccttcatatctcttaccatcctcaatcttcaggaaaggtagaacagactaatggtcttttaaagacacacctcaccaaggtcagcctccaacttaaaaaggattggacagtacttttacctcttgcccttctcagaattagagcctgtcctcgagatgctacacggtacagtccatttgaacttttatatggatgcactttcttgcttggccccaacctcatcccagacaccagccctctagacgatcatcttccagtcctccaacaggctagacaggaaatttgccaggctgctaatcttctcttgcctactccagatccccagccatatgaagacaccctagctggacgatcagttcttgttaagaatctgaaccctcaaactctacaacctcgatggaccagaccctacttagtcatctgtagtaccctgactgctgtctgcctgcaggatcttccacactgggttcaccattccagaataaagctgtgtccatcaggcagccagcctaatccctcctcttcctcctggaagtcgcaagtactctcccccacttcccttaaactcactcatatttctgaagaacatgcctacacagctgtccccgccttacagacagactgggcaacatctcccatctccctacacctccgaacttcctttaacagccctcacctttaccctcctgaagaactcatttactttctagacaggtccagcaagacttccccagacatttcacatcagcaagctgccgccctccttcgcacttatttaaaaaacctttctccttatatcaactctactccccccatatttggacctctcacaacacaaactactattcctgtggccgctcctttgtgtatctcttggcaaagacccactggaattcccctaggtaatctttcaccttctcgatgttcctttactcttcatctccgaagtccaactacaaacatcaatgaaacaattggagccttccagctccatattacagacaagccctctatcaatactgacaaacttaaaaacattagcagtaattattgcttaggaagacacttgccctgtatttcactccatccttggctatcttccccttgctcatcagactctcctcccaggccctcttcttgtttacttatacccagccccgaaaataacagtgaaagattgctcgtagatactcgacgttttctcatacaccatgaaaatcgaaccttcccctctacgcagttaccccatcagtccccattacaacctctgacagctgccgccctagctggatccctaggagtctgggtacaagacacccctttcagcactccttctcacctttttactttacatctccagttttgcctcgcacaaggtctcttcttcctctgtggatcctctacctacatgtgcctacctgccaattggacaggcacatgtacactagtcttccttacccccaaaattcaatttgcaaatgggaccgaagagctccctgttcccctcatgacaccgacacaacaaaaaagagttattccactaattcccttgatggtcggtttaggactttctgcctccactgttgctctcggtactggaatagcaggcatttcaacgtctgtcatgaccttccgtagcctgtctaatgacttctctgctagcatcacagacatatcacaaactttatcagtcctccaggcccaagttgactctttagctgcagttgtcctccaaggacaactccgaggccttgacttactcactgctgaaaaaggaggactctgtatattcttaaatgaagagtgttgtttttacctaaatcaatctggcctagtgtatgacaacataaaaaaactcaaggatagagcccaaaaacttgccaaccaagcaagtaattatgctgaatccccttgggcactctctaattggatgtcctgggtcctcccaattgttagtcctttaatacccatttttctccttcttttatttggaccttgtatcttccgtttagtttctcaattcatccaaaaccgtatccaggccatcaccaatcattctatacgacaaatgtttcttctaacatccccacaatatcaccccttaccacaagacctcccttcagcttaatctctcccactctaggttcccacgctgcccctaatcccacttgaagcagccctgagaaacatcgcccattctctctctccataccaccccccaaaaattttcgccgccccaacacttcaacactattttgttttatttttcttattaatagaagaaggcaggaaatgtcaggcctctgagccccaagccaagccatcgcatcccctgtgacttgcacgtatatatacgcccagatgggcctgaagtaactgaagaattcacaaaagaagtgaatatgctctgccccaccttaactgatgaccttccaccacaaaagaagtgtaaatggccggtccttgctttaagtgatgacattaccttgtgaaagtccttttcctggctcatcctggctcaaaaatcacccccactgagcaccttgcgaaccccactcctgcccactgagcaccttgcgacccccactcctacccgccagagaacaaaccccctttgactgtaattttcctttactgacccaaatcctataaaacggccccacccttatcttcccttcgctgactctctttttggactcagcccgcctgcacccaggtgaaataaacagccatgttgctcacacaaagcctgtttggtggtctcttcacacggacgcgcatgaaatttagttgtatccataaggcatatggaggagactaattcctcttccaaagacatgtaccagagtcctggagaggctgagggctggaggtggaagaaaggctctgacaggggtcagaatctgttcaggaaacatagcaaatgcctgatacttttaattagagaaaggtttgaatctccacattcatatatttgcagtccagtgacctttcagtttttttatgcccaaagtgtcaagcatgttaatgttaccattgactgcctccctgaaggtgcagctaccaggggaactgccaggacttcaaagcccacaaccaaaagccagaaaacactaccaagtacaagccccggacactggacccagagcacaccctgggcatctgctctgagatcctctccctggacagagacagctgctccttcagaaacagaggagaccctgaacacaggcaggcctcctgagcttccagccagggccacagccacatggttcagtgcctcccacactctcccagccttggctaccaggagggtggccagaactcagtggttgacagctgacagacagacgtgggcttccatatcgtccgtgccctgggctcagaccatcagtgagaaaaaacctggagggtctctctgggaaactcgttcttccccaccgactactgcagggaccgaggaagccatgaacactacaagccttttggcgcctgctgctgagataatggccacacctggcagcccatcccaggccagccctacctcgggagcattcacccatggcacacagactccgagtccaaccaaggcaacagcccccagatatccacaaacaggtgatctctctgcagagtggccattcactgctggtgaagagccagtcctggtcccaagaccccatcaagtttcaaggtgtcctcagccactcttcaaggtgggagctatggcagctgctcctctcaccctggctattcagaggctcaacccatgcctgatggagctgtgccaattcttccagcaatgcctctgcatgagccagaggagtcccaggacagaggacatgagatactgtcttgaatactattcctggtttctgaagaatgcaacatatatctgtcagagggtgaaaagggtgtcccactcgcacaccttaaagcaaaagtgccttgagaatatctgcaagtctgtgtgaggccttgaaaataacactagggcataacaattacttcaggggatacgccatccaccctggctcttgtcccaagtgggctacatttgaagaattcacccaggctccagctagatcatcagttaatttaaagtggttattcttggaagtagcattttttttccctctcctgtgaatctgtgcaaaacattgaaggtagaagttttcttgttaaaaaaaaaggaattc

SEQ ID NO: 134025 - DNA, 666 bp, Homo sapiens; identical to SEQ ID NO: 116390

SEQ ID NO: 134026 - DNA, 3061 bp, Homo sapiens
aaccggccgccctttttttttttttttttttttttttaagccttctctaattttatttaccagggcatgttggggacaggggagggaagtgttagaggagtgacagggcagcccggggccctctcccaccctgagcctcgaggcctggtgggggacatgaactgcagaggcatcagataaggcctcagaaagcccaggccatcattttcccatgggaccaggctggcttcaatgtggaactggcccctcccagaagcagcaggagaagggctcgcatgggctgccccccgtcacctgtgcctgacaggaatgggggggaaggcagagaagagagcatcagacggccctccctccccattaaggggcaatgggggatggggaacacttccctccccaggaacacagggaaccctggctgaagctgggctgggctccatgccccccatcttggtctggaaggttcagaagggaattgagaacactcttggtttggaaaggcccttccctttcccacttttggggaaaacaggccaggggagagagggtgagggtgcccatgcccaaaaaaacaccccccaaatcccagatgccagactttggaacccaacatgtgggtttgaatctcaacctctaccctgagtgacccctgggcaagtcacttcacttcccttgagacttcaagtttcatcaagatgggaacaattgagcatcctgcctcacagggctttgtcgtgaggattaagtgagaaggtgcgtgtaatattaagcgatgaactggatgatacaaaattaagaacaaggctgggcactgattgctcacgcctgtaatcccagcactttgggaggctgaggcaggtggatcacctgaggtcagaagttccagatcagcctgaccaattatgttaaaccccatcttctacttaaaattccaaaaattagcccagcccatggtggcatgcacctgtaatccccagctactcgggaggctgaggcaagagaattgcttgaaccctgggaggtggaggttgcagtgagcccaagatcgagccatagcacttccagcctgggtgacagagcaagactccgtctcaaaacaaaacaaaacaaaacaaaattgagaacaagtctggctggggaaggctcagtggacacgcccaaggcaagtggggtaactcggcacataaaaggcccaggagtggctgcagagatgtctgccttcattcttcctctgccaggctgagtgagccccgggtgggagtgggcggcatctgcagtcttaaatgggctgaggaccactctggctctgaggcgtggggtctgtttaataagatcccgtccaggcactctagggctggaggatggggcaagcccacggacggagtccctccatacaggaactgcatgtaggtggccgtggacgggtcttcagaggtggatgagaagctgaagagaattgctctcgatttcctcgggcttcacggaggtgatgatccaagaagtagttggcattgatgtgatggaccacggtgccattgggcaggcagatcatcatctccacggggaagctgtacttctccaggtgcaggccagccagcttctggtgggacgagttctcctgtttgttttgcagttcctccagctccttcaccagggaccaggtgctgatgaagctctcgttgagcagggtgaggatgggcgaactttccaggacagtctcccggagagtccgccctgaacctcagcaggactggtcatccagggccccccacagcaggattgagtgcaccagcttgttctcagccttggctcggtcgaaggcctcagtgaacggcaagtaggagcccttcttgaaggggtacatggccacctccaggcgccgggcagcctcctcccagctcagctcctgctgccacttgatctcctcaaacacaaactgcaggggctcccctgaaggcaggtggctgtcgatcatgctgccatcctcatccaggatcacggagggcacagaggggcccgtggcctccagctccatctggatgggagcctcctgtgcgctcacctggggtatgtagccgatgtccacctccatgttggtgctttcactggcgccgtaaagccactccatgtccacattcagagacctgtggttgggcacgaagagccggaagtcgcggacgtgggtggcgtctttggagaggatgatgtggccggtgaactgagcaggggagaaccaaaaggggaagtcgggcggctcactgagctggaactcggcatggatccggaacatcacagtgtagtagaagtcgctgatggcagtcaggcaggccacagctccttgaggggcaaagcgggtcttcacaaagggccgagggtggaacatgctcaggagccggtggatgatgacctccttgcccttgggcggcggtggatagaagcggttgttggacagtctagccagtgaacatgctcagctcactggggatgatccacccagggctcacccagctcctggcctggcgggggaaggaagggctggaaagtggcgggtggccaaacactgcacttggtgagggcggcggctgtccagtttcggaggccggacagggcgaggcgggagacccctatggaatgccatctttgctcttggtcatggtctccgggagcagaaagctttgaatcgggcttctatggtgagcgtctcctcgctaagggtcaggggggcaactcctcctcctcgtagctggccgcgggagttgaccctgttagcttctcagcaatgggtttgaactcctcagggctgatgtacatatccccgtcagtgtccaaggaggaaaagagaaaaaggccatctgttcccaagggtcttcagcgccagttcctgccgcgcggccgcctgggcctcggcgtggcgggcgcagacccggacggcggcggcagcggcggcggccagcagggctccgagcagcgccagggaacgggcgcggcggcgcggtggcgcgggaggctgcgcggcggggccggggctgggcggcccgcgttggcccggccgggcccggcccat

SEQ ID NO: 134027 - DNA, 320 bp, Homo sapiens
cagttagaatggtgataattaaaaagtcagaaaataacagatgctggagaaaatgtggagaaataggaatgcttttaaactgttggtaggagtgtaaattagttcaaccagtgtggaagacagtgacccagcaatcccattactgggtatatacccaaaagattacatatcattctacggtaaagacacatgcacacatatgtttattgtggcactattcacaatagcaaagactgggaaccaacccaaatgcccatcaatgatagactggataaagaaaatgtggcacatatacaccatggaatactatgcagccataa

SEQ ID NO: 134028 - DNA, 1563 bp, Homo sapiens
atgcccatcaatgatagactggataaagaaaatgtggcacatatacaccatgggatactatgcagccataacgccatagcgttgctgaccccgcggcttgactctagaggatcccccaaaaagaacaaacaaaatttccaagacatatgggattatgtaaaaagaccaaatttacgattgattggagcacctgaaagagatggggagaatggaaccaagttggagaacatgcttcaggatatcatccaggagcacttcctcaacctagcaagacaggccaacattcaaattcaggaaatccagagaactccagtaatatactccacgagaagatcaaccccaagacacataatcgtcagattctccaagagtgccttgggggcatacccccggctcggtctagagatacccctgacaccagtctgggcacagtccgacgtctacggagagaaagagagagaggaacaagaaaaggagaaggaaggccagaggatccccgacgccaacgatccgatcctgaaagatcagacgcaagaatggtccggttctgcaacctttacatctgacggaaaaatccgtttattctacactgactattccggtaaacattacggcaaacaaagcctgacaacagcgcaggtaaatgtgtcaaaatctgatgacacactcaaaatcaacggagtggaagatcacaaaacgatttttgacggagacggaaaaacatatcagaacgttcagcagtttatcgatgaaggcaattatacatccggcgacaaccatacgctgagagaccctcactacgttgaagacaaaggccataaataccttgtattcgaagccaacacgggaacagaaaacggataccaaggcgaagaatctttatttaacaaagcgtactacggcggcggcacgaacttcttccgtaaagaaagccagaagcttcagcagagcgctaaaaaacgcgatgctgagttagcgaacggcgccctcggtatcatagagttaaataatgattacacattgaaaaaagtaatgaagccgctgatcacttcaaacacggtaactgatgaaatcgagcgcgcgaatgtttttcaaatgaacggcaaatggtacttgttcactgattcacgcggtttcaaaatgacgatcgatggtattaactcacacgatattttacatgcgtgggttatgtatcaaactcttttaacgggccttacaagccggctggacaaaacggggctgtgctgcaaattgggtcttgatcccaacgatgtgacaattactttactctcactttcgcgtgccgcaagcccaagggaacaatgtggtttttccaagcttcttgacaaacagaggcttagcttgcatgcctgcaggtcgactctagaggatccccgacagctcctcactgggcattgcttgtgtggtttgagagggtccatgaccagtccccgtgttacacagttgtccctcggtgtctgtggaagattgattccaggaccctcaagtagataccaaaatcctgggatgctcaatcctccatctggccccctgtgtccttag

SEQ ID NO: 134029 - DNA, 633 bp, Homo sapiens
atgagccttggtgtgtgccaagactgttgtattagtgaagccccagtcacagtatcagtggaagctgatccacatattgagggaaggttcttccgttttaagaattacgccagcaaaacaccctcccttaaattgcaaaggcagagccgcccttttcaagaaacatcccatcccacaggcattgaaaaaaggtcacctccgaatcttcagaaagcaactcaaccccacataatgtctgcaaaagaatacgccttcagtaggaagatgtatggaaagacaggaagaaagaagggagaagtaaaggtgagggagagaaaaggcaagggagcaggtagatctgacactatttacaatagcaaagacttggaaccaacccaaatgcccatcagtgatagattggataaagaaaatatggacatatacaccatgggatactatgcagccataaaaaaggatgagtttgtgtcctttgcaggaacaatggatgaagctgtaaaccaagggtattcttctagagctcgcacgcgccactggagtatgaaaaaaatactcctgcagctagctcggtgtctgcccaagtggccactcagttttgtgcttgaatcccagggccttggtggtgtaggcagctga

SEQ ID NO: 134030 - DNA, 776 bp, Homo sapiens
caaaaccacaatgagatactatctcacaccagttagaatggcaatcattaaaaagtcagaaaacaacagatgctggagaggatgtggagaaacaagaatgcttttacactgttggtttgagtgtaaactagttcaactattgtggaagacagtggtgattcctcaaggatgtagaactaaaaataccatttgacccagcgatcccattactgggtgtatacccaaaggattataaatcatgctactataaagacacatgcacacgtatgtttattgcggcactattcacaatagcaaagacttggaaccaacccaaatgtccatcagtgatagactggattaagaaaatgtggcatatatacaccatggaatactatgcagccataaaaaaggatgagttcgtgtcctttgcagggacatggatgaagctggaaaccatcattctcagcaaactatcgcaaggacaaaaaaccaaacaccgcatgttctcactcataagtgggagttgaacaatgagaacacatggacacagggaggggaacatcacacaccggtgcctgttgggaggttgggggcaaggggagggatagcattaggagaaatacctaatgcatgtgggacttaaaacctagatgatgggtcaataggtgcagcaaaccaccttggaacatgtatacctatgtaacaaacctgcaggttctgcacatgtaacccagaacttaaactataattaaaaaaacttttaaaataaataaataaaagtgcattccaaaaaa

SEQ ID NO: 134031 - DNA, 2448 bp, Homo sapiens; identical to SEQ ID NO: 121935

SEQ ID NO: 134032 - DNA, 1947 bp, Homo sapiens; identical to SEQ ID NO: 119723

SEQ ID NO: 134033 - DNA, 2142 bp, Homo sapiens; identical to SEQ ID NO: 118316

SEQ ID NO: 134034 - DNA, 5130 bp, Homo sapiens; identical to SEQ ID NO: 116418

SEQ ID NO: 134035 - DNA, 3819 bp, Homo sapiens; identical to SEQ ID NO: 118066

SEQ ID NO: 134036 - DNA, 1698 bp, Homo sapiens; identical to SEQ ID NO: 117839

SEQ ID NO: 134037 - DNA, 3450 bp, Homo sapiens; identical to SEQ ID NO: 128076

SEQ ID NO: 134038 - DNA, 2265 bp, Homo sapiens; identical to SEQ ID NO: 116371

SEQ ID NO: 134039 - DNA, 2529 bp, Homo sapiens
atgttctttgaaaccaatgagaacgaagatacatcataccagaatctcagggacacatttaaagtagtctttagatggaaaattatagctctaaatgcccacaagagaaagcaggaaagatctaaaattgataccctaacatcaaaattgaaagaactagagaagcaacagcaaacaaattcaaaagctagcagaagacatgaaataactaacatcagagcagaactgaaggagatagagacacaaaaaacccttcaaaaaatcaatgaatccgtgaactggttttttgaaaaaatcatcaaaatagatagactgctagccagactaataaagaagaaaagagagaagaatcaaatagattcaataaaaaatgatatagaggatatcaccactgatcctgtagaaacacaaactaccgtcagagaatattttaaacacctctacgcaaataaactagaaaatctagaagaaatggataaattcctggacacatacatcctcccaagtctaagccaggaagaagtagaacccctgaacagaccaataacaggttctgaaattgaggcaataattaatagcttaccaaccaaaaaaagtccaggaccagacagattcacagccaaattctaccagagaataaccaatacagagaagtgcttaaaggagctgatggagctgaaagccaaagctcgagaactacgtgaagaatgcagaagcctcaggagtcgatgcgatcaactggaagaaagggtttcagtgatggaagatgaaatgaatgaaatgaatgacggggagaatggaaccaagttggaaaacactctgcaggatattatccaggagaacttccccaaacgagcaaggcaggccaacattcagattcaggaaatacagagaatgccacaaagatactcctcgagaagagcaactccaagacatataattgtcagattcaccaaagttgaaatgaaggaaaaaatgttaagggcagccagagagaaagaaatacaaactaccatcagagaatactacaaacacctctacgcaaataaactagaaaatcgagaagaaatggataaattcctcgacacatacactctcccaagactaaacgaggaagaagtcgaatctctgaatacaccaataacaggctcagaaattgtagcaataatcaatagcttaccaaccaaaaagagtccaggaccagatggattcacagccgaattgtaccagagacaaacagagagccaaatcatgagtgagctcccattcacaattgcttcaaagagaataaaatacgtaggaatccgacttataagggacgtgaaggacctcttcaaggagaactacaaaccattgctcagtgaaataaaagaggatacaaacaagtggaagaacattccatgctcatgggtgggaagaatcaatatcgtgaaaatggccatactgcctaaggtaatttatagattcaatgccatccccatcaagctaccaatgcctttcttcacagaattggaaaaaactactttaaatttcatatggaaccaaaaaagagcccacatcgccaactcaatcctaagccaaaagaacaaagctggaggcatcacgctacctgacttcaaactatactacaaggctacagtaaccaaaacagcatggtactggtaccaaaacagagagatagatgaatggaacacaacagagccctcagaaataatgccacatatctacaactatctgatctttgacaaacctgagaaaaacaagcaatgggaaaaggattccctatttaataagtggtgctgggaaaactggctagccatatgtagaaagctgaaactggatcccttccttacaccttatacaaaaattaattcaagatggattaaagacttaaacgttagacctaaaaccataaaaaccctagaagaaaacctaggcaataccattcaggacataggcataggcgacgacttcatgtctaaaacaccaaaagcaatggcaacaaaagccaaaattgacagatgggatctaattaaactaaagagcttctgcacagcaaaagaaactaccatcagagtgaacaggcaacctacaaaatgggagaaaattttcgcaacctactcttctgacaaagggctaatatccagaatctacaatgaactcaaacaaatttacaagaaaaaaacaaacaaccccatcaaaaagtggacaaagaatatgaacagacacttctcaaaagaagacatttatgcagccaaaagacacatgaaaaaatgctcatcatcactggccatcagagaaatgcaaatcaaaaccacaatgacataccatctcacaccagttagaatggcaatcattaaaaagtcaggatacaacaggtgctggagaggatgtggagaaataggaacacttttacactgttggtgggactgtaaactagttcaaccattgtggaagtcagtgtggcgattcctcagggatctagaactagaaataccatttgacccagcaatcccattactggtataa

SEQ ID NO: 134040 - DNA, 3726 bp, Homo sapiens; identical to SEQ ID NO: 124355

SEQ ID NO: 134041 - DNA, 1026 bp, Homo sapiens
atgggagactttaacaccccactgtcaacattagacagatcaacgagacagaaagtcaacaaggatacccaggaattgaactcagctctgcaccaagcggacctagcagacatctacagaactctccaccccaaatcaacagaatatacatttttttcagcaccacaccacacctattccaaaactgaccacatactgggaagtaaagctctcctcagcaaatgtaaaagaacagaaattataacaaactatctctcagaccacagtgcaatcaaactagaactcaggattaagaatctcactcaaaaccgctcaactacatggaaactgaacaacctgctcctgaatgactactgggtacataacgaaatgaaggcagaaataaagatgttctttgaaaccaacgagaacaaagacacaacataccagaatctctgggacacattcaaagcagtgtgtagagggaaatttatagcactaaatgcccacaagagacagcaggaaagatccaaaattgacaccctaaaatcacaattaaaagaactagaaaagcaagagcaaacacattcaaaagctagcagaaggatcaacaaaattgatagaccgctagcaagactaataaagaaaaaaagagagaagaatcaaatagacacaataaaaaatgataaaggggatatcaccaccgatcccacagaaatacaaactaccatcagagaatactacaaacacctctatgcaaataaactagaaaatctagaagaaatggataaattcctggacacgtacactctcccaagactaaaccaggaagaagttgaatctctgaatagaccaataacaggagctgaaattgtggcaataatcaatagcttaccaaccaaaaagagtccaggaccagatggattcacagccaaattctaccagaggtacaaggaggaactggtaccattccttctgaaactattccaatcaatagaaaaagagggaatcctccctaactcattttatgaggccagcatcatctga

SEQ ID NO: 134042 - DNA, 1596 bp, Homo sapiens; identical to SEQ ID NO: 128877

SEQ ID NO: 134043 - DNA, 3171 bp, Homo sapiens; identical to SEQ ID NO: 121976

SEQ ID NO: 134044 - DNA, 2952 bp, Homo sapiens; identical to SEQ ID NO: 123225

SEQ ID NO: 134045 - DNA, 1800 bp, Homo sapiens; identical to SEQ ID NO: 124322

SEQ ID NO: 134046 - DNA, 2367 bp, Homo sapiens; identical to SEQ ID NO: 128381

SEQ ID NO: 134047 - DNA, 2913 bp, Homo sapiens; identical to SEQ ID NO: 121072

SEQ ID NO: 134048 - DNA, 4729 bp, Homo sapiens; identical to SEQ ID NO: 121970

SEQ ID NO: 134049 - DNA, 1569 bp, Homo sapiens; identical to SEQ ID NO: 124178

SEQ ID NO: 134050 - DNA, 2796 bp, Homo sapiens; identical to SEQ ID NO: 120827

SEQ ID NO: 134051 - DNA, 2494 bp, Homo sapiens; identical to SEQ ID NO: 131332

SEQ ID NO: 134052 - DNA, 2907 bp, Homo sapiens; identical to SEQ ID NO: 120355

SEQ ID NO: 134053 - DNA, 3213 bp, Homo sapiens; identical to SEQ ID NO: 116408

SEQ ID NO: 134054 - DNA, 2055 bp, Homo sapiens; identical to SEQ ID NO: 120365

SEQ ID NO: 134055 - DNA, 2314 bp, Homo sapiens
atggataaattcctcgacacatacactctcccaagactaaaccaggaagaagttgaatctctgaacagatcaataacaggatcagaaattgtggcaatactcaatagtttaccaaccaaaaagagtccaggaccagatggattcacagctgaattctaccagaggtacaaggaggaactggtaccattccttctgaaactattccaatcaatagaaaaagagggaatcctccctaactctttttatgaggccagcatcatcctgataccaaagccgggcagagacacaagcaaaaaagagaattttagaccaatacccttgatgaatattgatgcaaaaatcctcaataaaatactggcaaaacgaatccagcagcacatcaaaaagcttatccaccatgatcaagtgggcttcatccctgggatgcaaggctggttcaatatacgcaaatcaataaatgtaatccagcatacaaacagagccaaagacaaaaaccacatgattatctcaatagatgcagaaaaagcctttgacaaaattcaacaactcttcatgctaaaaactcttaataaattaggtattgatgggatgtatctcaaaataagaagagctatctatgacaaacccacagccaatatcatactgaatgggcaaaaactggaagcattccctttgaaaactggcacaagacagggatgccctctctcaccactcctattcaacatagtgttggaagttctggccagggcaattaggcaggagaaggaaataaagggtattcaattaggaaaagaggaagtcaaattgtccctgtttgcagatgacatgattgtatatctagaaaaccccattgtctcagcccaaaatctccttaagctgataagcaacttcagcaaagtctcaggatacaaaatcaatgtacaaaaatcacaagcattcttatacaccaacaacagacaaacagagagccaaatcatgagtgaactcccattcacacttgcttcaaagagaataaaatacctaggaatccaacttacaagggatgtgaaggacctcttcaaggagaactacaaaccactgctcaacgaaataaaagaggatacaaacaaatggaagaacattccatgctcatgggtaggaagaatcaatatcgtgaaaatggccatactgcccaaggtaatttacagattgaatgccatccccatcaagctaccaatgcctttcttcacagaattggaaaaaactactttaaagttcatatggaaccaaaaaagagcccgcgttgccaagtcaatcctaagccaaaagaacaaagctggaggcatcacactacctgacttcaaactatactacaaggctatagtaaccaaaacagcatggtactggtaccaaaacagagatatagatcaatggaacagaacagagccctcagaaataacgccgcatatcaacaactatctgatctttgacaaacctgacaaaaacaagcaatggggaaaggattctctatttaataaatggtgctgggaaaacgggctagccatatgtagaaagctgaaactggatcccttccttacaccttatacaaaaattaattcaagatggattaaagacttaaacgttagacctaaaaccagaaaaaccctagaagaaaacctaggcattaccattcaggacataggcatgggcaaggacttcatgtctaaaacaccaaaagcaatggcaacaaaagacaaaatagacaaatgggatctaattaaactaaagagcttctgcacagcaaaagaaactaccatcagagtgaacaggcaacctacaaaatgggagaaaattttcgcaacctactcatctgacaaagggctaatatccagaatctacaatgaactcaaacagatttacaagaaaaaaacaaacaaccccatcaaaaagtgggcgaaggacatgaacagacacttctcaaaagaagacatttatgcagccaaaaaacacatgaaaaaatgctcatcatcactggccatcagagaaatgcaaatcaaaaccacaatgagataccatctcacaccagttagaatggcaatcattaaaaagtcaggaaacaacagcactattcacagtagcaaagacatggattcaacccaaatgtgcatcaatgatacactgtatgaagaaagtgtagaacatatacaccatgaaatacaatccagccataaaaaaggagttcacatcctttgcagcaatatggatggagctgaaagccactttcctaagcaaactaatgcaagaacagaaagccaaatactgcatgttctcactt

SEQ ID NO: 134056 - DNA, 2685 bp, Homo sapiens; identical to SEQ ID NO: 121971

SEQ ID NO: 134057 - DNA, 2505 bp, Homo sapiens; identical to SEQ ID NO: 117590

SEQ ID NO: 134058 - DNA, 2115 bp, Homo sapiens
atggtggaagatgaaggaaaagcaagcagtttcttcacaagaaagcgggtgagaaagagtgagtacggaactgccaaacactttaaaagccatcagatctcacttgactggggaaagatctgtttccagctgcctccagttgtttgcagaattcatctccttgtggttgtaggatggaagtccccattttcatgctggctttttggtgctgaggagtgttcccagctcctgaaggccacactgttggaagttctggcctgggcaattaggcaggagaaggaaataaagggtattcaattaggaaaagaggaagtccaattgtccctgtttgcagatgacatgattgtgtatctagaaaaccccattgtctcagcccaaaatctccttaagctgataagcaatttcagcaaagtctcaggatacaaaatcaatgtacaaaaatcacaagcattcttatacaccaataacagacaaacagagagccaaatcatgagtgaactcccactcacaattgcttcaaagagaataaaatacctaggaatccaacttacaagggatgtgaaggacctcttcaaggagaactacaaaccactgctcaacgaaataaaagatgatacaaagaaatgcatgaacattccatgctcatgggtaggaagaatcaatattgtgaaaatggccatactgcccaaggtaatttatacactcaatgccatccccatcaagctaccaatgactttcttcacagaattggaaaaaactactttaaagttcatatggaaccaaaaaagagcctgcattgccaagtcaatcataagccaaaagaaaaaagctggagacatcacgctacctgacttcaaactatactacaaggctacagtaaccagaacagcatggtactgctaccaaaacagagatataggtcaatggaacagaacagagccctcagaaataacgccgcatatctacaactatctgatctttgacaaacctgagaaaaacaagcaatggggaaaggattccctatttaataaatggtgctgggaaaactggctagccatatgtagaaagctgaaactggatcccttctttacaccttatacaaaaattaattcaaaatggattaaggacttaaatgttagacctaaaaccataaaaaccctacaagaaaacctaggcattaccattcaggacataggcatgggcaaggacttcatgtctaaaacaccaaaagcaatggcaacaaaagccaaaattgacaaatgggatctaattaaactaaagagcttctgcacagcaaaagaaactaccatcagagtgaacaggcaacccacaaaatgggagaaaattttcgcaagctactcatctgacaaagggctaatatccagaatctacaatgaactcaaacaaatttacaagaaaaaatcaaacaacccaatcaaaaagtgggcaaaggacatgaacagacacttctcaaaagagtacatttatgcagccaaaaaacacatgaaaaaatgctcatcatcactggccatcagagaaatgcaaatcaaaaccacaatgagataccatctcaccccagttagaatggcaatcattaaaaagtcaggaaacagcaaatgctggagaggatgtggagaaataggaacacttttacactgttggtgggactgtaaactagttcaacccttgtggaagtcactgtggcgattcctcaggcatctagaactagaaataccatttgacccagccatcccattactgggtatatacccaaaggactgtaaatcatgctgctataaagacacatgtgcactgggctccgtccagtccaaacttcccggtggctttgtttacactgtgagaggcaaacagcctactcaaggctcagtaatggtggatgcccctccccccaccaagctcgagcatctcaggtccacttcagactgccgtgctggcagcgagaatttcaagtcagtgggtcttagcttgctgggctcggtgtgggggagtaaacggttctgtcttgctggtgttccaggtgccactggagtacaaaataaaactcctgcagctatctcagtgtctgcccaaacggctgcccagttttctgcttga

SEQ ID NO: 134059 - DNA, 2382 bp, Homo sapiens
atggccttgtccacaaagagggaatggccctgcattgagttggatcctcacatccagcacacactgcatttcatcaatggcaatgccaaagtcatattcagactaaaccaggaagaagttgaatctctgaatagaccaataacaggctctgaaattgtggcaataatcaatagtttaccaaccaaaaagagtccaggaccagatggattcacagccgaattctaccagaggtacaaggaggagctggtaccattccttctgaaactattccaatcaatagaaaaagagggaatcctccctaactcattttatgaggccagcatcattctgataccaaagccgggcagagacacaaccaaaaaagagaattttagaccaatatccttgatgaacattgatgcaaaaatcctcaataaaatactggcaaaccgaatccagcagcacatcaaaaagcttatccaccatgatcaagtgggcttcatccctgggatgcaaggctggttcaatatacgcaaatcaataaatgtaatccagcatataaacagagccaaagacaaaaaccacatgattatctcaatagatgcagaaaaagcctttgacaaaattcaacaacccttcatgctaaaaactctcgataaattaggtattgatgggacgtatttcaaaataataagagctatctatgacaaacccaaagccaatatcatactgaatgggcaaaaactggaagcattccctttgaaaactgccacaagacagggatgccctctctcaccgctcctattcaacatagtgttggaagttctggccagggcaattaggcaggagaaggaaataaagggtattcaattaggaaaagaggaagtcaaattgtccctgtttgcagacgacatgattgtttatctagaaaaccccattgtctcagcccaaaatctccttaagctgataagcaacttcagcaaagtctcaggatacaaaatcaatgtgcaaaaatcacaagcattcttatacaccaacaacagacaaacagagagccaaatcatgagtgaactcccattcacaattgcttcaaagagaataaaatacctaggaatccaacttacaagggatgtgaaggacctcttcaaggagaactacaaaccactgctcaaggaaataaaagaggacacaaacaaatggaagaacattccatgctcatgggtaggaagaatcaatatcgtgaaaatggccgtactgcccaaggtaatttacagattcgatgccatccccatcaagctaccaatgactttcttcacagaattggaaaaaactactttaaagttcatatggaaccaaaaaagagcccgcatcgccaagtcaatcctaagccaaaagaacaaagctggaggcatcacactacctgacttcaaactatactacaaggctacagtaaccaaaacagcatggtactggtaccaaaacagagatatagatcaatggaacagaacagagccctcagaaataatgccgcatatctacaactatctgatctttgacaaacctgagaaaaacaagcaatggggaaaggattccctatttaataaatggtgctgggaaaactggctagccatatgtagaaagctgaaactggatcccttccttacaccttatacaaaaatcaattcaagatggattaaagatttaaacgttagacctaaaaccataaaaaccctagaagaaaacctaggcattaccattcaggacataggcgtgggcaaggacttcatgtccaaaacaccaaaagtaatggcaacaaaagccaaaattgacaaatgggatctaattaaactcaagagcttctgcacagcaaaagaaactaccatcagagtgaacaggcaacctacaacatgggagaaaattttcgcaacctactcatctgacaaagggctaatatccagaatctacaatgaactcaaacaaatttacaagaaaaaaacaaacaaccccatcaaaaagtgggcgaaggacatgaacagacacttctcaaaagaagacatttatgcagccaaaaaacacatgaagaaatgctcatcatcactggccatcagagaaatgcaaatcaaaaccactatgagatatcatctcacaccagttagaatggcaatcattcaaaagtcaggaaacaacagggacaacacaaaggaagcactgctgtgtaacaacttggtggctgaagtcttggaggccaaacaggctcagaagcttcaaggcaaagcagccgtcctcagcctctcaaaaatctatgcgatcacagagacaaatgctgagacacccaacaggaagatgaaaattaaactgaagagacccatgaccaaattgcacccaagcatccaaatgttggtg

SEQ ID NO: 134060 - DNA, 2745 bp, Homo sapiens; identical to SEQ ID NO: 128662

SEQ ID NO: 134061 - DNA, 2253 bp, Homo sapiens; identical to SEQ ID NO: 123239

SEQ ID NO: 134062 - DNA, 2985 bp, Homo sapiens; identical to SEQ ID NO: 121567

SEQ ID NO: 134063 - DNA, 4794 bp, Homo sapiens; identical to SEQ ID NO: 118075

SEQ ID NO: 134064 - DNA, 2499 bp, Homo sapiens
atgttgaatattggcccccactctcttctggcttgtagggtttctgccgagagatccactgttagtctgatggtcttccctttgagggtaacccgacctttctctctggctgcccttaacattttttccttcatttcaactttggtgaatctgacaattatgtgtctagaaaatctagaagaaatggatacattcctcgacacatacactcttccaagactaaaccaggaggaagttgaatctctgaatagaccaataacaggacctgaaattgtggcaataatcaatagtttaccaaccaaaaagagtccaggaccagatggattcacagccgaattctaccagaggtacaaggaggaactggtaccattccttctgaaactattccaatcaatagaaaaagacggaatcctccctaactcattttataaggccagcatcattctgataccaaagccgggcagagacacaaccaaaaaagagaattttagaccaatatccttgatgaacattgatgcaaaaatcctcaataaaatactggcaaaccgaatccagcagcacatcaaaaagcttatccaccatgatcaagtgggcttcatccctgggatgcaaggctggttcaatatacgcaaatcaataaatgtaatccagcatataaacagagccaaagacaaaaaccacgtgattatcccaatagatgcagaaaaagcctttgacaaaattcaacaacccttcatgctaaaaactctcaataaattaggtattgatgggatgtatttcaaaataataagagctatctatgacaaacccacagccaatatcatactgaatgggcaaaaactggaagcattccctttgaaaactggcacaagacagggatgccctctctcaccgctcctattcaacatagtgttggaagttctggccagggcaattaggcaggagaaggaaataaagggtattcaattaggaaaagaggaagtcaaattgtccctgtttgcagacgacatgattgtatatctagaaaaccccattgtctcagcccaaaatcttcttaagctgataagcaacttcagcaaagtctcaggatacaaaatcaatgtacaaaaatcacaagcattcttatacaccaacaacagacaaacagagagccaaatcatgagtgaactcccattcacaattgcttcaaagagtataaaatacctaggaatccaacttacaagggatgtgaaggacctcttcaaggagaactacaaaccactgctcaaggaaataaaagaggacacaaacaaatggaagaacattccatgctcatgggtaggaagaatcaatatcgtgaaaatggccatattgcccaaggtaatttacagattcaatgccatccccatcaagctaccaatgactttcttcacagaattggaaaaaactactttaaagttcatatggaaccaaaaaagagcccgcatcgccaagtcaatcctaagccaaaagaacaaagctggaggcatcacactacctgacttcaaactatactacagggctacagtaaccaaaacagcatggtactggtaccaaaacagagatatagatcaatggaacagaacagagccctcagaaataacgccgcatacctacaactatctgatctttgacaaacctgagaaaaacaagcaatggggaaaggattccctatttaataaatggtgctgggaaagctggctagccatatgtagaaagctgaaactggatcccttccttacaccttatagaaaaatcaattcaagatggattaaagctttaaacgttagacctaaaaccataaaaaccctagaagaaaacctaggcattaccattcaggacataggcatgggcaaggacttcatgtccaaaacaccaaaagcaatggcaacaaaagccaaaattgacaaatgggatctaattaaactaaagagcttctgcacagcaaaagaaactaccatcagagtgaacaggcaacctaaaaaatgggagaaaattttcacaacctactcatctgacaaagggctaatatccagaatctacaatgaactcaaacaaatttacaagaaaaaaacaaacaaccccatcaaaaagtgggcgaaggacatgaacagacacttctcaaaagaagacatttatgcagccaaaaaacacatgaaaaaatgctcatcatcactggccaccagagaaatgcaaatcaaaaccacaatgagataccatctcacaccagttagaatggcaatcattaaaaagtcaggaaacaacagccagagaggcttttatgattctataaaaagccccacaaaggaatcctatgcagccataaaaaggaacgagatcatgtcctttgcaggctatggatggagctggacgctgttatccttagcaactaacacaggaacggaaaaccaaacactgcatattttcacttataagtgggagctgaacaatgagagcacatggatacatgaagggatgggg

SEQ ID NO: 134065 - DNA, 3259 bp, Homo sapiens
atgtgggatgttcaagaagggcagaggccattatgcagtgcagggcaggggatagtgggagaacgaggagacgagatcagagaggaagcagctgtgcagtcaggcgatgaaggactgtggtccatggtgaggagtgtgggtctgaagccattggatggcacaccacaccacacctattccaaaattgaccacatagttggaagtaaaacactcctcagcaaatataaaagaacagaaattataacagactgtctctcagaccacagtgcaatcaaactagaactcaggattaagaaactcactcaaaaccgctcaactacatggaaactgaacaacctgctcctgaataactactgggtacataacgaaatgaaggcagaaataaagatgttctttgaaaccaacgagaacaaagacacaaaaaaccagaatctctgggacacattcaaagcagtgtgtagagggaaatttatagcactaaatgcccacaagagaaagcaggaaagatctaaaattgacaccctaacatcacaatcaaaagaagtagagaagcaagagcatacacactcaaaagctagcagaaggcaagaaataactaagatcagagcacaactgaaggaaatagagacacaaaaaacccttcaaaaaatcaatgaatccaggagctggttttttgaacagatcaacaaaattgatagactgctagcaagactaataaagaagaaaagagagaagaatcaaatagacacaataaaaaatgacaaaggggatatcaccaccgatcccacagaaatacaaactaccatcagagaatactataaacacctctacgcaaataaactagaaaatctagaagaaatggataaattcctcgacacatacactctcccaagactaaaccaggaagaagttgaatctctgaatagaccaataacgggctctgaaattgaggcaataattaatagcttaccaaccaaaaaaagtccaggaccagatggattcatagccgaattctaccaaaggtacaaggaggagctgcctggcagagacacaacgaaaaaagagaattttagaccaatatccttgatgaacattgatgcaaaaatcctcagtaaaatactggcaaaccgaatccagcaacacatcaaaaagcttatccaccatgatcaagtgggcttcatccatgggatgcaaggctggttcaacatacgaaaatcaataaatgtaatccagcatataaacagaaccaaagacaaaaaccacatgattatctcaatagatgcagaaaaggcctttgaaaaaattcaacaacccttcatgctaaaaattctcaataaattaggtatcgatgggacatatctcaaaataataagagctatctatgacaaacccacagccaatatcatactgaatggacaaaaactggaagcattccctttgaaaactggcacaagacagggatgccctctctcaccactcctattcaacatagtgtgggaagttctgaccagggcagtcaggcaggagaagggaataaagggcattcaattaggaatagaggaagtcaagttgtccctgtttgcagatgacatgattgtgtatctagaaaaccccatcatctcagcccaaaatctccttaagctgataagcaacttcagcaaagtctcaagatacaaaatcaatgtgcaaaaatcacaagcattcttatacaccaataacagacaaacagagagccaaatcatgagtgaactcccattcacaattgcttcaaagagaataaaatacctaggaatccaacttacaagggatgtgaaggagctcttcaaggagaactacaaaccactgctcaatgaaataaaagaggatacaaacaaatggaagaacattccatgctcatgggtaggaagaatcaatatcgtgaaaatggccatacttcccaaggtaatttatagattcaatgccatccccatcaagctaccaatgacttccttcacagaattggaaaaaactactttaaacttcttatggaaccataaaagagcccacactgccaagtcaatcctaagccaaaagaacaaaactggaggcatcatgctacctgacttcaaactatactacaaggctagagtaaccaaaacagcatggtactggtaccaaaacagagatgtagaccaatggaacagaacagagccctcagaaataatgctgcatatctacaactatctgatctttgacaaacctgagaaaaacaagcaatggggaaaggattccctatttaataaatggtgctgggaaaactggctagccatatgtagaaagctgaaactggatcccttccttacaccttatacaaaaattaattcaagatggattaaagacttaaatgttagacctaaaaccataaaaaccctagaagaaaacctaggcaataccattcaggacataggcatgggcaaggacttcatgtctaaaacaccaaaagcaatggcaacaaaaaccaaaattgacaaatgggatctaattcaactaaagagcttcttctgcacagcaaaagaaactaccatcagagtgaacaggcaacctacagaatgggagaaaatttttgcaacctactcatctgacaaagggctaatatctagaatctacaatgaactcaaacaaatttacaagaaaaaaacaaacaaccccatcaaaaagtggacaaacgatatgaacagacacttctcaaaagaagacatttatgcagccaaaaaacacatgaaaaaatgctcatcattaccggccatcagagaaatgcaaatcaaaaccacaatgagataccatctcacaccagttagaatcgcgatcattaaaaagtcaggaaacaacagcaaagtggatgatatccatgctatctgtagccttcttaaagactttcttcgaaacttcaaagaacctcttctgacctttcgcctaaacaaagcctttatggaagcagcagaaatcacagatgaagacaacagcatatctgccatgtaccaggctgttggtgaactgccccaggccaacagggacacattggttttcctcatgattcacttgcagagagtggctcagagtccatatactaaaatgaatgttgccaatctggctgaagtctttggctctacaatagtggcccatgctgtgcccaatccagaaccagtgacgatgttacaggacatcaagtgtcaacccaaggtggtcgagcgcctgccttccttgcccctggagtactgga

SEQ ID NO: 134066 - DNA, 3657 bp, Homo sapiens; identical to SEQ ID NO: 120146

SEQ ID NO: 134067 - DNA, 2394 bp, Homo sapiens
atggacacaataaaaaatgataaaggggatatcaccaccgatcccacagaaatacaaactaccatcagagaatactataaacacctctatgcaaataaactagaaaatctagaagaaatggataaattcctcgacacatatacccttccaagactaaaccaggaagaagttgaatctctgaatagaccagtaagaggctctgaaattgaggcaataattaatagcttaccaactgaaaaaagtccaggaccagatggattcacagccaaattctaccagagatgcagaaaagcctttgacaaaattcaacaacctttcatgctaaaaactctcaataaattaggtattgatgggacgtatttcaaaatgataagagctatctatgacaaacccacagccaatatcatactgaatgggcaaaaactggaagcattccccttgaaaactggcacaagacagggatgccctctctcaccactcctattcaacatagtgttggaagttctggccagggcaattaggcaggagaaggaaataaaaggtattcaattaggaaaagaggaagtcaaattgtccctgtttgcagacgacatgattgtatatctagaaaaccccatcgtctcagcccaaaatctccttaagctgataagcaacttcagcaaagtctcaggatacaaaatcaatgtacaaaaatcacaagcattcttatacaccaataacagacaaacagagagccaaatcatgagtgaactcccattcacaattgcttcaaagagaataaaatacctaggaatccaacttacaagggatgtgaaggacctcttcaaggagaactacaaaccactgctcaaggaaataaaagaggatacaaacaaatggaagaacattccatgctcatgggtaggaagaatcaatatcgtgaaaatggccatactgcccaaggtaatttacagattcaatgccatccccatcaagctaccaatgactttcttcccagaattggaaaaaactactttaaagttcatatggaaccaaaaaagagccctcatcgccaagtcaatcctgagccaaaagaacaaagccagaagcatcacgctacctgacttcgaactatactacaaggctacagtaaccaaaacagcctggtactggtaccaaaacagagatatagaccaatggaacagaacagagccctcagaaataatgccgcatatctacaactatctgatctttgacaaacctcacaaaaacaagcaatggggaaaggattccctatttaataaatggtgctgggaaaaatggctaaccatatgtagaaagctgaaactggatcccttccttacaccttatacaaaaattaattcaagatggattaaagacttacatgttagagctaaaaccataaaaaccctagaagaaaaactaggcaataccattcaggacataggcatgggcaaggacttcatgtctaaaccaccaaaagcaacggcagcaaaagccaaaattgacaaatgggatctaattaaactaaagaacttctgcacagcaaaagaaactaccatcagagtgaacaggcaacctacaaaatgggagaaaattttcacaacctactcatctgacaaagggctaatatccagaatctacaatgaactccagcaaatttacaagaaaaaaacaaacaaccccatcaaaaagtgggcgaaggacatgaacagacacttctcaaaagaagacatttatgcagccaaaaaacacatgaaaaaatgctcaccatcactggccatcagagaaatgcaaatcaaaaccacaatgagataccatctcacaccagttagaatggcaatcattaaaaagtcaggaaacaacaggagacatttggcagtgtctggagacatttctggctgtcacaacctagggaggaaagttgcaggtattgagtgggtcgagggtggtgatgctgctaaacatcctgcaaggcacaggataatagcccgcaacaaagaactgtcccaaaatgccaatcatgccaagcttgagaagccctgtatgaggtggtggcaagagttacagggaaaacaatccgagaaaggtcaaagggagtcccaggggcaaggtggagggggtgaggagttgttcagggaagagctcaccaggaagatgacatctgaacaaaaacctgcaaaaggagcagcggggagctgctgtagatatctgcaggaagagcatcataggacaggaaatgacaaatgtgaaggccctgagggaggaacatgttgggcaagttccgggaaagcaggagaccaatgtggcaggggcagagtgagcaaaaggaggaggagcagaaatgaaaatcttacggggcccagatgtgtcgagcgtcagcttgtgctctga

SEQ ID NO: 134068 - DNA, 1158 bp, Homo sapiens
atgtcggccctcgaaaagagcatgcacctcggccgccttccctctcgcccacctctacccggcagcgggggcagtcagagcggagccaagatgcgaatgggccctggaagaaagcgggacttttcccctgttccttggagtcagtattttgagtccatggaagatgtagaagtagagaatgaaactggcaaggatacttttcgagtctacaagagtggttcagagggtccagtcctgctccttctgcatggaggaggtcattctgccctttcttgggctgtgttcacggcagcgattattagtagagttcagtgtaggattgtagctttggatctgcgaagtcatggtgaaacaaaggtcaagaatcctgaagatctgtctgcagaaacaatggcaaaagacgttggcaatgtggttgaagccatgtatggggaccttcctcctccaattatgctgattggacatagcatgggtggtgctattgcagtccacacagcatcatccaacctggtaccaagcctcttgggtctgtgcatgattgatgttgtagaaggtacagctatggatgcacttaatagcatgcagaatttcttacggggtcgtcctaaaaccttcaagtctctggagaatgctattgaatggagtgtgaagagtggccagattcgaaatctggagtctgcccgtgtctcaatggttggccaagtcaaacagtgtgaaggaattacaagtccagaaggctcaaaatctatagtggaaggaatcatagaggaagaagaagaagatgaggaaggaagtgagtctataagcaagaggaaaaaggaagatgacatggagaccaagaaagaccatccatacacctggagaattgaactggcaaaaacagaaaaatactgggacggctggttccgaggcttatccaatctctttcttagttgtcccattcctaaattgctgctcttggctggtgttgatagattggataaagatctgaccattggccagatgcaagggaagttccagatgcaggtcctaccccagtgtggccatgcagtccatgaggatgcccctgacaaggtagctgaagctgttgccactttcctgatccggcacaggtttgcagaacccatcggtggattccagtgtgtgtttcctggctgt

SEQ ID NO: 134069 - DNA, 2860 bp, Homo sapiens
atggctgacatgctaacatgggaatcctgtcttgaggagtcactccaagaggagtcaccattggtcactcactgtggccccagctgctgcatctctggacagtcgcctccaagctcagctcgtccatcctcagtgtccagtgcaatctctgtgttgatgctgcctcagaacaggaagctgcctcctgcctggacgtctcctggaatcttccccacagatctggtggtttactccatgtcacttcctcatgcccttgccagatataactgtgatgtatgtaaaagcatgctgcctccaagattgtatgctcctgaggaaaaagctcgtacctctccactttgtggaacctggtactcaccttcactaccactttgtggagcctggtgcaagaagaatgagaagaagagggaaagagagagagagagaaagagacagagagaggatatactttctggtgcctcttcgtataaggacactattcatattcaattaagacccccaccttatgacgtccttcaacaaatacaaactaccatcagagaatacttcaaacacctctatgcaaataaactagaaaatctagaagaaatggataaactcctcgacacatacaccctcccaagactaaaccaggaagaagttgaatctctgaatagactaataacaggctctgaaattgtggcaataatcaacagcttaccaaccaaaaagagtccaagaccagatggattcacagctgaattctaccagaggtacaaggaggaactggtaccattccttctgaaactattccaatcaatagaaaaagggggactcctccctaactcattttatgaggccagcatcatcctgatgccaaagctgggcagagacacaaccaaaaaagagaattttagaccgatatccctgatgaacattgatgcaaaaatcctcaataaaatactggcaaaccaaatccagcagcacatcaaaaagcttatccagcatgatcaagtgggcttcatccctgggatgcaaggctggttcaatatttgcaaatcaataaatgtaatccagcatataaacagaaccaaagacaaaaaccacatgactatctcaatagatgcaggaaaagcctttgacaaaattcaacaactcttcatgctaaaaactctcaataaattaggtattgatgggacgtatctcaaaataataagagctatctatgacaaacccacagccaatatcattctgaatggggaaaaactggaagcattccctttgaaaactggcacaagacagggatgccctctctcaccactcctattcaacatagtgttggaagttctggccagggcaattaggcaggagaaggaaataaagggtattcgattacgaaaagaggaagtcaaattgtccctgtttgcagatgacatgattgtatatctagaaaaccccatcatctcagcccaaaatctccttaagctgataagcaacttcagcaaaatctcaggatacaaaatcaatgtacaaaaatcacaagcattcttatacaccaacaacagacaaacagagagccaaatcatgagtgaactcctattcacaattgcttcaaagagaataaaatacctaagaatccaacttactaaggacgtgaaggacctcttcaagaagaactacaaaccactgctcaatgaaataaaagaggatacaaagaaatggaagaacattccatgctcatgggtaggaagaatcaatatcgtgaaaatggccatacggcccaaggtaatttatagattcaatgccatccccatcaagctaccaatgactttcttcacagaattggaaaaaactactttcaagttcatatggaaccaaaaaagagcccgcatcgccaagtcaatcctaagccaaaagaacaaagctggaggcatcacactacctgacttcaaactatactacaaggctacagtaaccaaaacagcatggtactggtaccaaaacaaagatatagatcaatggaacagaacagagccctcagaaataatgccgcatatctacaactatctgatctttgacaaacctgacaaaaacaagcaatggggaaaggattccctatttaataaatggggctgggaaaactggctagccatatgtagaaagctgaaactggatcccttccttacaccttatacaaaaattaattcaagatggattaaagatttaaacgttagacctaaaaccataaaaaccctagaaaaaaacctaggcattaccattcaggacataggcatgggcaaggacttcatgtctaaaacaccaaaagcaatggcaacaaaagccaaaattgacaaatgggatctaattaaactaaagagcttctgcacagcaaaagaaactaccatcagagtgaacaggcaacctacaaaatgggagaaaatttttgcaacctactcatctgacaaagggctaatatccagaatctacaatgaactcaaacaaatttacaagaaaaaaacaaacaaccccatcaaaaagtgggtgaaggacatgaacagacacttctcaaaagaagacatttgtgcagccaaaaaacacatgaaaaaatgctcatcatcactggccatcagagaaatgcaaatcaaaaccacaatgagatatcatctcacaccagttagaatggcaatcattaaaaagtcaggaaacaacagacgcacagcaactttaagtttgctgccagctatacgtcatgaaagggaagcttttcatcaaagggaagaagaaaaggaagggggaagaatcctacttttacaaaacagagtaattctttgctcctgctccctttgcccacatctctcacctgcgtccaaaccaaaacaca

SEQ ID NO: 134070 - DNA, 2956 bp, Homo sapiens; identical to SEQ ID NO: 124191

SEQ ID NO: 134071 - DNA, 3359 bp, Homo sapiens
atgaataattcaatcaaggaaaaagtgaaactcagtttaactaaatgggaaatgcaaacaaaacctaacaataatactgttgatcttaaagatgcccaagaggtcaatctcacaagcacggattacagaaagcaacatgtcatgctgcctaccgaaatcaattcagacgactctcttttaaaaattggggttattagactggcaaattggataaagagtcaagacccatcagtgtgctgtaatcaggaaacccatctcacgtgcagagacacacataggctcaaaataaaaggatggaggaagatctaccaagcaaatggaaaacaaaaaaaggcaggggttgcaatcctagtctccgataaaacagacttcaaaccaacaaagatcaaaagagacaaagaaggccattacataatggtaaagggatcaattcaacaagaagagctaactatcctaaatacatatgcacccaatacaggagcacccagattcataaagcaagtcctgagtgacctacaaagagacttagactcctacacattaataatgggagactttaacaccccactgtcaacattagacagatcaacgagacagaaagtcaacaaggatacccaggaattgaactcagctctgcaccaagtggacctaatagacatctacagaactctccaccccaagtcaacagaatatacatttttttcagcaccacaccacacctattccaaaattgaccacatacttggaagtaaagctctcctcagcaaatgtaaaagaacagaaattataacaaactatctctcagaccacagtgcaatcaaactagaactcaggattaagaatctcattcaaaaacgctcaactacatggaaactgaacaaactgctcctgaacgactactgggtacataacgaactgaaggcagaaataaagatgttctttgaaaccaacgagaacaaagacacaacataccagaatctctgggacgcattcaaagcagtgtgtagagggaaatttatagcactaaacgcccacaagagaaagcaggaaagatccaaaattgacaccctaacattacaattaaaagcactagaaaagcaagagcaaacacattcaaaagctagcagaaggcaagaaataactaaaatcagagcagaactgaaggaaatagagacacaaaaaacccttcaaaaaattaatgaatccaggagctggttttttgaaaggatcaacaaaattgataaaccgctagcaagactaataaagaaaaaaagagagaagaatcaaatagacacaataaaaaatgatagaggggatatcaccaccgatcccacagaaatacagactaccatcagagaatactacaaacacctctatgcaaataaactagaaaatctagaagaaatggataaattcctcgacacatacactctcccaagactaaaccaggaagaagttgaatctctgaatagaccaataacaggatctgaaattgtggcaataatcaatagcttaccaacgaaaaagagtccaggaccagatggattcacagccgaattctaccagaggtacaagcaggaactgcatataaacagaaccaaagacaaaaaccacatgattatctcaatagatgcagaaaaggcctttgacaaaattcaacaacgcttcatgctaaaaactctcaataaattaggtattgatggggcgtatttcaaaataataagacctatctatgacaaacccacagccaatatcatactgaatgggcaaaaactggaagcattccctttgaaaactggcacaagacagggatgccctctctcaccactcctattcaacatagtgctggaagttctggccaaggcaattaggcaggagaaggaaataaagggtattcaattaggaaaagaggaagtcaaattgtccctgtttgcagacgacatgattgtatatctagaaaaccccattgtctcagcccaaaatctccttaagctgataagcaacttcagcaaagtctcaggatacaaaatcaatgtacaaaactcacaggcattcttatacaccaataacagacaaacagagagccaaatcatgagtgaactaccattcacagttgcttcaaagagaataaaatacctaggaatccaacttacaagggatgtgaaggacctcttcaaggagaactacaaaccactgctcaatgaaataaaagaggatacaaacaaatggaagaacgttccatgctcatgggtaggaagaatcaatatcgtgaaaatggccatactgcccaaggtaatttatagattcaatgccatccccatcaagctaccaatgactttcttcacagaattgggaaaaactactttaaagttcatatggaaccgaaaaagagcccacatcgccaagtcaatcctaagacaaaagaacaaagctggaggcatcacgctacctgacttcaaactatactacaaggctacagtaaccaaaacagcatggtactggtaccaaaacacagatatagatcaatggaacagaacagagccctcagaaataacgctgcatatctacaactatctgatctttgacaaacctgagaaaaacaagcaatggggaaaaggattccctatttaataaatggtgctgggaaaactggctagccatatgtagaaagctgaaactggatcccttccttacaccttatacaaaaatcaattcaagatggattaaagatttaaactttagacctaaaaccataaaaaccctagaagaaaacctaggcattaccattcaggacataggcatgggcaaggacttcatatccaaaacaccaaaagcaatggcaacaaaagccaaaattgacaaatgggatctaattaaactaaagagcttctgcacagcaaaagaaactaccatcagagtgaacaggcaacctacaacatgggagaaaattttcacaacctactcatctgacaaagggctaatatccagaatctacaatgaactcaaacaaatttacaagaaaaaaacaaacaaccccatcaaaaagtgggtgaaggacatgaacagacacttctcaaaagaagacatttatgcagccaaaaaacacatgattaaatgctccgcatcactggccatcagagaaatgcaaatcaaaaccactatgagatatcatctcacaccagttagaatggcaatcattaaaaagtcaggaaacaacagtgttcttaagagagaaggtcaaagaatagatatttctactgtttcatttccaatctgtttgtccgttgtccattcactgaagaacaggtactctctctacaacatcactgaagctgctcttgccaacgtccccagagaag

SEQ ID NO: 134072 - DNA, 3131 bp, Homo sapiens; identical to SEQ ID NO: 124227

SEQ ID NO: 134073 - DNA, 2419 bp, Homo sapiens
ccaggccatgaccttagagggaagatggcagcaatcccagagaagttctacaaaacagagagatgggacttcttttcccatggtagagcccacaaagactgaagagcccttcatgagctccctgccccctcatcctaaccaggccgcagagtggcaaagtggaagacctagaccaaaaacaggagctgaaattgtggcaataaccaatagcttaccaaccaaaaagagtccaggaccagatggattcacagcagaattctaccagaggtacaaggaggaactggtaccattccttctgaaactattccaatcagtagaaaaagagggaatcctccctaactcattttatgaggccagcatcatcctgctaccaaagccaggcagagacaaaaccaaaaaagagaattttagaccaatatccttgatgaacattgatgcaaaaatcctcaataaaatactggcaaaccgaattcagcagcacatcaaaaagcttatccaccatgatcaagtgggcttcgtccctgggatgcaaggctggttcaatatacgcaaatcaataaatgcaatccagcatataaacagaaccaaagacaaaaaccacatgattatctcaatagatgcagaaaaggcctttgacaaaattcaacaacccttcatgctaaaaactctcaataaattaggtattgatgggaagtatctcaaaataataagagctttctatgacaaacccacagccaatatcatactgaatgggcaaaaactggaagcattccctttgaaaactggcacaagacagggatgccctctctcaccactcctattcaacatagtgttggaagttctggacagggcaattaggcaggagaaggaaataaagggtattcaattaggaaaagaggaagtcaaattgtccctgtttgcagatgacatgattgtatatctagaaaaccccattgtctcagcccaaaatctccttaagctgataagcaacttcagcaaagtctcaggatacaaaatcaatgtacaaaaatcacaagcattcttacacaccaataacagacaaacagagagccaaatcatgagtgaactcccattcacaattgcttcaaagagaataaaatacctaggaatccaaattacaagggacgtgaaggacctcttcaaggagaactacaaaccactgctcaaggaaataaaagaggatacaaacaaatggaagaacattccatgctcatgggtaggaagaatcaatattgtgaaaatagccatactgcccaagataatttacagattaaatgccatccccatcaagctactaatgactttcttcacagaattggaaaaaactactttaaagttcatatggaaccaaaaaagagcccgcatcgccaagtcaatcctaagccaaaagaacaaagctggaggcatcacgctacctgacttcaaactatactacaagcctacagtaaccaaaacagcatggtactggcaccaaaacagagctatagagcaatggaacagaacagagccctcagaaataacgacacatatctacaactatctgacctttgacaaacctgagaaaaacaagcaatggggaaaggattccctatttaataaatggtgctgggaaaactggctagccatatgtagaaagctgaaactggatcccttccttacaccttatacaaaaatcagttcaaaatggattaaagacttaaacgttagacctaaaaccataaaaacccaagaagaaaacctaggcattaccattcaggacataggcatgggcaaggacttcatgtctaaaacacaaaaagcaatggcaacaaaagccaaaattgacaaaggggatctaattaaactaaagagcttctgcacagcaaaagaaactagcagcagtgtgaacaggcaacctacaaaatgggagaaaatttttgcaacctactcatctgacaaagggctaatatccagaatctacaatgaactcaaacaaattcacaagaaaaaaacaaacaaccccatcaaaaagtgggcaaaggatatgaacagacacttctcaaaagaagacatttatgcagccaaaaaacacatgaaaaactgttcaccatcactggccatcagagaaatgcaaatcaaaaccacaatgagataccatctcacaccacttagaatggcaatcattaaaaagtcaggaaacaacagttcactgaacaatgtgatgaaaggaaatgatgaactgggggattctgtctcccggtttcagaagcagacactgagcctcaaatctgctaagattgccctgtgtgagagtcttatctcctgtagagaaagagctaaaattgtggaaaaacagacacaagctcttatcatgagagtggctgacctgaaacaaaaggtgcatgcacagccttgccag

SEQ ID NO: 134074 - DNA, 3509 bp, Homo sapiens
gatcaaattcacacataacaatattaaccttaaatgtaaatgggctaaatgctccaattaaaagacacagactggcaaattggataaagaggtcaagacccattcagtgtcctgtattcaggaaacccatctcacgtgcagagacacacataggctcaaaataaagggatggaggaaaatctaccaagcaaatggaaaacaaaaaaaaagcacggcttgcaatcctagtctctgataaaacagactttaaaccaacaaagatcaaaagagacaaagaaggccattacataatggtaaagggatgaattcaataagaagagctaactatcctaaatatatatgcacccaatacaggagcacccagattcataaagcaggtccttagagacctacaaagagacttagactcccacccaataataatgggagacttcaacaccccactgtcaacattagacagatcaatgagacagaaagttaacaaggatatccaggacttgaactcagctctgcaccaagcagacctaacagacatctacagaactctccaccccaagtcaacagaatatacattcttctcaccaccacatcacacttattccaaaactgaccacatagttggaagtaaagcactcgtcagcaaatgtaaaagaacagaaattataacaaactgtctctcagaccacagtgcaatcaaactagaactcaggattaagaaactcactcaaaaccgctcaactacatggaaactgaacaacctgctcctgaatgactactgggtacataacaaaatgaaggcagaaataaatacattatttgaaaccaacgagaacaaagacacaacataccagaatctctgggacacattcaaagcagtgtgtagagggaaattcatagcactaaatgcccacaagagaaagcaggaaagatctaaaattgacaccctaacatcacaattaaaagaactagagaagcaagaacaaacacattcaaaagctagcagaaggcaagaaataactaagatcagagcaaaactgaaggaaatagagacacaaaaaatccttcaaaaaatcaatgaatccaggagctggttttttgaaaagatcaacaaaattgatagaccactagcaagaccaataaagaagaaaagagagaagaatcaaatagatgcaataaaaaatgataaaggggatatcaccactgatcccacagaaatacaaactaccatcagagaatactataaacacctctatgcaaataaactagaaaatctagaagaaatggataaattcctcaacacatacaccctcccaagactaaaccaggaagaagttgaatctctgaataaaccaataacaggctctgaaattgaggcaataattaatagcttaccaatcaaaaaaagtccaggaccagatggattcatagccaaattccaccagaggtacaaggaggagctggaggccagcatcatcctgataccaaagcctggcagagacacaaccaaaaaagagaattttagaccaatacccctgatgaatattgatgcaaaaatcctcaataaaatactggcaaaccgaatccagcagcacatcaagaagcttatccaccatgatcaagtgggcttcatccctgggatgcaaggctcgttcaacatatgcaaatcaataaacgtaatccaggatataaacagaacgaatgacaaaaaccatatgattatctcaatagatgcagaaaaggcctttgacaaaattcaacaacccttcattctaaaaactctcaataaattaggtattgatgggacgtatctcaaaataataagagctatctatgacaaacccacagccaatatcatactgaatgggcaaaaactggaagcattccctttgaaaactggcacaagacaggggtgccctctctcaccactcctattcaacatagtgttggaagttctggccagggcaatcaggcaggagaaggaaataaagggcattcaattaggacaagaggaagtcaaattgtccctgtttgcagatgacatgattgtatatcgagaaaaccccatcgtctcaacccaaaatctccataagctgataagcaacttcagcaaagtctcaggatacaaaatcaatgtgcaaaaatcacaagcatttttatacaccaataacagacaaacagagagccaaatcatgagtgaactcccattcacaattgcttcaaagagaataaaatacctaggaatccaacttacaagggatgtgaaggatctcttcaaggagaactacaaaccactgctcaaggaaataaaagaggatacaaacaaatggaagaacattccatgctcatgggtaggaagaatcaatatcgtgaaaatggccatactgcccaaggtaatttatagatttaatgccatccccatcaagctaccaatgactttcttcacagaattggaaaaaactactttaaagttcatatggaaccaaaaaagagcccgcattgccaagtcaatcctaagccaaaggaacaaagctggaggcatcacactacctgacttcaaactatactacaaggctacagtaaccaaaacagcatggtactggtaccaaaacagagatatagaccaatggaacagaacggagccctcagaaataatgccacatatctacaaccatctgatctttgacaaacctgacaaaaacaagaaatggggaaatgattccctatttaataaatggtgctgggaaaactggctagccatatgtaggagaaagctgaaactggatcccttccttacaccttatacaaaaattaattcaagatggattaaagacttaaatgttagacctaaaaccataaaaaccctagaagaaaacctaggcaataccattcaggacataggcatgggcaaggacttcatgtctacaacaccaaaagcaatggcaacaaaagccaaaattgacaaatgggatctaattaaactaaagagcttctgcacagcaaaagaaactaccatcacagtgaacaggcaacctacagaatgggagaaaatttttacaatctacccatctgacaaagggctaatatccagaatctacaaagaactcaaacaaatttacaagaaaagaacaaacaaccccatcaacaagtgggtgaaggatatgaacagacacttctcaaaagaagacatttatacagccaaaaggcacatgaaaaaatgctcatcatcactggccatcagagaaatgcaaatcaaaaccacattgagataccatctcataccagttagaatggcgatcattaaaaagtcaggaaacaacaggaatatccagactgtgctcctactcaggatcccattccagggcctggttccttcccccagcgggcagacacatccagtaggcgaccagccagcagcgcatgtagacagcatcgacgccgataccaggctcagaggacagaaccatattccagaggagctggggagaggcgttgtctccaatccagttgag

SEQ ID NO: 134075 - DNA, 2413 bp, Homo sapiens
atgggagactttaacaccccactgtcaacattagacagatcaatgagacagaaagttaacaaggatatccaggaattgaactcagctgtgcaccaagtggacctaatagacatctacagaactctccaccccaaatcaacagaatatacattcttcttagcaccacatcgtacttattccaaaattgaccacatagttggaagtaaagcactcctcagcaaatgtaaaagaacagaaattataagaaattgtctctcagaccacagtgcaatcaaactagaactcaggattaacaaactcactcaaaactgctcaactacatggaaactgaacaacatgctcctgaatgactactgggtacataatgagatgaaggcagaaataaagatgttctttgaaaccaatgagaacaaagacacaacatacaagaatctctgggacacatttaaagccagtgtatagagggaaatttatagcactaaatgcccacaagagaaagcaggaaagtatctaaaattgacaccctaacatcacaattgaaagaactagagaagcaagagcgggcaaattcaaaagctagcagaaggcaagaaataactaagatcagagcagaactgaaggagatcgagacacaaaaaacccttcaaaaaactaatgaatccaggagctggttttttgaaaggatcaacaaaattgataggccattagcaagactaataaagaagaaaagagagaagaatcaaatacagtcaataaaaaatgataaaggggatatcactaccaatgccacagaaatacaaactaccatcagagaatactataaacacctctatgcaattaaactagaaaatctagaagaaatggataaattcccatacacaaacaccctcccaagattaaatgaggaagaaattgaatccctgaatagaacaataacaggatctgaaattgaggcaataattaagagcctaccaaccaaaaaaagtccaggaccagatggattcacagccaaattctaccagaggtacaaagaggagctggtaccattccttctgaaactattccaatcaatagaaaaagagggaatcctccctaattcattttatgaggccagcatcatcctaataccaaagcctgtgttggaagttctagccagggcaatcaggcaggagaaagaaataaagggtattcatttaggaaaagaggaagtcaaattgtccctgtttgcagatgatatgattgtacatttagaaaatcccattttctcagcccaaaatctccttaagctgataagcaacttcagcaaagtctcaggatacaaaatcaatgtgcaaaaatcacaagcattcctatacaccaccaacaaacaaacagagagccaaatcatgagtgaactcccattcacaattgcttcaaagagaataaaatacctaggaatccaacttacaagggatgtgaaggacctcttcaaggagaactacaaaccactgctcaatgaaataaaaaaggacacaaacaaatggaagaacattccatgctcatggataggaagaatcaatatcgtgaaaatggccatactgcccaaggtaatttacagattcaatgccatccccatcaagctaccaatgactttcttcacagaattggaaaaaactactttaaagttcatatggaaccaaaaaagagcccacattgccaagacactcctaagcaaaaagaataaagctggaggcatcatgctacctgacttcaaactatactacaaggctacagtaaccaaaacagcatggtgttggtaccaaaacagagatatagaccaatggaacagaacagagccctcagaaataataccacacatctacaacaatctgatctttgacaaacctgacaaaaagaagaaatggggaaaggattcccaatttaataaatggtgctgggaaaactggctagccatatgtagaaagctgaaacgggatcccttccttacaccttatacaaaaattaattcaagatggattagcaacttaaatgttagacctaaaaccataaaaatcctagaagaaaacctaggcaataccattcaggacataggcataggcaaggacttcatgtctaaaacactaaaagcaatggcaacaaaagccaaaattgacaaatgggatctaattaaactaaagagcttctgcacagcaaaagaaactaccatcagagtgaacaggcaacctacagaatgggaaaaaatttttgcaatctactcatctgacaaaggcctaatatccagaatctacaatgaactccaacaaattcacacaaaaaaacaaacaaccccatcaaatgtgggcgaaggatgtgaacagacacttctcaaaaggagacatttatgcagccaacagacacatgagaaaatgctcat

SEQ ID NO: 134076 - DNA, 5316 bp, Homo sapiens
atggtaaagggatcaattcatcaagaagagctaactatcctaaatatatatgcacccaatacaggagcacccagattcataaagcaagtcctgagtgacctacaaagagacttagacttccacacattaataatgggagactttaacaccccactgtcaacaatggacagatcaacgagacagaaagtcaacaaggatatccaggaattgaactcagctctgcaccaagcggacctaatagacatctacagaactctccaccccaaatcaacagaatatacattttattcagcaccacaccacacctattccaaaattgaccacatacttggaagtaaagctctccccagcaaatgtaaaagaacagacattataacaaactatctctcagaccacagtgcaatcaaactagaactcaggattaagaatctcactcaaaaccactcaactacatggaaactgaacaacctgctcctgaatgactactgggtacataacgaaatgaaggcagaaataaagatgttctttgaaaccaacgagaacaaagacacaacatacgagaatctctgggacgcattcaaagcagtgtgtagagggaaatttatagcactaaatgcccacaagagaaagcaggaaagatccaaaattgacaccctaacatcacaattaaaagaactagaaaagcaagagcaaacacattcaaaagctagcagaaggcaagaaataactaaaatcagagcagaacagatcaacaaaattgatagaccgctagcaagaataataaagaaaaaaagagagaagaatcaaatagacacaataaaaaatgataaaggggatgtcaccactgatcccacaggaatacaaactaccatcagagaattctacaaaaacctctatgcaaataaactagaaaatctagaagaaatggataaattccttgacacatacactctcccaagactaaaccaggaagaagttgaatctctgaatagaccaataacaggatctgaaattgtggcaataatcaatagcttaccaaccaaaaagagtccaggaccagatgaattcacagccgaattctgccagaggtacaaggcggaactgcatataaacagagccaaagaaaaaaaccacacgattatctcaatagatgcagaaaaggcctttgacaaaattcaacaacctttcatgctaaaaactctcaataaattaggtattgatgggacacatttcaaaataataagagctatctatgacaaacccacagccaatatcatactgaatgggcaaaaactggaagcattccctttgaaaaccggcacaagacagggatgccctctctcaccactcctattcaacatagtgttggaagttctggccagggcaattaggcaggagaaggaaataaagggtattcaattaggaaaagaggaagtcaaattgtccctgtttgcagatgacatgattgtatatctaggcaaccccactgtctcagcccaaaatctccttaagctgataagcaacttcagcaaagtctcaggatacaaaatcaatgtgcaaaaatcacaagcattcctacacaccaacaacagacaaacagagagccaaatcatgagtgaactcccattcacaattgcttcaaagagaataaaatacctaggaatccaacttacaagggatgtgaaggacctcttcaaggagaactataaaccgctgctcaaggaaataaaagaggatacaaacaaatggaagaacattccatgctcatgggtaggaagaatcaatatcgtgaaaattggccataatgcccaaggtaatttacagattcaatgccatccccatcaagctaccaatgcctttcttcacagaattggaaaaaactactttaaagttcatatggaaccaaaaaagagcccgcatcgccaagtcaatcctaagccaaaagaacaaagctggaggcatcacaccacctgacttcaaactatactacaaggctacagtaaccaaaacagcatggtgctggtaccaaaacagagatatagaccaatggaacagaacagagccctcagaaataacgccgcatatctacaactatctgatctttgacaaacctgagaaagacaagcaatggggaaaggattccctatttaataaacggtgctgggaaaactggctagccatatgtagaaagctgaaactggatccgttccttacaccttatacaaaaatcaattcaagatggattaaagacttaaaggttagacctaaaaccataaaaaccctacaagaaaacctaggctttaccattcaggacataggcatgggcaaggacttcatgtctaaaacaccaacagcaatgggaacaaaagacaaaattgacaaatgggatctaattaaactaaagagcttctgcacagcaaaagaaactaccatcagagtgaacaggcaacctacaaaatgggagaaaattttcacaacctactcatctgacaatgggctaatatccagaatctacaatgaactcaaacaaatttacaagaaaaaaacaaacaaccccatcaaacagtgggcaaaggacatgaacagacacttctcaatagaagacatttatgcagccaaaaaacacatgaaaaaatgttcatcgtcactggccatcagagaaatgcaaatcaaaaccacaatgagataccatctcacaccagttagaatggcaatcattaaaaagtcaggaaacaacagaaatcatcttgacttcaagcacattagaattctcggtatttgttatctggctagaagatttatcagccatgactacatctggtttcaagaaacagaaaacctgaaaaactatcgcctaaacaagcagcaggttttccttatcgttagtctacttgccctgaaagtagtacagatatgtaaatacctgagaggacctgcttatggcactgttagtagaccacagttgctgaaaatttccatttacagaataaacagcatagagaagaccttaaatgacctgatggagctgaaaaccatggtacgagaaatacgtgacgcatgcacaagcttcagtagccaattcaatcaagtggaagaaaggaaccaaagacaaattgtctcagtagatgaagaaaaagcctttgataaaattcaacagcgcttcatgctaaaaacgctcaataaattaggtattgatgggacgtatctcaaaataataagagctatctatgacaaacccacagccagtatcatactgaatgggcaaaaactggaagcattccctttgaaaactggcacaagacagggatgccctctctcaccactcctattcaacatagtgttggaagttctggccagggcaatcaggcaggagaaggaaataaagagcattcagttaggaaaagaggaagtcaaattgtccctgtttgcagatgacatgattgtatatctagaaaaccccactgtctcagcccaaaatctccttaagctgatgagcaacttcagcaaagtctcaggatacaaaatcaatgtgcaaaaatcacaagcattcttatacaccaataacagacaaacagagagccaaatcatgagtggactcccattcacaatcacttcaaagagaataacatacctaggaatccaacttacaagggatgtgaaggacctcttcaaggagaactacaaaccactgctcaaggaaataaaagaggatacaaacaaatggaagaacattccatgctcatgggtaggaagaatcaatatcgtgaaaatggccatactgcccaaggtaatttatagattcaacaccatccccatcaagctaccaatgactttcctcacagaattggaaaaaactactttaaagttcatatggaaccaaaaaagagcccacattgccaagtcaatcttaagccaaaagaacaaagctggaggcatcatgctacctgacttcaaactatactacaaggctacagtaaccaaaacagcatggtactggtaccaaaacagagatatagaccaatggaacagaacagagccctcagaaataatgccacatatatctacaactatctaatctttgacaaacctgagaaaaacaagcaatggggaaaggataccctatttaataaatggtgctgggaaaactggctagccatatgtagaaagctgaaactggatcccttccttacaccttatacaaaaattaattcaagatggattaaagacttaaatgttagacctaaaaccataaaaaaccctagaagaaaacctaggcaataccattcaggacataggcatgggcaaggacttcatgtctaaaacaccagaagcaatggcaacaaaagacaaaattgacaaatgggatctaattcaactaaagagcttctgcacagcaaaagaaaccaccatcagagtgaacaggcaacctacagaatgggaggaaatttttgcaacctactcatctgacaaagggctaatatccagaatctacaatgaactcaaacaaatttacaagaaaaaaacaaacaaccccatcaaaaagtgggcaaaggatatgaacagacacttctcagaagaagacatttatgcagccaaaaaacacatgaaaaaatgctcatcatcactggccatcagagaaatgcaaatcaaaaccacaatgagataccatctcacaccagttagaatggtgatcattaaaaagtcaggaaacaataggtgctggagaggatgtggagaaataggaacacttttacactgttggtgggactgtaaactagttcaaccattgtggaagtcggtgtggcaattcctcagggatctagaactagaaataccatttgacccagccatcccattactgggtatatacccagaggattataaaccatgctgctataaagacacatgcacacgtatgtttattgcggcactattcacaatagcaaagacttggaaccaacccaaatgtccaacaatgatagacgggattaagaaaatgtggcacatatacaccatggaatactatgcagccataaaaaaggatgagttcatgtcctttgtagggacatggatgaagctggaaaccatcattctcagcaaactatcgcaaggacagaaaaccaaacaccgcatgttctcactcatagtcaggaccctcagctgcaggtctgttggagtttactcgaagtccactccagaccctgtttgcctgagtatcagcagcagtggctgcagaacagcagatattagtgtatcacaaatgctactgcctgattgttcctctggaagttttgtctcagaggagtacccgaaggt

SEQ ID NO: 134077 - DNA, 2715 bp, Homo sapiens
atggaggaagatctaccaagcaaatggaaaacaaaaaaaggcaggggttgcaatcctagtctctgataaaacagactttaaaccaacaaagatcaaaagagacaaagaaggccattacataatggtaaagggatcaattcaacaagaagagctaactatcctaaatatatatgcacccaatacaggagcacccacattcatacagcaagtcctgagtgatctacaaagagacttagactcccacacattaataataggagactttaacaccccactgtcaacatcagacagatcaacgagacagaaagtcaacaaggatacccaggaattgaactcagctctgcaccaagcagacctaatagacatctacagaaccctccaccccaaatcaacagaatatacatttttttcagcaccacaccacacctattccaaaattgaccacatacttggaagtaaagcactcctcagcaaatgtaaaagaacagaaattataacaaactatctctcagaccacagtgcaatcaaactagaactcatgattaagaatctcactcaaaaccactcaaccatatggaaactgaacaacctgctcctgaatgactactgggtacataaggaaatgaaggcagaaataaagatgttctttgaaaccaacgagaacaaagacacaacataccagaatctctgggacacattcaaagcagtgtgtagagggaaatttatagcactaaatgcccacaagagaaagcaggaaagatccaaaattgacaccctaacatcacaattaaaagaactagaaaagcaagagcaaacactttcaaaagctagcagaaggcaagaaataactaaaatcagagcagaactgaaggaaatagagacacaaaaaacccttcaaaaaattaacgaatccaggagcaggttttttgaaaggatcaacaaaattgatagatagatcactagcaagagtaataaagaagaaaggagagaagaatcaaatagacacaataaaaaatgataaaggggatatcaccaccgatcccacagaaatacaaactaccatcagagaatcctataaacacctctatgcaaataaactagaaaatctagaagaaatggataaattcctcgacacatacaccctcccaagactaaaccaggaagaagttgaatctctgaatagaccaataacaggctctgaaattgtggcaatagtcaatagcttaccaaccaaaaagagtccaggaccagatggattcacagccgaattctaccagaggtacaaggaggaactagtacccttccttctgaaactcttgcaatcaatagaaaaagagggaatcctccctcactcattttatgaggccagcatcatcctgataccaaagcctggcagagacacaacaaaaaaaagagaattttagaccaatatctttgatgaacatcgatgcaaaaatcctcaataaaatactggcaaaccaaatccagcagcacatcaaaaagcttatccaccatgatcaagtgggcttcatccctgggatgcaaggctggttcaatacatgcaaatcaataaatgtaatccagcatataaacagaaccaaagacaaaaaccacatgattatctcaatagatgcagaaaaggcctttgacaaaattcaacaacccttcatgctaaaaactctcaataaattagtgttggaagttctggccagggcaattaggcaggagaaggaaataaagggtattcaattaggaaaagaggaagtcaaattgtccctgtttgcagatgacatgattgtagatctagaaaaccccattgtctcagcccaaaatctccttaagctgataagcaacttcagcaaagtctcaggatacaaaatcaatgtacaaaaatcacaagcattcttatacaacaataacagacagacagagagccaaatcatgagtgaactcgcattcacaattgcttcaaagagaataaaatacctaggaatccaacttacaagggacgtgaaggacctcttcaacgagaactacaaaccactgctcaatgaaatacaagaggatacaaacaaatggaagaacattccatgctcatgggtaggaagaatcaatatcgtgaaaatggccatactgcccaaggtaatttatagattcaatgccatccccatcaagctaccaatgactttcttcacagaattggaaaaaactactttaaagttcatatggaaacaaaaaagagcccgcatggccaagtcaatcctaagccaaaagaacaaagctggaggcatcacgctacctgacttcaaactatactacaaggctacagtaaccaaaacagcatggtactggtaccaaaacagagatatagatcaatggaacagaacagagccctcagaaataatgctgcatatctacaactatctgatctttgacaaacctgagaaaaccaagcaatggggaaaggattccctatttaataaatggtgctgggaaaactggctagccatatggagaaagctgaaactggatcctttccttacaccttatacaaaaattaattcaagatggattaaagacttaaacgttagacctaaaaccataaaaaccctagaagaaaacctaggcattagcattcaggacataggcatgggcaaggacttcatgtctaaaacaccaaaagcaatggcaagaaaagccaaaattgacaaatga

SEQ ID NO: 134078 - DNA, 4555 bp, Homo sapiens
atggtggcctccagatcctctagagtcggtgtcttctatggaggtcaaaacagcgtggatggcgtctccaggcgatctgacggttcactaaacgagctctgcttatatagacctcccaccggggcgtacttggcatatgatacacttgatgtactgccaagtgggcagtttaccgtaaatactccacccattgacgtcaatggaaagtccctattggcgttactatgggaacatacgtcattattgacgtcaatgggcgggggtcgttgggcgatgcagccacttggccagctgggtcagctcgaacacctcggagaccggcgcgatcaggtcctcgaccgaagtggacgctcccgacgactcgatgctgctcagcacctgcgacatcgacctgaccgccgcccgcagggcatggttggggtgcttaccaaccaaaaagagcccaggaccagatggattcacagcagaattctaccagaggtgcaaggaggaactggtaccgttccttctgaaactattccaatcgatagaaaagagggaatccttcctaacttatttgatgaggccagcatcatcctgataccaaagcggggcagagacaccaccaaaaaagagaattttagaccaatatccttgatgaacattgatgcaaaaatcctcaataaaatactggcaaaccgaaaccagcagcacatcaaaaagcttatccaccatgatcaagtgggtttcatccctgggatgcaaggctggttcaatatatgcaaatcaataaatgtaatccagcatataaacagaaccaaagacaaaaaccacatgattatctcaatagatgcagaaaaggcctttgacaaaattcaacaacccttcatgctaaaaactcttaataaattaggtattgatgggacgtatctcaaaataataagagctatctatgacaaacccacagccaatatcatactgaatgggcaaaaactggaagcattccctttgaaaactggcacaagacagggatgccctctctcaccactcctattcaacatagtgttggaagttctggccagggcaatcaggcaggagaaggaaataaagggtattcaattaggaaaagaagaagtcaaattgtccctgtttgcagatgacatgattgtatatctagaaaaccccatcgtctcagcccaaaatctccttaagctaataagcaacttcagcaaagtctcagcatacaaaatcaatgtacaaaaatcacaagcattcttatacaccaataacagacaaacagagagccaaatcatgagtgtattcccattcacaattgcttcaaagagaataaaatacttaggaatccaacttgcaaggaatgcgaaggacctcttcaaggagaactacaaaccactgctcaatgaaataaaagaggatacaaagaaatggaagaacattccatgctcatgggtaggaagaatcaatatcgtgaaaatggccatactgcccaaggtaatttacagattcaatgccatccccatcaagctaccaatgactttcttcacagaattggaaaaaactactttaaagttcatatggaaccaaaaaagagcccgcatcgccaagtcaatcctaagccaaaagaacaaagctggaggcatcacgctacctgacttcaaactacactacaagattacagtaaccaaaacagcatggtactggtaccaaaacagagatatagatcaatggaacagaacagagccctcagaaataacgccgcatatctacaactatctgatctttgacaaacctgagaaaaacaagcaatggggaaaggattccctatttaataaatggtgctgggaaaactggctagccatatgtagaaagctgaaactggatcccttccttacaccttatacaaaaattcatccaagatggattaaagacttaaacgttagacctaaaaccataaaaaccctagaagaaaacctaggcaataccattcaggacataggcatgggcaaggacttcatgtctaaaacaccaaaagcaatggcagcaaaagccaaaattgacaaatgggatctaattcaactaaagagcttctgcacagcaaaagaaactaccatcagagtgaacaggcaacctacaaaatgggagaaaattttcgcaacctactcatctgacaaagggctaatatccagaatctacaaagaactcaaacaaatttacaagaaaaaaaaaacaaacaatcccatcaaaaagtgggcgaaggatatgaacagacacttctcaaaagaagacacttatgcagccaaaaaacacatgaaaaaatgctcagcatcactggccatcagagaaatgcaaatcaaaaccacataccatgctggaccagatggatttacagccgaattctaccagaggtacaaggaggaactggtaccattccttctgaaactattccaatcaatagaaaaagagggaatcctccctaactcattttatgaggccagcatcatcctgataccaaagcctggtagagacacaaccaaaaaagagaattttagaccaatatccttgatgaacattgatgcaaaaatcctcaataaaatactggcaaaacgaatccagcagcacatcaaaaagcttatccaccatgatcaagtgggtttcatccctgggatgcaaggctggttcaatatatgcaaatcaataaacgtaatccagcatataaacagaaccaaagacaaaaaccacatgattatctcaatagatgcagaaaaggcctttgacaaaattcaacaactcttcatgctaaaaactctcaataaattaggtattgatgggacgtatctcaaaataataagagctatctatgacaaacccacagccaatatcatactgaatgggcaaaaactggaagcattccctttgaaaactggcacaagacagggatgccctctctcaccactcctattcaacatagtgtgggaagttctggccagggcaatgaggcaggagaaggaaataaagggtattcaattaggaaaagaggaagtcaaattgtccctgtttgcagacgacatgattgtgtatctagaaaaccccattgtctcagcccaaaatctccttaagctgataagcaacttcagcaaagtctcaggatacaaaatcaatgtacaaaaatcacaagcattcttatacaccaataacagacaaacagagagccaaatcatgagtgaactcccattcacaactgcttcaaagagaataaaatacctaggaatccaacttacaagggatgagaaggacctcttcaaggagaactacaaaccactgctcaatgaaataaaagaggatacaaagaaatggaagaacattccatgctcatgggtaggaagaatcaatatcgtgaaaatggccatactgcccaaggtaatttatagattcaatgccatccccatcaagctaccaatgactttcttcacagaactggaaaaaactaccttaaagttcatatggtaccaaaaaagagcccgcatcaccaagtcaatcctaagccaaaggaacaaagctggagacatcacgctacctgacttcaaactatactacaaggctacagtaaacaaaacagcatggtactggcaccaaaacagacatatagatcaatggaacagaacaaagccctcagaaataacgctgcatatctacaactatctgttctttgacaaccctgacaaaaacaagaaatggggaaaggattccctatttaataaatggtgctgggaaaactggctagccatatgtagaaagctgaaactggatcccttccttacaccttatacaaaaattaattcaagatggattaaagacttaaacattagacctaaaaccataaaaaccctagaagaaaacctaggcattaccattcaggacataggcatgggcaagtacttcatgactaaaacaccaaaagcaatggcaacaaaagccaaaattgacaaatgggatctaattaaactaaagagcttctgcacaggcaaagaaactaccatcagagtgaacaggcaacctacaaaatgggagaaaattttcgcaacctactcatctgacaaagggctaatatccagaatctacaatgaactcaaacaaatttacaagaaaaaaacaaacaaccccatcaaaaagtgggcgaaggacatgaacagacacttctcaaaagaagacatttatgcagccaaaaaacacatgaaaaaatgctcaccatcactggccatcagagaaatgcaaatcaaaaccacaatgagataccatctcacaccaacccacttattgtcattggaattgaagaatgtctcagaggaaaagaaaaacttgaaacattatactattggaattcagacacggaccaccaggtctgatggctggggtggccgtaatggaagtcagaccacaaaaaggagcaacccagcttctgagagaacatttcagctaaagcataagttgatagatgtcacaatccaagttcttttagatttccacgcaggaacttcagagttggtgacaagaattg

SEQ ID NO: 134079 - DNA, 4354 bp, Homo sapiens
atgggagactttaacaccccactgtcaacattagacagatcaatgagacagaaagtcaacaaggatacccaggaattgaactcagctctgcaccaagcaaacctaatagacatctacagaactctccaccccaaatcaacagaatatacatttttttcagcaccacaccacacctattccaaaattgaccacatacttggaagtaaagctctcctcagcaaatgtaaaagaacagagattataacaaactatctctcagaccacactgcaatcaaactagaactcaggattaagaatctcactcaaaaccgctcaactacatggaaactgaacaacctgctcctgaatgactactggatacataacgcaatgaaggcagaaataaagatgttctttgaaaccaacgagaacaaagacacaacataccagaatctctgggacacattcaaagcagtgtgtagagggaaatttatagcactaaatgcccacaagagaaagcaggaaagatccaaaattgacaccctaacatcacaattaaaagaactagaaaagcaagagcaaacacattcaaaagatagaagaaggcaagaaataactaaaatcagagcagaactgaaggaaatagagacacaaaaaacccttcaaaaaattaatgaatccaggagctggttttttgaaaggatcaacaaaattgatagaccgctagcaagactaataaagaaaaaaagagagaagaatcaaatagacacaataaaaaatgataaaggggatatcaccaccgatcccacagaaatacaaactaccatcaggagaatactacaaacacctctacgcaaataaactagaaaatctagaagaaatggataaattcctcgacacatacactctcccaagactaaaccaggaagaagttgaatctctgaatagaccaaataacagggatctgcaattgtggcaataatcaatagtttaccaaccaaaaagagtccaggaccagatggattcacagccgaattccaccagaggtacaaggaggaactggtaccattccttctgaaactattccaatcaatagaaaaagaaggaatcctccctaactcattttatgaggccagcatcattctgataccaaagccgggcagagacacaaccaaaaaagagaattttagaccaatatccttgatgaacattgatgcaaaattcctcaataaaatactggcaaaacgaatccagcagcacatcaaaaagcttatccaccatgatcaagtgggcttcatccctgggatgcaaggctggttcaatatacgcaaatcaataaatgtaatccagcatataaacagagccaaagacaaaaaccacatgattatctcaatagatgcagaaaaagcctttgacaaaattcaacaacccttcatgctaaaaactctcaataaattagaattggaagaaactactgtaaagttcatatggaaccaaaaaagagcccacatcgccaagtcaatcctaagccaaaagaacaaagctggaggcatcacactacgtgacttcaaactatactacaaggctacagtaaccaaaacagcatggtactggtaccaaaacagagatatagatcaatggaacagaacagagccctcagaaataacgctgcatatctacaactatctgatctttgacaaacctgagaaaaacaagcaatggggaacggattccctatttaataaatggtgctgggaaaactggctagccatatgtagaaagctgaaactggatcccttccttacaccttatacaaaaatcaattcaagatggattaaagacttaaacgttagacctaaaaccataaaaaccctagaagaaaacctaggcattaccattcaggacataggcatgggcaaggacttcatgtctaaaacaccaaaagcaatggcaacaaaagccaaaattgacaaatgggatctaattaaactaaagagcttctgcacagcaaaagaaactaccatcagagtgaacaggcaacctacaaaatgggagaaaattttcacaacctactcatctgacaaagggctaatatccagaatctacaatgaactcaaacaaatttacaagaaaaaaacaaacaaccccatcaaaaagtgggcaaaggacatgaacagacacttctcagaagaagacatttatgcagccaaaaaacacatgaaaaaatgctcatcatcactggccatcagagaaatgcaaatcaaaaccacaatgagataccatctcacaccagttagaatggcaatcattaaaaagtcaggaaacaacagatgggacacaacagtcatgggctgtctcagctgcccaaagcctgaggcagaccacatgagagctgtggcttcttcttggattcagagagaagtaatggaaggcctgtctgatgttgcttcttttgcaactaaacttaaaaacactctcatccagtaccatagcattgaagaagataagtggcgagttgctaagaaaacgcatgtaaacagaaccaacgacaaaaaccatgtgattatctcaatagatgcagaaaaggcctctggcaaaattcaacaacccttcatgctaaaaactctcaataaactaggtattgataggacgtatctcaaaataataagagctatatatgacaaacccacagacaatatcatactgaatgggcaaaaactggaagcattccctttgaaacctggcacaagacagggatgccctctctcaccactcctattcaacatagtgttggaagttctggccagggtaatcaggcaggagaaggaaataaagggtgttcaattaggaaaagaggaagtcaaattgtccctgtttgcagatgacatgattgtatatctagaaaaccccatcgtctcaccccaaaatctccttaaactgataggcaacttcagcaaggtctcaggatacaaaatcaatgtgcaaaaatcacaagcattcttatacaccaataagagacaaacagagagccaaatcatgagtgaactcccattcacaattgcttcaaagagaataaaatacctaggaatccaacttacaagggatgtgaaggacctcttcaaggagaactacaaaccactgctcaaggaaataaaagaggatacaaacaaatggaagaacattccatgctcatgggtaggaagaatcaatatcatgaaaatggccatactgcccaaggtaatttatagattcaatgccatccccatcaagctaccaatgactttcttcacagaattggataaaactactttaaagttcatatggaaccaaaagagagcccacaattccaagtcaatcctaagccaaaagaacaaagctggaggcatcacactacctgacttcaaactatactacaaggctacagtaaccaaaacagtatggtactggtaccaaaacagagatatagatcaatggaacagaacagagccctcagaaataatgctgcttatctacaactatctgatctttgacaaacctgacaaaaacaagaaatggggaaaggattccctatttaataaatggtgctgggaaaactggctagccatatgtagaaagctgaaactggatcccttccttacatcttatgcaaaaatcaattcaagatggattaaagacttaaatgttcgacctaaaaccataaaaaccctagaagaaaacctaggcaataccattcaggacataggcatgggcaaggacttcatgtctaaaacacgaaaagcaatggcaacaaaagccaaaattgacaaatggaatctcattaaactaaagagcttcttcacagcaaaagaaactaccatcagagtgaacaggcaacctacagaatgggagaacatttttgcaatctactcatctgacaaagggctaatatccagaatctacaatgaactcaagcaaatttacaagaaaaaaacaaacaaccccatcaaaaagtgggagaaggatatgaacagacacttctcaaaagaagacatttatgcagccaaaagacacatgaaaaaatgcccatcatcactgaccatcagagaaatgcaaatcaaaaccacaatgagataccatctcacaccagttagaatggcgatcattaaaaagtcaggaaacaacaggtgctggagaggatgtggagaaacaggaacactttcacactgttggtgggactgtaaactaatcaaccattgtggaatttttgagagattaaggaccgaagactggtggggactcataaatgatacaagtaaagtattagccacaacagaagaaaaaggggtgcccaaacgcataatcttgaaatttgatgtctgtgctgtcattaatagca

SEQ ID NO: 134080 - DNA, 3298 bp, Homo sapiens
atggtgaagggatcaattcaacaagaggagctaactatcctaaatatttatgcacccaatacaggagcacccagattcataaagcaagtcctgagtgacctacaaagagacttagactcccacacattaataatgggagactttaacaccccactgtcaacattagacagatcaacgagacagaaagtcaacaaggatacccaggaattgaactcagctctgcaccaagcagacctaatagacatcaacagaactctccaccccaaatcaacagagtatacatttttttcagcaccacaccacacctattccaaaattgaccacatagttggaagtaaagctctcctcagcaaatgtaaaagaacagaaattataacaaactatctctcagaccacagtgcaatcaaactagaactcaggattaagaatctcactcaaagccgctcaactccatggaaactgaacaacctgctcctgaatgactactgggtacataacgaaatgaaggcagaaataaagatgttctttgaaaccaacaagaacaaagacaccacataccagaatctctgggacgcattcaaagcagtgtgtagagggaaatttatagcactaaatgcctacaagagaaagcaggaaagatccaaaattgacaccctaacatcacaattaaaagaactagaaaagcaagagcaaacacattcaaaagctagcagaaggcaagaaataacgaaaatcagagcagaactgaaggaaatagagacacaaaaaacccttcaaaaaatcaatgaatccaggagctggttttttgaaaggatcaacaaaattgatagaccgctagcaagactaataaagaaaaaaagagagaagaatcaaatagacacaataaaaaatgataaaggggatatcaccaccgatcccacagaaatacaaactaccatcagagaatactacaaacacctctacgcaaataaactagaaaatctagaagaaatggatacattcctcgacacatacactctcccaagactaaaccaggaagaagttgaatctctgaatagaccaataacaggctctgaaattgtggcaataatcaatagtttaccaaccaaaaagagtccaggaccagatggattcacagccgaattctaccagagagctatctatgacaaacccacagccaatatcatactgaatgggcaaaaactggaagcattccctttgaaaactggcacaagacagggatgccctctctcaccgctcctattcaacatagtgttggaagttctggccagggcaatcaggcaggagaaggaaataaagggtattcaattaggaaaagaggaagtcaaattgtccctgtttgcagatgacatgattgtttatctagaaaaccccatcgtctcagcccaaaatctccttaagctgataagcaacttcagcaaagtctcaggatacaaaatcaatgtacaaaaatcacaagcattcttatacaccaaaaacagacaaacagagagccaactcatgagtgaactcccattcacaattgcttcaaagagaataaaatacctaggaatccaacttacaagggatgtgaaggacctcttcaaggagaactacaaaccactgctcaacgaaataaaagaggacacaaacaaatggaagaacattccatgctcatgggtaggaagaatcaatatcgtgaaaatggccatactgcccaaggtaatttacagattcaatgccatccccttcaagctaccaatgactttcttcacagaattggaaaaaactactttaaagttcatatggaaccaaaaaagagcccgcatcgccaagtcaatcctaagccaaaagaacaaagctggaggcatcacactacctgacttcaaactatactacaaggctacagtaaccaaaacagcatcggtactggtaccaaaacagagatatagatcaatggaacagaacagagccctcagaaataatgccgcatatctacactattctgatcctttggacaaacctgagaaaaacaagcatgggggaaaggcatccctaatttataaaatggctgctggggaaaactggctagcccatatgtaggaagctgaaactggatcccttccttacacattatacaaaaattaattcaagttggattaaagacttaaacgttagacctaaacccataaaaaccctagaagaaaacctaggcattaccattcaggacataggcatgggcaaggatttcatgtctaaaacaccaaaagcaatggcaacaaaagccaacattgacaaatgggatctaattaaactaaagagcttctgcacagcaaaagaaactaccatcagagtgaaaaggcaacttacaaaatgggagaaaattttcgcaacctactcatctgacaaagggctaatatccagaatctacaatgaactcaaacagatttacaagaaaaaaacaaacaaccccatcaaaaagtgggcaaaggatatgaacagacacttctcaaaagaagacatttatgcagccaaaagacacatgaaaaaatgctcatcatcactggccatcagagaaatgcaaatcaaaaccacaatgagataccatctcacaccagttagaatggcaatcattaaaaagtcaggaaacaacaggagagacagaacagctgaggaaacagcagaacggtggaaaatttttgaaagtgttttgagcccacccaacctgaggagagcattcaaagaaaaacaggaagaagaagtcggcttcagaaggtgggttataacaaactcctccaagctaaaacagcatgttttaacccaatgcaaggaagctaagaaccttgaaaaaaggttagaggaatttctaactagaataaccagtttagagaagaacataaatgacctaatggacctgaaaaacacagcacgagaacttcttgacgcctacacaagtatcaatagccaaattaatcaagcggaagaaaggttatcagagactgaagatcaacttaatcaaataaagcatgaggacaagattagagggaaaaaaatgaaaaggaacaaacaaagcctccaagaaatatgggactatgtgaaaaggccaaatctacgtctgattggtgtagctgaaagtgacagggagaatggagccaagttagaaaacactcttcagtatattatccaggagaacttccccaacctagcaagacaggccaacactcaaattcaggaaacacagagaccaccacaaagatactccttgagaaaagcaaccccaagacacataatcatctga

SEQ ID NO: 134081 - DNA, 3162 bp, Homo sapiens
atgggagactttaacaccccactgtcaacattagacagatcatcgagacagaaagttaacaaggatacccaggaattgaactcaactctgcaccatgcggacctaatagacatctacagaactctccacccgaaatcaactgaatatacatttttttcagcaccacaccacacctattccaaaattgaccacgtagttggaagtaaagctctcctcagcaaatgtaaaagaacagaaattataacaaactgtctctcagaccacagtgctatcaaaccagaactcaggattaagaaactcactcaaaaccgctcaactacatggaaactgaataacctgctcctgaatgactactgggtgcataacaaaatgaaggcagaaataaagatgttctttgaaaccaacgagaacaaagacacaacataccagaatctctgggacacattcaaagcagtgagtagagggaaatttatagcactaaatgcccacaagagaaagcagaaaagatgcaaaattgacaccctagcatcacaattaaaagaagtagaaaagcaagagcaaacacattcaaaagctagcagaaggcaagaaataactaaaataagagcagaactgaaggaaatagagacacaaaaaacccttcaaaacaatcagtgaatcctggagctggttttttgaaaagatcaacaaaatcgatagaccacaagcaagactaataaagaagaaaagagagaagaatcaaatagacacaataaaaaatgataaaggggatatcaccaccgatcccacagaaatacaaattaccatcagagaatactacaaacacctctatgcaaataaactagaaaatctagaagagatggataaattcctcgacacatacaccctcccaagactaaaccaggaagaagttgaatctgtgaatagaccaataacaggctctgaaattgaggcaataaccaatagcttaccaaccaaaaaaaagtccaggaccagatggattcacagccaaattctaccagaggtacaaggaggagctggtaccattccttctgaaactattccaatcaatagaaaaagagggaatcctccttgactcattttatgaggccagcatcatcctgataccaaagcctggcagagacacaacaaaaaaaagagaattttagaccaatatccctgatgaacatcgatgtaaaaatcctcaataaaatactggcagaccaaatccagcagcacatcaaaaagcttatatacaccatgatcaagtgggcttcatccctgggatgcaaggctggttcaacatattgttggaagttctggccagggcaatcaggcaggagaaggaaataaagggtattcaattaggaaaagagaaagtcaaattgtccctgtttgcagatgacatgattgtgtatctagaaaaccccatcgtctcagccccaaatctcctcaagctgataagcaagttcagcaaagtctcaggatacaaaatcaatgtacaaaaatcacaagcattcttatacaccaataacagacaaacagagagccaaatcatgagtgaactcccattcacaactgcttcaaagagaataaaatacctaggaatccaacttacaagggatgtgaaggacctcttcaaggagaactacaaaccactgctcaatgaaattaaagaggatacaaagaaatggaagaacattccatgctcatgggtaggaagaatcaatatcgtgaaaatggccatactgcccaaggtaatttatagattcaatgccatccccatcaagctaccaatgactttcttcacagaattggaaaaaactactttaaagttcatatggaaccaaaaaagagcccgccttgccaagtcaatcctaagccaaaagaacaaagctggaggcatcacgctacctgacttcaaactatactacaaggctacagtaaccaaaacagcatggtaccggtaccaaaacagagatatagaccaatggaacagaacagagccctcagaattaatgccacatatctacaactatctgatctttgacaaacctgagaaaaacaagcaatggggaaaggattccctatttaagaactggtgctgggaaaactggctagccatatgtagaaagctgaaactggatcccttccttacaccttatacaaaaattaattcaagatggattaaagacttaaatgtgagacctaaaaccataaaaaccctagaagaaaacctaggcattaccattcaggacataggcatcggcaaggacttcatgtctaaaacaccaaaagcaatggcagcaaaagccaaaattgacaaatgggatctaattaaactaaagagcttctgcacagcaaaagaaactaccatcagagtgaacaggcaacctacaaaatgggagaaaagttttgcaatctactcatctgacaaagggctaatatccagaatctacaatgaacacaaacaaatttacaagaaaaaaacaaacaacccccatcaagaagtgggcgaaggatatgaacagatgcttctcaaaagaagacatttatgcagccaacagacacatgaaaaaatgctcatcatcactggccatcagagaaatgcaaatcaaaaccactatgagataccatctcacagcagttagaatggcaatcattaaaacatcaggaaacaacaggtgctggagaggatgtggagaaataggaacacttttacactgttggtgggactgtaaactagttcatccattgtggaagtcagtgtggcgattcctcagggatctagaactagaaataccatttgacccagccatcctattactgggtatatacccaaaggattataaatcatgctgctataaagacacatgcacacatgagaaagcagagatccagaaaagtaaaggaatcagagattatggagaaataggtactagaactgaggatatggactcccagttcagacctctttccgttgttcgggcacaaattatcccctttgaatttccctgggaaggaatacctctgggtggacccttcccccggcattcctgcagctaccctgtgggcctagcccttttgtaccacagtagctcagcagctggaccagtgagaggacacctctccctgcagtggaattccaggatgactagttga

SEQ ID NO: 134082 - DNA, 3769 bp, Homo sapiens
acacagactggcaaattggataaagagtcaagacccatcagtgtgctgtattcaggaagcctatctcacatgcagagacacacataggctcaaaataaaaggatggaggaagatctaccaagcaaatggaaaacaaaaaaaggcaggggttgcaatcctagtctctgataaaacagactttaaaccaacaaagatcaaaagagacaaagaaggcctttacataatggtaaagggatcaattccacgagaagagctaactatcctaaatatatatgcacccaatccagaagcacccagattcacaaagcaagtcctgagtgacctacaaagagacgtagactcccacacaataatactgggagactttaacaccccactgtcagcattagacagatcaatgagacagaaagttaacaaggatacccaggaattgaactcagctctgcaccaagcggacctaatagacatctacagaactctccacccaaaatcaacagaatatacatttttttcagcaccacaccacacctattccaaaattgaccacagagttggaagtaaagctcttctcagcaaatgtaaaagatcagaaattataacaaactgtctctcagaccacagtgcaatcaaactagaactcaggattaagaaactcactcaaaactgctcaactacatggaaactgaacaacctgctcctgaatgactactgggtacataacgaaatgaaggcagaaataaagatgttctttgaaaccaatgagaacaaagacacaacataccataatctctgggacacattcaaagcagtgtgtagagggaaatttatagcactaaatgcccacaagagaaagcaggaaagatccaaaattgacaccctaacatcacaattaaaagaactagaaaagcaagagcaaacacattcaaaagctagcagaaggcaagaaataactaaaatcagagcagaactgaaggaaatagagacacaaaaaacccttcaaaaaattaatgaatccaggagctggttttttaaaaagatcaacaaaattgatagaccgctagcaagactcataaagaagaaaagagagaagaatcaattagactcaataaaaaatgataaaggggatatcaccacctatcccacagaaatacaaactacaatcagagaatactacaaacacctctacacaaataaactagaaaatctagaaaaaatggataaattcctcgacacatacaccctcccaagactaaaccaggaagaagttgaatctctgaatagaccaataacaggatctgaaattgtggcactaatcaatagcttaccaaccaaaaagagtccaggaccagatggattcacagccgaattctaccagaggtacaaggaggaactgcatcattctgataccaaagccgggcagagacacaacaaaaaaaagagaattttagaccaatatccttgatgaacattgatgcaaaaatcctcaataaaatactggcaaaccgaatccagcagcacatcaaaaagcttatccaccatgatcaagtgggcttcatccctgggatgcaaggctggttgaatatatgcaaatcaataaattgtaatccagcatataaacagagccaaagacaaaaaccacatgattatctcaatagatgcagaaaaagcctttgacaaaattcaacaacgcttcaggctaaaaactctcaataaattaggtattgatgggacgtatttcaaaataataagagctatctatgacaaacccacagccaatatcatactgaatgggcaaaaactgaaagcattccctttgaaaactggcacaagacagggatgccctctctcaccactcctattcaacatagtgttggaagctctggccagggcaattaggcaggagaaggaaataaagggtattcaattaggaaaagaggaagtcaaattgtccctgtttgcagacgacatgattgtatgtctagaaaaccccattgtctcagcccaaaatctccttaagctgataagcaacttcagcaaagtctcaggatacaaaatcaatgtacaaaaatcacaagcattcttatacaccaacaacagacaaacagagagccaaatcatgagtgaactcccattcacaattgcttcaaagagaataaaatacctaggaatccaacttacaagggatgtgaacgacctcttcaaggagaactacaaaccactgctcaaggaaataaaagaggatacaaacaaatggaaaaacattccatgctcatgggtaggaagaatcaatatcatgaaaatggccataatgcccaaggtaatttacagattcaatgccatccccataaagctaccaatgactttcttcacagaattggaaaaaactactttaaagttcatatggaaccaaaaaagagcccgcatcaccaagtcaatcctaagccaaaagaacaaagctggaggcatcacactacctgacttcaaactatactacaaggctacagtaaccaaaacagcatggtactggtaccaaaacagagatatagatcaatggaacagaacagagccctcagaaataacaccgcatatctacaactatctgatctttgacaaacctgagaaaaacaagcaatggggaaaggattccctatttaataaatggtgctgggaaaactggctagccatatggagaaagctgaaactggatcccttccttacaccttatgcaaaaatcaattcaagatggattaaagatttaaatgttagacctaaaaccataaaaaccctagaagaaaacctaggcaataccattcaggacataggcatgggcaaggacttcatgtccaaaacaccaaaagcaatggcaacaaaagacaaaattgacaaatgggatctaattaaactaaagagcttctgcacagcaaaagaaactaccatcagagtgaacaggcaacctacaaaatgggagaaaattttcgcaacctactcatctgacaaagggctaatatccagaatctacaatgaactcaaacaaatttacaagaaaaaaacaaacaaccccatcaaaaagtgggcgaaggacatgaacagacacttctcaaaagaagacatttatgcagccaaaaaacacatgaaaaaatgctcatcatcactggccatcagagaaatgcaaatcaaaaccacaatgagataccatctcacaccagttagaatggcaatcattaaaaagacaggaaacaacaggtgctggagaggatgtggagaaataggaacacttttacactgttggtgggactgtaaactagttcaaccattgtggaagtcagtgtggcgattcctcagggatctagaactagaaataccatttgacccagccatcccattactgggtatatacccgaatgactataaatcatgctgctataaagacacatgcacacctgggcaccctagaaagcagcccaccctgggttctataccccagaagtcacaggatcattgcgctgaagtgctaaaggacatcctgtttctagcagggactggaggagcccaggctcttctggccagtttctccttatctcaggatgttgaattcccagcaccttctgcagttattcttgagaactacaagcaaaagactgaaatgagcaccacctactggcagagcctaacagggccagccggcaaacaagaaaactgttcacagtcccagccccaagatcccaagtatacagtatggatgtgggggtttagatccaagaaacaatag

SEQ ID NO: 134083 - DNA, 15879 bp, Homo sapiens
atgggagactttaacaccccactgtcaacattagacagatcaatgagacagaaagtcaaaaaggatacccaggaattgaactcagctctgcaccaagcagacctaatagacatctacagaactctccaccccaaatcaacagaatatacatttttttcagcaccacaccacacctattccaaaattgaccacatacttggaagtaaagctctcctcagcaaatgtaaaagaacagaaattataacaaactatctctcagacggcagtgcaatcaaactagaactcaggattaagaatctcactcaaaaccgctcaactacatggaaactgaacaacctgctcctgaatgactactgggtacctaacgaaatgaaggcagaaataaagatgttctttgaaaccaacgagaacaaagacacaacataccagaatctctgggacgcattcaaagcagtgtgtagagggaaatttatagcactaaatgcccacaagagaaagcaggaaagatccaaaattgacaccctaacatcacaattaaaagaactagaaaagcaagagcaaacacattcaaaagctagcagaaggcaagaaataactaaaatcagagcagaactgaaggaaatagagacacaaaaaacccttcaaaaaattaatgaatccaggagctggttttttgaaaggatcaacaaaatagatagaccgctagcaagactaataaagaaaaaaagagagaagaatcaaatagatacaataaaaaatgataaaggggatatcaccaccaatcccacagaaatacaaactaccatcagagaatactacaaacacctctacgcaaataaactagaaaatctagaagaaatggataaattccttgacacatacactctcccaagactaaaccaggaagaagttgaatctctgaatagaccaataacaggatctgaaattgtggcaataatcaatagcttaccaaccaaaaagagtccaggaccagatggattcacagccgaattctaccagaggtacaaggaggaactggtaccattccttctgaaactattccaatcaatagaaaaagagggaatcctcctgttggaagttctggccagggcaattaggcaggagaaggaaataaagggtattcaattaggaaaagaggaagtcaaattttccctgtttgcagacgacatgattgtatatctagaaaaccccattgtctcagcccaaaatctccttaagctgataagcaacttcagcaaagtctcaggatacaaaatcaatgtacaaaaatcacaagcattcttatacaccaacaacagacaaacagagagccaaatcatgagtgaactcccattcacaattgcttcaaagagaataaaatacctaggaatccaacttacaagggatgtgaaggacctcttcaaggagaactacaaaccactgctcaaggaaataaaagaggatacaaacaaatgcaagaacattccatgctcatgggtaggaagaatcaatatcgtgaaaatggccatactgcccaaggtaatttacagattcaatgccatccccatcaagctaccaatgcctttcttcacagaattggaaaaaactactttaaagttcatatggaaccaaaaaagagcccgcatcgccaagtcaatcctgagccaaaagaacaaagctggaggcatcacgctacctgacttcaaaccatactacaaggctacagtaaccaaaacagcatggtactggtaccaaaagagagatatagatcagtggaacagaacagagccctcagaaataacgccgcatatctacaactatctgatctttgacaaacctgagaaaaacaagcaatggggaaaggattccctatttaataaatggtgctgggaaaactggctggccatatgtagaaagctgaaactggatcccttccttacaccttatacaaaaatcaattcaagatggattaaagacttaaacgttagacctaaaaccataaaaaccctagaagaaaacctaggcaataccattcaggacataggcatgggcaaggacttcatgtctaaaacaccaaaagcaatggcaacaaaagacaaaattgacaaatgggatctaattaaacttaagagcttctgtacagcaaaagaaactaccatcagagtgaacaggcaacctacaaaatgggagaaaattttcacaacctactcatctgacaaagggctaatatccagaatctacaatgaactcaaacaaatttacaagaaaaaaacaaacaaccccatcaaaaagtgggcgaaggacatgaacagacacttctcaaaagaagacatttatgcagccaaaaaacacatgaaaaaatgctcatcatcactggccatcagagaaatgcaaatcaaaaccacaatgagataccatctcacaccagttagaatggcgatcattaaaaagtcaggaaacaacagagacgttggcaatgtggttgaagccatgtatggggaccttcctcctccaattatgctgattggacatagcatgggtggtgctattgcagtccacacagcatcatccaacctggtaccaagcctcttgggtctgtgcatgattgatgttgtagaaggtacagctatggatgcacttaatagcatgcagaatttcttacggggtcgtcctaaaaccttcaagtctctggagaatgctattgaatggagaaatatcaaagatctatcttgggcagatagcatcaagaatgtagctgctgccagcttggcttgtatctcaggtgccctgcctgcttccgcagtaacaacaagcccagataataagaggatggccaggaatgtcttgaaatatgaaaggctcttggcagagagccccaaccacgtggtagctgaggctgtcatccagaggcccaatataccccacctgcagaccagagacacctacgaggggctatgtcagaccctgggttcccagcccactctctaccagatccctagcctctactgttcctatgagaccaattccaacgcctacctgctgctccagcccatccggaaggaggtcatccacctggagccctacattgctctctaccatgacttcgtcagtgactcagaggctcagaaaattagagaacttgcagaaccatgggaacagagctcctcaccagcaacggaacaaagctggatggagaatgactttgatgagttgagagaagaaggcttcagaagatcggtaataacaaacttctccgagctaaaggaggatgttcaaacaaatggcaaagaagttaaaaactttgaaataaaaattatacgtatgtataactagaataaccaatgcagagaagtacttaaaggagctgatggagctgaaagccaaggctcaagaactatgtgaagaatgcagaagcctcaggagccgacacgatcaactggaagaaagggtatcagtgatggaagatcaaatgaatgaaatgaagcaagaagagaagtttagagaaaaaagaagaaaaagaaacgaacaaagcctccaagaaatatgggactatgtgaaaagaccaaatctacgtctgattggtgtacctgaaagtgatggggagaatggaaccaagttggaaaacactctgcaggatattatccagaagaatttccccaatctagcaaggcaggccaacatttacattcaggaaatacaggaaatacagagaacaccacaaagatactcaccgagaagagcaactccaagacacataattgtcagattcaccaaggttgatatgaaggaaaaaatgttaagggcagtcagagagaaaggctttaaaccaacaaagatcagaagagacaaagaaggccattacataatggtaaagggatcaattcaacaagaagagctaactatcctaaatatatatgcacccaataccggaggacccagattcataaagcaagtcctgagtgacctacaaagagacttagactcccacacaataataatgggagactttaacaccccactgtcaacattagacagatctatgaggcagaaaattaacaaggatatccaggaattgaactcagctctgcaccaagtggacctaatagacatctacagaactctccagcccaaatcaacagaatatacattttttttcagcaccacaccacacctattcccaaaattggaccaccatagttggaagtaaagctctcctcagcaaatgtaaaagaacagaaattataaccaaactatctctcagacccacagtgccaatcaaactgaaactcaggattaagaatctcactcaaaaccactcaactacatggaaactgaacaacctgctcctgaatgactactgggtacataacgaaatgaaggcagaaataaagaaagatgttctttgaaacccaacgagaacaaagacaccaacataccagaatttttgggacgcattcaaagcagtgtgtagagggaaattcatagcaaaaaaatgcccacaaaagaaagcaaggaaggtcccaaaattgacaccctaacatcacaattaaaagaactagaaaagcaaagagcaaacacattcaaaagctagcagaaggcaagaaataactaagatcagagcagaactgaaggaaatagagacacaaaaaaacctccttcaacccttcaaaaaaatcaatgaattccaggagctggtttttttgaaaggatcaacaaaattgatagaccgctagcaagactaataaagaaaaaaagagagaagaaatcaaatagacggcaataaaaaatgataaaggggatatcaccaccaccgatcccacagaaatacaaactaccatcagagaatactacaaacacctctacgccaaataaacttgaaaatctagaaggaatggataaattcctcgacacatacactctcccaagactaaaccaggaagaagttgaatctctgaatagaccaataacaggagctgaaattgtggcaataatcaatagcttaccaaccaaaaaagagtcccaggaccagatggattccacagccgaatttctaccagaggtacaaggaggagcttgtacccattccttctgaaactattccaattaatagaaaaagagggaatcctccctaactcattttatgagggccagcatcattctgataccaaagccaggcagagacacaacaacaacaaaaaaagaattttagaccaatatccctgatgaacatcgatgcaaaaatcctcaataaaatactagcaaaccgaatccagcagcacatccaaaagcttatccaccatgatcaagagggcttcatccctgggatgcaaggctggttcaacatacacaaatcaataaacgtaatccagcatataaacagaaccaaagacaaaaaccacatgattatctcaatagatgcagaaaaagcctttgacaaaattcaacaacccttcatgctaaaaactctcaataaattaggtattgatgggacgtatttcaaaataataagagctatctatgacaaacccacagccaatatcatactgaatgggcaaaaactggaagcattccctttgaaaactggcacaagacagggatgccctctttcaccacatactaccattaacatagtattctgccccatagtgttctggccagggcaatcaggcaagagaaggaaataaagggtattcaattaggaaaagaggaagtcaaattgtccctgtttgcagacgacatgattgtttatctagaaaaccccattgtctcagcccaaaatctctttaagctgataagcaacttcagcaaagtctcaggatacaaaatcaatgtacaaaaatcacaagcattcttatacaccaacaacagacaaacagagagccaaatcatgagtgaactcccattcacaattgcttcaaagagaataaaatacctaggaatccaacttacaagggatgtgaaggaactcttcaaggagaactacaaaccactgctcaaggaaataaaagaggacacaaacaaatggaagaacattccatgctcatgggtaggaggaagaatcaatctcgtgaaaatggccatactgcccaaggtaatttacagattcaatgccatccccccttcaaggttacccaatgactttcttcacagaattggaaaaaaactaccttttaaaggtcattatggaaccaaaaaaggagcccgcatcgccaaggcaatcctaagccaaaagaacaaagctggaggcatcacactacctgacttcaaactatactacaaggctacagtaaccaaaacagcatggcactggtaccaaaacagcatggtactggtaccaaaacagagatatagatcaatggaacagaacagagcccctcagaaataaggcccacataccctacaactatctgatctttgacaaacctttgcttgagaaaaacaagcaatgggggaaaggattcccctatttaataaatggtgctgggaaaactggctagccatatgtagaaagctgaaactggatcccttccttacaccttatacaaaaatcaattcaagatggattaaagatttaaacgttagacctaaaaccataaaaaccctagaagaaaacctaggcatttaccattcaggacataggcatgggcaaggacttcatgtctaataaaacaccaaaagcaatggcaaccaaaagacaaaattgacaaatgggatctaattaaactaaagagcttctgcacagcaaaagagaaactaccatcagagtgaacaggcaacctacagaatgggagaaaatctttgcaatctactcatttgacaaagggctaatatccagaatctacaaagaactcaaacaaatttacaagaaaaaaaaaaaaacaaccccatcaaaaagtgggcaaaggacatgaacagacacttctcaaaagaagacatttatgcagccgaaaaaacacatgaaaaaaatgctcatcatcactggccatcagagaaatgcaaatcaaaaccactatgagatatcatctcacaccagttagaatggcaatcattaaaaagtcaggaaacaacaggagctggtattttgaaaagatcaacaaaattgatagactgctagcaagactaataaagaaaaaaagagagaagaatcaaatagacgcaataaaaaatgataaaggggatatcaccactgatcccacagaaatacaaactaccaccagagaatactataaacacctctatgcaaataaactagaaaatctagaagaaatggataaattcctcgacacatacaacctcccaagactaaagcaggaagaagttgaatctctgaatagaccaataagaggctctgaaattgtggcaataatcaatagcttaccaaccaaaaaaagtccaggaccagatggattcacagccgaattctaccacaggtacaaagaggagctggtaccattgcttctgaaactattccaatcaatagaaaaagaggtaatcctccctaactcattttatgaggccagcatcatcctgataccaaagcctgacagagacacagcaaaaaaagagaattttagaccaatatccttgatgaacatcgatgcaaaaatcctcaataaaatactggcaaaccgaatccagcagcacatcaaaaagcttatccaccatgatcaagtgggcttcatccctgggatgcaaggctggttcaacatacgcaaatcagtaaatgtaatccagcatataaacagaaccaaagacaaaaaccacatgatcatctcaatagatgcagaaaagtcctttgataaaattcaacaacacttcatgctaaaaactctcaataaattaggtattgatgggtcatatctcaaaataataagagctacctatgacaaacccacagccaatatcatactgaatgggcaaaaactggaagcattccctttgaaaactggcacaagacacggatgccccctctcaccactcctattcaacatagtgttggaagttctggccagagcaatcaggcaggagaaggaaataaagggtattcaattaggaaaagaggaagtcaaattgtccctgttcatagatgacatgattgtatatctagaaaaccccatcatctcagcccaaaatctccttaagctgataagcaacttcagcaaagtctcaggatacaaaatcaatgcgcaaaaatcacaagcattcttatacaccaataacagacaaacagagagccaaatcatgagtgaactcccattcacaattgcttcaaagagaataaaatatctaggaatccaacttacaatggacgtgaaggacttcttcaaggagaactacaaaccaatgctcaatgaaataaaagaggatacaaacaaatggaagaacattccatgctcatgggtaggaagaatcaatatcgtgaaaatggccatactgcccaagatccactccagagtgacagttctgctgcgctcagatactgtgctgcatattgtgaagcttgcagtgaaaattcctacaattgtcctgcttctggaggggagccccagggccttgaggaaacacaggcagaagccagggagtggttccagcaggcctcgagtgagacccagtgctgtgctggcatcaggtctgagtcaatgcagtcatagtggtggtggcaacaggggtgcttatgtcactccaccccaagctttagcagaaaaggcctttgacaaaattcaacaacccttcatgctaaaaactctcaataaattaggtattgatgggacatatctcaaaataataagagctatctatgacaaacccacagccaatatcatactgaatgggcaaaaactggaagcattccctttgaaaactggcacaagacagggatgccctctctcaccactcctattcaacatagccttggaagttctggccagggcaatcaggcaggagaaggaaataaagggtattcaattcggaaaagaggaagtcaaattgtccctgtttgcagatgacatgattgtatatctagaaaaccccattgtctcagcccaaattctccttaagctgataagcaacttcagcaaagtctcaggatacaaaatcaatgtacaaaaaccacaagcattcttacacaccaataacagacaaacagagaaccaaatcatgagtgaactcccattcacgattgcttcaaagagaataaaatacctaggaatccaacttacaagggacgtgaaggacctcttcaaggagaactacaaaccactgctcaaggaaataaaagaggatacaaacaaatggaagaacattccatgctcatgggtaggaagaatcaatatcgtgaaaatggccatactgcccaaggtaatttatagattcaatgccatccccagcaagctaccaatgactttcttcacagaattggaaaaaaatactttaaagttcatatggaaccaaaaaagagcccgcatcgccaagtcaatcctaagccaaaagaacaaagctggaggcatcacgctacctgacttcaaactatactacaaggctacagtaaccaaaacagcatggtactggtaccaaaaacagagatatagatcaatggaacagaataaagccctcagaaataacgccgcatatctacaactatctgatccttgacaaacctgagaaaaacaagcaatggggaaaggattccctatttaataaatggtgctgggaaaactggctagccatatggagaaagttgaaactgggtcccttccttacaccttatacaaaaattaattcaagatggattaaagacttaaacgttagacctaaaaccataaaaaccctagaagaaaacctaggcattaccatgccaggaccataggcatgggcaaggacttcatgtccaaaacaccaaaagcaatggcaacaaaagccaaaattgacaaatgggatctaattcaactaaagagctactgcacagcaaaagaaaataccatcagagtgaacaggcaacctacaaaatgggagaaaattttcgcaacctactcatctgacaaagggctaataaccagaatctacaatgaactcaaacaaatttacaagaaaaaaacaaacaaccccatcaaaaagtgggcgaaggacatgaacagacacttctcaaaagaagacatttatgcagctaaaaaacacgtgaaaaaatgctcatcatcactggccatcagagaaatgcaaatcaaaaccacaatgagataccatctcacaccagttagaatggcaatcattaaaaagtcaggaagcaacagatgctggagaggatgtggagaaataggaacacttttacactgttggtgggactgtaaactagttcaaccattgtggaagtcagtgtggcgattcctcagggatctagaactagaaataccatttgacccagccatcccattactgggtatatacccaaacgactataaatcatgctgctataaagacacatgcacattgagtctaccagaaatccgcaactgcccaacgaaaagtgtcccagtccccttctctgttgatgaaactcagtatcatgttgaagatactagtcctgtaagctggcaagtaaaagttctaggcaagcatatacatcagggaagcagctatgaagatgtttggctgcctcagcgcatgcaaggaaaactaacaaacagaaaggacatccacaccaaaaacccatctgtacatcaccatcatcaaagaccaaaagtagataaaaccacaaagatggggaaaaaacagaacagaaaaactggaaactctaaaaagcagagcgcctctcctcctccaaaggaacgcagttcctcaccagcaatgcaacaaagctggacggagaatgactttgacgagctgagagaagaaggcttcagacgatcaaattactctgagctacgggaggacattcaaaccaaaggcaaagaagttgaaaactttgaaaaaaatttagaagaatgtataactagaataaccaatacagagaagtgcttaaaggagctgatggagctgaaaaccaaggctcgagaactacgtgaagaatgcagaagcctcaggagccgatgcgatcaactggaagaaagggtatcagcgatggaagatgaaatgaatgaaatgaagcgagaagggaagtttagagaaaaaagaatacaaagaaatgaacaaagcctccaagaaatatgggactatgtgaaaagaccaaatctacgtctgattggtgtacctgaaaccttgcatcccagggatgaagcccacttgaagaatctaatagatgcaataaaaaatgataaaggggatatcaccaccgatcccacagaaatacaaactaccatcagagaatactacaaacacctctatgcaaataaactagaaaatctagaagaaacggataaattcctcgacacatacactctcccaagactaaaccaggaagaagttgaatctctgaatagaccaataacaggatctgaaattgtggcaataatcaatagcttaccaaccaaaaagagtccaggaccagatggattcacagctgaattctaccagaggtacaaggaggaactgctgataagcaacttcagcaaagtctcaggatacaaaatcaatgtacaaaaatcacaagcattcttatacaccagcaacagacaaacagagagccaaatcatgagtgaactcccattcacaattgcttcaaagagaataaaatacctaggaatccaacttacaagggatgtgaaggacctcttcaaggagaactacaaaccaccgctcaaggaaataaaagaggatacaaacaaatggaagaacattccatgctcatgggtaggaagaatcaatatcatgaaaatggccatactgcccaaggtaatttacagattcaatgccatccccattaagctaccaatgcctttcttcacagaattggaaaaaactactttaaagttcatatggaaccaaaaaagagcccgcatcgccaagtcaatcctaagccaaaagaacaaagctggaggcatcacactacctgacttcaaactatactacaaggctacagtaaccaaaacagcatggtactggtaccaaaacagagatatagatcaatggaacagaacagagctctcagaaataacgccgcatatctacaactatctgatctttgacaaacctgagaaaaacaagaaatggggaaaggattccctatttaataaatggtgctgggaaaactggctagccatatgtagaaagctgaaactggatcccttccttacaccttatacaaaaatcaattcaagatggattaaagacttaaacgttagacctaaaaccataaaaaccctagaagaaaacctaggcattaccattcaggacataggcatgggcaaggacttcatgtctaaaacaccaaaagcaatggcaacaaaagccaaaattgacaaatgggatctaattaaactaaagagcttctgcacagcaaaagaaactaccatcagagtgaacaggcaacctacaaaatgggagaaaattttcgcaacctactcatctgacaaagggctaatatccagaatctacaatgaactcaaacaaatttacaagaaaaagacaaacaaccccatcaaaaagtgggtgaaggacatcaacagacacttctcaaaagaagacatttatgcagccaaaaaacacatgaaaaaatgctcatcatcactggccatcagagaaatgcaaatcaaaaccacaatgagataccatctcacaccagttagaatggcaatcattaaaaagtcaggaaacaacagaccaaaagtagataaaaccacaaagatggggaaaaaacagagcagagaaactggaaactctaaaaagcagagtgcctctcctcctccaaaggaacgctgttcctcaccagcaacggaacaaagctggatggagaatgactttgatgacttgagagaagaaggcttcagacaatcaaactactctgagctaaaggaggaagttcgaacccatggcaaagaagttaaaaaccttgaaaaaaaattagacgaatggctaactagaataaccaatgcagagaagtccttaaaggacctgatggagctgaaaaccacagcccgagaactacatgatgaatgcacaagcctcaaaagggtatcagtgacggaagatcaaatgaatgaaatgaagcgagaagagaagtttagagaaaaaagaataaaaagaaatgaacaaagcctccaagaaatatgggactatgtgaaaagaccaaatctacacctgattggtgtacctgaaagtgacagggagaatggaaccaagttggaaaacactctgcaggatattatccaagagaacttccccaatctagtaaggcaggccaacattcaaattcaggaaatacagagaacgccacaaagatactcctcgagaagagcaactccaagacacataattgtcagattcaccaaagttgaaatgaaggaaaaaatgttaagggcagccagagagaaaggtcgggttacccacaaagggaagcccatcagactaacagctgatctcttggcagaaactctacaagccagaagagagtgggggccaatattcaacattcttaaagaaaagaattttcaacccagaatttcatatccagccaaactaagcttcatagacagatcaacgagacagaaagttaacaaggatacccaggaattgaactcagctctgcaccaagcggacctaatagacatctacagaactctccaccccaaatcaacagaatatacattcttttcagcaccacaccacacctattccaaaattgaccacatagttggaagtaaagcactcctcagcaaatgtaaaagaacagaaattataacaaactgtctctcagaccacagcgcaatcaaactagaactcaggattaagaaactcactcgaaaccactcaactacatggaaactgaacaacctgcttctgaatgactactgggtacataatgaaatgaaggcagaaataaagatgttctttgaaaccaacgagaacaaagacaaaacataccagaatctctgggacacattcaaaacagtgtgtagagggaaatttatagcactaaatgcccacaagagaaagcaggaaagatctaaaattgacaccctaacatcacaattaaaaggacttgagaagcaagagcaaacacattcaaaagctagcagaaggcaagaaataactaagatcagagcagaactgaaggaaatagagacacaaaaaacccttcaaaaaatcaacgaatccaggagctggttttttgaaaagatcaacaaaattgatagaccgctagcaagactaataaagaataaaagagaggagaatcaaatagacgcaataaaaaatgataaaggggatatcaccactgatcccacagaaatacaaactgccatcagcgaatactataaacacctctacgcaaataaactggaaaatctagaagaaatggataaattcctcgacacctacaccctcccaagactaaaccaggaagaagttgaatctctgaatagaccaataacaggctctgaaattgaggcaataattaatagcttaccaaccaaaaaaagtccaggaccagatggattcatggccgaattctaccagagggacaaggaggagctggtaccattccttctgaaactgttccaatcaatagaaaaagagggaatcctccctaactcattttatgaggccagcatcatgctgataccaaagcctggcagagacacaacaaaaaaagagaattttagaccaatatccctgatgaacatcgatgcaaaaatcctcaataaaatactggcaaaccgaatccagcagcacatcaaaaagcttatccaccatgatcaagtgggcttcatccctgggatgcaaggctggttcaacttacgcaaatcactaaacgtaatccagcatataaacagaaccaatgacaaaaaccacatgattatctcaatagatgcagaaaaggcctttgacaaaattcaacagcccttcatgctaaaaactctcaataaattaggtattgatgggatgtatctcaaaataataagagctatctatgacagacccacagccaatatcatactgaatgggcaaaaactggaagcattccctttgaaaactggcacaagacagggatgccctctctcaccactcctattcaatatagtgttggaagttctggccagggcaatcaggcaggagaaggaaataaagggtattcaattaggaaaagaggaagtcaaattgtccctgtttgcagatgacatgactgtatatttagaaaacgccatcgtctcagccccaaatctccttaagctgataggcaacttcagcaaagtctcaggatacaaaatcaatgtgcaaaaatcacaagcattcttatacactaataacagacaaacagagagccaaatcatgagtgaactcccattcagaattgcttcaaagagaataaaatacctaggaatccaacttacaagggatgtgaaggacctcttcaagcagaactacaaaccactgctcaatgaaataaaagaggatacaaacaaatggaagaacattccatgctcatgggtaggaagaatcaatatcgtgaaaatggccatactgcccaaggggacccagaggccctatgccaaggttagagttcaactgaacagtggagaggaattgcacttcttaggccttttagataccagtacacaggtgactgtgatccccacaaacccttgcatcaagatgaggagaaaacagatcgtgttctctgactttgggctcctactaacctccgttgtcatggcccccactactgaatga

SEQ ID NO: 134084 - DNA, 6334 bp, Homo sapiens
cctccggtctacagctcccagcgtgagcgacgcagaagacgggtgatttctgcatttccatctgaggtaccgggttcatctcactagggagtgccagacagtgggcgcaggccagtgggtgcgcgcaccgtgcggagccgaagcagggcgaggcattgcctcacctgggaagcgcaaggggtcagggagttccctttccgagtcaaagaaaggggtgacggacgcacctggaaaatcgggtcactcccacccgaatattgcgcttttcagaccggcttaaaaaacggcgcaccacgagactatatcccacacctggccttcggagggtcctacgcccacggaatctcgctgattgctagcacagcggtctgagatcaaactgcaaggccgcagcaaggctgggggaggggcgcccgccattgcccaggcttgcttaggtaaacaaagcagccggggaagctcgaactgggtgcagcccaccacagctcaaggaggcctgcctgcctctgtaggctccacctctgggggcagggcacagacaaacaaaaagacagcagtaacctctgcagacttaaatgtccctgtctgacagctttgaagagagcagtggttctcccagcacgcagctggagatctgagaacgggcagactgcctcctcaagtgggtccctgacccctgacccccgagcagcctaactgggagggcaccccccagcagggggcacactgacacctcacacggcagggtattccaacagacctgcagctgagggtcctgtctgttagaaggaaaactaacaaccaggaaaggacatctacaccgaaaacccttctgtacattcaccatcattcaaagacccaaaagtaaataaaacccaccaaagatggggaaaaaaaacagagcgggaaaatctggaaactcttaaaacccagagcgcctctccttcatccaaagggaatccggttccttcacccagctaccagaacccacgcttgattggagattgatttttgacgcgctgagagaagaaggcttcagccgatcaaaattacttctgagcctacggggggacattcatacccaaagggcaacgatgttgaaaactttggaaaaaaattttagcaagaatgtataactaggattacccattaccagggaagtgcttaaaaggagcttgatggagctgaaaacccaggcctcgagaaactacgtgaaagaatgcagaacgcctcaggatgccgatgcgatcaacttggaagaaagggtatcagcaatggaagatgaaatgaatgaaatgaagccgagaaggaaagtttagagaaaaaaagaataaaaagaaatgagcaaagccttgaaggaattatgggactatgtgaaaagaccaaatctatgtctgattggtgtacctgaaagtgacggggagaatggaaccaagttggaaaacactctgcaggatattatccaggagaacttccccaatctagcaaggcaggccaaccgttcagattcaggaaataccagagaacgccacaaagatactcctttgagaagagcaactccaagcacacctaattgtccagattcaccaaactttgaaattgaaggaaaaaacgtttaagggcagcccagagagaaaggtcggggttacccacaaaggggaagcccatcagactaacaacagctgatctctcagcagaaactctacaagtcagaagagagggggaggccaatattcaacattcttaaagaaaagaattttcaacccagaatttcatatccagcccaaactaagcttcataagcgaaggagaaataaaatactttatagacaagcaaatgctgagagatttttgtcatcaccaggcctgcccttaaaagagctcctgaaggaagaagcactaaacatgggaaagggaacaaccagtaccagccacttgcaaaaacattgccaaatttgtaaagaccattgaggctagggaagaaacttgcatcaacttaacgagcaaaataaccagctaacatcataatgacaggattcaaattcacacataacaatattaactttaaatattaaatggactaaatgctcccatttaaagacacgaccagcaattgcaattggattaagagtcaagacccatcagtgtgctgtattcaggaaacccatctcacgtgcagagacacacataggctcaaaataaaaggatggaggaagatctaccaagccaatggaaaacaaaaaaaaaaggcaggggttgcaatccctagtctctgataaaacagactttaacccaacaaagatcaaaagagacaaagaaggccattacataatggtaaagggatcaattcaacaagaagagctaactatcctaaatatatatgcaccccaatacaggagcacccagattcataaagcaagtcctcagtgacctacaaagagacttagactcccacacattaataactgggagacctttaacaccccactgtcaacattagacagatcaaggagacagaaagtcaacaaggatacccaggaattgaactcagctctgcaccaagcggaccttaatagacatctacagaactctccacccccaaatcaacagaatatacatttttttcagcaccgcaccacacctattccaaaattgaccacatagttggaagtaaagctctcctcagcaaatgtaaaagaacaggaattataacaaactatctctcagaccacagtgcaatcaaactagaactcaggattaagaatctcactcaaagccgctcaactaccatggaaactgaacaacctgctcctgaatgactactgggtatataacgaaatgaaggcagaaataaagatgttctttgaaaccaacgagaacataagacacaacataccagaatctctgggatgcattcaaagcagtgtgtagagggaaatttatagcactatatgcccactggagaaagcagggaaagatccaaaattgacacccctaacatcacaattaaaagaactagaaaagcaagagcaaacacattcaaaagctagcagaaggcaagaaataacttaaaatcagagcagaactgaaggaaatagagacaaaaaaaaacacttcaaaaaattaatgaatccaggagctggttttttgaaaggatcaaaaaaactgatagaccgctagcaagactaataaagaaaaaaagagagaagaatcaaatagacacaataaaaaatgataaaggggatatccaccaccgatctcacagaaatacaaactaccatcagggaatactacaaacacctctacgcaaataaactagaaaatctagaagaaatggataaattcctcgacacatacactctcccaagactaaaccaggaagaagttgaatctctgaatagaccgataacaggagctgaaattgtggcaataatcaatagcttaccacaccatgcacagtccaggaccagatggattcactgccgaattctaccagaggtacaaggaggaactggtaccattccttctgagactattccagtcaatagaagggagcgggaatcctccactaactcattttatgaggccagcatcatcctgatcccaaagccgggcagagacacaacaaaaaaaagagaattttagaccaatatccttgatgaacattgatgcaaaaatccgcaataaaatactggcaaaccgaatccagcagcaccatcaaaaagcttatccaccatgatcaagtgagcttcatccctggggatgcaaggctcctttcaatatacacaaatcaataaatgtaatccagcatataaacaagagccaaagacaaaaaccacatggttatcttcaataggatgcaggaaaagggccttttgacaaaaattcaacaacgcttcatgctaaaaacttttaataaatttgctattgatgggacatatatttcaaaataataagagctatccatgacaaacccacagccaatatcatactgaatgggcaaaaactggaagcattccctttgaaaactggcacaagacagggatgccctctctcacctcaccactcctattcaacatagtgttggaagttctggccagggcaatcaggcaggagaaggaaataaagggtattcaattaggaaaagaggaagtcaaattgtccctgttttcagacgacatgattgtttatctagaaaaccccatcgtctcagcccaaaatctccttaagctgataagcaacttcagcaaagtctcaggatacaaaatcaatgtacaaaaatcacaagcattcttatacaccaacaacagacaaacagagagccaaatcatgggtgaactcccattcacaattgcttcaaagagaataaaatacctaggaatccaacttacaagggatgtgaaggacctcttcaaggagaactacaaactactcactgatcaaggaaataagagaggacacaaacaaatggaaaaacattccatgctcatggataggaagaatcagttatcatgaaaatggccatacttgcccaaggtaatttacagattcaatgccatccccatcaagctaccaatgactttcttcacagaattggaaaaaactactttaaagttcatatggaaccaaaaaaggagcctgcattgccaagtcaatcctaagccaaaagaacagagctggaggcatcacgctatctgacttcaaactgtactacaaggctacagtaaccaaaacagcataggtactggtaccaaaacagagatatagaccaatggaacagaacagagccatcagaaataatgccacttatactacaactatctgatctttggacaaacctgacaaaaacaagcaatgggggaaaggattcccttatttaataaatggtgctgggaaaaactggcttagccatatgtagaaagctgaaacttggatcccttccttacaccttatacaaaaattaattcaagatggattaaagacttaaatgttagacctaaaaccattaaaaaccctagaagaaaacctaggcaataccattcaggacataggcatgggcaaggatttcatgtctaaaacaccaaaagccaatggccaacaaaagacaaaaattgacaaatgggatctaatttaaactaaagagcttctgcacatctgcacagcaaaagaaactaccatcagagtaaacaggccaacctacaaaatggaagaaaattttcacaacctactcatctgacaaagggctaatatccagaatctacaatgaactcaaacaaatttacaagaaaaaaaacaaacaaccccatccaaaaagtggacgaaggcacatgaacagacacttctcaaaagaaggacatttatgcagcccaaaaaacacatgaaaaaatgctcaaccatcactggccatcagagtaatgcaaatcaaaaccacaatgagataccatctcacaccagttagaatggcgatcattaaaaagtcagggagcaacaggtcacagcttcaaaatattgttcagagaacttgcagtgaaagcaacataaaaaggagagcagggatagaaaaaggaatccagtgggcaaaagatgccaactgttcccaagagagtccagtgcgaccatcgcaacaggtgggtgcccctctgggacgaagcttccagaggaaggatcaggcagcaatatttgctgttctgcagcctctgctggtgatacccaggcaaacaaggtctggagtggacctccagcacattccagcaggcctgcagcagaggggcctgactgttagaagaaaaactaacaaacagaaaggaatagcatcaacatcaacaaaagccacatccacacagaaaccccatccaaaagtcaccaacatcaaagaccaaagtattggaagttctggccagggcaatcaggcaagagaaacaaagcgtattcaaataggaagccaggaagtcaaattgtctttgcttgaagatgacatgattgtacatttagaaaaccccatcatctcagccaaaaatctccttcagctgataagcaacttcaccaaagtctcaggatacaaaatcaatgtgcaaaaatcacaagcattcccatacaccaataaaacacaaatagagaaccaaatcatgagtgaactcccattcacaattgctacaaagagaataaaatacctaggaatcaaacttacaagggatgtgaaggacctcttcaagaataactacaaaccgctgttcaaggaaataagagaggacacaaataaatggaaaaacattccatggatggataggaagaatcaataccgtgaaaatggccatactgcccaaagtaatttatag

SEQ ID NO: 134085 - DNA, 288 bp, Homo sapiens
agaaaagctgaggaaattccgcttccgaaaagagacagacaatgcagccatcataatgaaggtggacaaagaccggcagatggtggtgctggaggaagaatttcaggtgttcgaaatccgcaccactgatgacctcactgaggcctggctccaagaaaagttgtctttctttcgttgatctctgggctggggactgaattcctgatgtctgagtcctcaaggtgactggggacttggaacccctaggacctgaacaaccaagactttaaataaattttaaaatgcaaa

SEQ ID NO: 134086 - DNA, 381 bp, Homo sapiens
  misc_feature (1)...(381): n = a,t,c or g
ttggtggtgtncgaggtagacccagagctaacagaaaagctgaggaaattccgcttccgaaaagagacagacaatgcagccatcataatgaaggtggacaaagaccggcagatggtngtgctggaggaagaatttcagaacatttccccagaggagctcaaaatggagttgccggagagacagcccaggctgcaacggnanacaacagatgatgtatgcagggagtaaaaacaggctggtgcagacagcagagctcacaaaggtgttcgaaatccgcaccactgatgacctcactgaggcctggctccaagaaaagttgtctttctttcgttgatctctgggctggggantgaattcctgatgttttgagtcctcaaggtt

SEQ ID NO: 134087 - DNA, 961 bp, Homo sapiens
ctgtggacagaacaatcatgtctgactccctggtggtgtgcgaggtagacccagagctaacagaaaagctgaggaaattccgcttccgaaaagagacagacaatgcagccatcataatgaaggtggacaaagaccggcagatggtggtgctggaggaagaatttcaggttcgtggtttacagctacaagtacgtgcatgacgatggccgagtgtcctaccctttgtgtttcatcttctccagccctgtgggctgcaagccggaacaacagatgatgtatgcagggagtaaaaccaggctggtgcagacagcagagctcacaaaggttcagactgggatgtggctccagagtgttagggagaggtggtgtgggtcctgggtctgagggaagagggactagagtcctcactgtctcagtggtttttgtgtttgtatttttttttttaaagaactgggtctcgctctgtcatccaggctggagtgcagtggcacaacctcggctcactgcaacctccttcttcttggggtccagccaattctccggcttcagcctcccaagtagtgggacgacaggcacacgccaccacacctggctactttttgtatttttagtagagtcagggtttcaccatattggccaggctggtctcgaactcctgaccttaagtgatccacccacctcagcctcccaaagtgctctcttacaggtgagccaccgtgcccagccactgtctcagtgtttgagtagatcataatgccgagacctctctctgcccaggtgttcgaaatccgcaccactgatgacctcactgaggcctggctccaagaaaagttgtctttctttcgttgatctctgggctggggactgaattcctgatgtctgagtcctcaaggtgactggggacttggaacccctaggacctgaacaaccaagactttaaataaattttaaaatgcaaaaa

SEQ ID NO: 134088 - DNA, 753 bp, Homo sapiens
gaaagggcataaacaggatgtggtgttggatgaaaccttgctcctactgcacagcccgcccccctacagccccggtccccacgcctagaagacagcggaactaagaaaagaagaggcctgtggacagaacaatcatgctcttcctgggtccctccggcagtctgactccctggtggtgtgcgaggtagacccagagctaacagaaaagctgaggaaattccgcttccgaaaagagacagacaatgcagccatcataatgaaggtggacaaagacccggccagatggtggtgctggaggaagaatttccagaacatttccccccagagggagcttcaaaatgggatttccccggagagacaagcccagggttcgtggtttacagcttacaagtacgtgcatgacggatggcccgagtgtcctacccttttgtgtttcatctttcctccacgccctgtgggctgcaagccggaaacaacagatgatgtattgcagggagttaaaaacaggctggtggcagacagcagagctcacaaaaggtgttccgaaatcccgcaccacttgattgacctcactgaggccttggcttccaagaaaagttgtccttcctttcgttgatctctggggctggggactgaattcctgatgtctgagtcctcaaggtgactggggacttggaacccctaggacctgaacaaccaagactttaaataaattttaaaatgcgaaaaactcggaaaaaaaaaaaaaaaaaa

SEQ ID NO: 134089 - DNA, 638 bp, Homo sapiens
tggggggtagaagtggaggggccgttcgaagagtcgtgagggggtgacgggttaagattcggagagagaggtgctagtggctggacttgacctggaaagaatcttctgctgactctcaacttttcctggaaaaaatggatcattcccaccatatggggatgagctatatggactccaacagtaccatgcaaccttctcaccatcacccaaccacttcagcctcacactcccatggtggaggagacagcagcatgatgatgatgcctatgaccttctactttggctttaagaatgtggaactactgttttccggtttggtgatcaatacagctggagaaatggctggagcttttgtggcagtgtttttactaagcaatgttctatgaaggactcaagatagcccgagagagcctgctgcgtaagtcacaagtcagcattcgctacaattccatgcctgtcccaaggacaaaatgggaaccatcctttatgggagaacacacaaaactgttggggcaacagattgctgagcttccctcacctcctgcaaacagtgctgcacatcatccaggtgggtcataagctacttcctcatgctcatcttcatgacctacaacgggtacctctgcattgcagtagca

SEQ ID NO: 134090 - DNA, 1961 bp, Homo sapiens
atgtcacagaagatggaaaatttaatagggaatgctcatatcagtgcatatgaaatcataaaagaatttcaaaaggagcagcaccaggcaggactgccagggaccacagtgccctgcagctgccaagtatataagtgcagcaagaggccagagcgagtggccagagagggacccagtgaggacctggagcccttgccccagactgtaaggaagtgtggccagggctgcacactccatggagctggtggtagccagggacaagtgggagcccgcccctttggaattggtggggtggaagctctctggttcctggcatctccaagctactgggcaccactcattccccagtgccagctggggaagctacttgtggtgcgcctggtacagctgcaggctcgcagagagctggcacccatgctggcacctggagctgcctgccccatggtagcaacagcgtgtctgactgtgcagtggccagaccccatgctcactcacacacccctcaccattccacacctgacttgcagtctccttggagggaatgtggaactactgttttccagtttggtgatcaatacagctggagaaatggctggagcttttgtggcagtgattatactagcagtgttctatgaaggactcgatagcccaagagagcctgctgtgaccaaatggaaccatccttatgtagacacacaaaactgttgggcagcagatgctgagctttcctcacctcctgcaaacagtgctgcacatcatccaggtggtcataagctacctcctcatgctcatcttcatgacctacaatggatcttcagaacttttattcaggggagaaaggcccaggtagctgctgctgttcagcttaaggctaatctgaccttctataacaggagttcaagtcccagaaatccctggtcctccatcagagggaaccccccagcttggacccacagtacagatcacccatcttgggcctatcacactgagcaattgctgacctgcatctctgtggagtggagcccccaggagacaaacataaaaacaacggtcttaaagatgctcagagaactagaggaagatgtggagaaggtcaggaaaacaacacatgaacaggacgtatcccatgacgctcatccaaatgaaaccatttggctatacaggaagcatagaggcttcttgggagagctcaggaaagtttcagtcatggtggaaggtgaagaggaatcaaacatgtcttatatggctgaagcaggaaaaatgcagcgtgctaggaggcacatgatgttgattcgtacctttgctggtgttgctgactttggccaattgtctaaggtggtgtgggagacgggggcagtaacatgcatgatcaccagtatcactgtcttccatctctatgtcttacctcgcagggagaggcgggcagtaacgtgcatggagctgtcacctcctatgacaacaacaccttctggaatacctcctgaaggacacgcctgaggatgttttacagttaactttttaaaaaatacataagtagaaagagaacactctaaaataaaaataaaaggtatagtataataaacacaataacaaagtcacttattactatcaagcattgtatgctgtacataattgtatgtgctatgcttttatatgactaacagtgcaatagatttgtttacaccaccatcactaagggcatgcaagtaatgtgttgtgctccaacatactacaactatgatgccactaggtaacagaaaatgttcagctccattataatcttatgggaccaccttcctagatgcagtctgtcattgatggaaacgttgttacacagcacatgactatagactaatagccatagatttataatatgggaggatgtactatatatgcattgaaaagagctctggaaggatcccaatacattaccagaggttgcatataggaaaaaaaaaaaa

SEQ ID NO: 134091 - DNA, 576 bp, Homo sapiens
atcaaagtctctacattctggttttaatagagttaggatgtggtacataattgcacctcaatgaggcataactttgcaaatattagactatgccatttcatgagttatagattgttataatgatcttgtatttttatgttcatttattgaagttctagttatttctggagttgctgtggatctacagatacgtgatattttggtataactagaatcttgatttctttcataaagttctgccatgttctatttctttccttaatgtttttttcttccctactgttttatcctccctttgctttggaaggatattgctgcatatcgagctaaaggaaagcctgatgcagcaaaaaagggagttgtcaaggctgaaaaaagcaagaaaaagaaggaagaggaggaagatgaggaagatgaagaggatgaggaggaggaggaagatgaagaagatgaagatgaagaagaagatgatgatgatgaataagttggttctagcgcagttttttttttcttgtctataaagcatttaacccccctgtacacaactcactccttttaaagaaaaaaattgaaatg

SEQ ID NO: 134092 - DNA, 528 bp, Homo sapiens
ggcacgagggcagcatgttttctgacctttggtttgggtggtttaaaatggtgttctagattttaaaatcgtttaagtgaccagttagatactcattcagagcagactcgggcggatagatagggaatactgtatgggtatatctttgtgtctagactttttgagatcgccctgaaggactgtttttgttttgttttgtttgcttggcatagccccttcaaggaatttaatctctcggccatattcttgtctgtcttttacggaggttgatgtcgctactgtgttaaataaccagtactttggttttcattcccttactaagtactttaaggtcttatatgtcataattttattgctaacatcaaatatttattttattttttagaaaaataactaaacatgggcaaaggagatcctaagaagccgagaggcaaaatgtcatcatatgcattttttgtgcaaacttgtcgggaggagcataagaagaagcacccagatgcttcagtcaacttctcagagttttctaag

SEQ ID NO: 134093 - DNA, 1569 bp, Homo sapiens
gccaataggagccgcgctggctggagagtaatgttacagagcggagagagtgaggaggctgcgtctggctcccgctctcacagccattgcagtacattgagctccatagagacagcgccggggcaaagtgagagccggacgggcacctgggcgactctgtgcctcgctgcaggaaaaataactaaacatggggcaaaggagatatcctaagaaggccgagacgaaaaatgtcatcatattgcatttttttgtgcaaacttgtcggggaggagcataagaagaagcaccccagattgcttcaagtcaaccttctcagagtttttctaaggaagtgcttcagagaggttggaggcccatgtcttgcttaaagaggaaagggaaaattttgaagatatgggcaaaagcgggacaaggcccgtttttggaaagagaattgaaaaccctatatcccctcccaaaaggggaagaccaaaaaaagaagttcaaggatcccaattgcaccccaagagggcctccttcgggccttctttcctcttcttgctctggagtatccgccccaaaaatcaaaaggagaacatccttggcctgttccattggtggatgttgccgaagaaaactgggagacgatgtgggaattaacactgctgcagatggacaagcagcccttatgaaaagaaggcctgcgaagctgaaggaaaaatacgaaaaggatattgcctgcatatcgagcctaaaaggaaagcctgatgcagccaaaaaaagggagttgtcaaggcctgaaaaaagcaagaaaaagaaggaagaggaggaagatgaggaagatgaagaggatgaggaggaggaggaagatgaataagatgaagaagatgaagaagaacatggatggtgatgatgaataagttggtttctagcgccagtttttttttttctcttgtcctataaagcatttaacccccccctgtacacaactcactcccttttaaaggaaaaaaattggaaatgttaaggctgtgtaagatttgtttttttaaactggtaccagtgtctttttttggtatagttaacacactaccgaattgtgtctttaggatagccctgtcctggtggtattttcaataagccactaaccttgcctgggtacagttatggggggttgtaaattggccatgggaaattttaaagcaaggttcttgtttggtggcacagcccaaaatttagtttatatatgggggatggtagttttttccatcttcagttgtctctgatgcagcttatacaaaattattaggtggtctggttaacagaacaccactctgtaattgcaaaaaaaaaaaaaaaagttgcagctgttttgttgacattctgaatgcttctaagtaaatacaattttttttattagtattgttgtccctttcataggtctgaaatttttcttcttgaggggaagctagtcttttgcttttgcccttttgaatcacatgaatattacagtgtttatctttcatatattagctataaaagctttgtcaacacctggcaatctaatggggtatttaagtgagaagttcc

SEQ ID NO: 134094 - DNA, 413 bp, Homo sapiens
ggcgccatgaggggtgacagaggccgtggtcgtggtgggcgctttggttccagaggaggcccaggaggagggttcaggccctttgtaccacatatcccatttgacttctatttgtgtgaaatggcctttccccgggtcaagccagcacctgatgaaacttccttcagtgaggccttgctgaagaggaatcaggacctggctcccaattctgctgaacaggcatctatcctttctctggtgacaaaaataaacaatgggaatgagaaactggatggggtctccgggcactttaaaagcgcatattgaaaaatttacacgggggataccctataaaaggggcactgtgtccaggggacacaatgtggctgacctgggggggaaactcaagattttggccacctttggaagctgtt

SEQ ID NO: 134095 - DNA, 1907 bp, Homo sapiens
  misc_feature (1)...(1907): n = a,t,c or g
acgcctcttcagttgtctgctactcagaggaaggggcggttggtgcggcctccattgttcgtgttttaaggcgccatgaggggtgacagaggccgtggtcgtggtgggcgctttggctccagaggaggcccaggaggagggttcaagccctttgtaccacatatcccatctgacttctatttgtgtgaaatggccttttccccgggtcaagccagcacctgatgaaacttccttcagctgaggccttgcctgaagaaggaatcaggaccctggctcccaattctgctgaacaaggcatctatcctttctctgggtgacaaaaattaaacaatgtgacttgataatctgacttgtggctcccagggacattttgaagttgcaaaattggaagaagttccgacaagttggggatcctataaaaaggggaacaatgactacaggacacaatgtggcttgacctgggtggtgatacctcaagaattctggcaacggttggaagctggttgcctgccctggggggaacaaagtcgtggaaagccttaggagcaccaggatccttctgaaagttttaaaccatgcttgaccaacgaaaactggctttgaaatcagttcttctgatgctacagtgaagattctcattacaacaggtgccacccaaatcttcgaaaactggatccagaactccatttggatatcaaagtattgcagagtgccttagcagccatccgacatgcccgctggttcgaggaaaatgcttctcagtccacagttaaagttctcatcagactactgaaggacttgaggattcgttttcctgggctttgagcccctcacaccctgggatccttgacctactagggccattatggctgtgatgaacaaccccaccagacagcctttgggcctgaaacgttggcataacagggcgctggcttggcagatttctgggctggcagggactgtttcctgccagggtttcagtggggtattcaattgacccctgtgagagttggcaactttaggagttacacacagtcatgaccctagaacagcagggacatggtctggctatacagctcaggactttcgtccgaatcctcnccacatggtggctttaggaagatccttggcccaggaggttgatgccagctatcttgcttctgaaatatctaccttgggatggagtgatagtaacacccttcaggaaaaggctttatgagaagcccaccagagaaagaaggaaggagaggaagaagaggagaatacagaagaacccacctcaaggagaggaagaagaaagccatggaaacttcaggagtgaccattccccttccactccttttccctaacccaagggggaagactggagccctaagctgccctgcctactgggctttacatggtgacagacatttcccgtgggatagggaagatagcaggaagaaaagttaaactccatagaagtgtcattccactgggttttgatattggcttaagctgccaagtctcccatttgtgacctatgccatccgatctataatggagggataccgaacgatttcttcctaatattctataatctcccaactccctgaaaaacccctctctcaactaatacttttgctgttgaaatgttgtgaaatgttaagtgtctggaaattttttttttctaagaaaaactattaaagtacttcctagtnnnnnnnnnnnnnnnnnnnnnnnnnngggggggggccctttaaaagaaccccttggggggcccaaatttaacgggggatggaaaggaaaaattttttccctaatggggggcgttttaaaaaccaacttgggaattttggaaaaaaaccttttttttggggggggaaaaaattggaaaaacccccctacaaaaattaaaggctttaggg

SEQ ID NO: 134096 - DNA, 403 bp, Homo sapiens
aacgattttgaaatcctgccgccagatattgggaagctcacaaagttgcagatactcagccttagggataacgacctgatctcgctgcctaaggaaatcggggagcttacccagcttaaagagctccacattcaggggaaccgcctcaccgttctgcccccagaactaggaaacttggatttaactggccagaagcagcctttacggcagacacatgcaggccaacccagaaccaccgaagaagaataatgacaaatcgaaaaagatcagccggaaacccctggcagccaagaacagataaggaagggattggcatcggctggccttccagcaccttctctctccaacacttcattctctcttgccctgtctctcaaataaacccaatgctgcgtgtgaaaaa

SEQ ID NO: 134097 - DNA, 1065 bp, Homo sapiens
atgttgagacggctctactgggacgacgacgatcatgaccatcatcatcatgacaatgatgattatcatcaccacgatggcggtcatcgtgacggtaatggctggcaacacaacggcgacaacatcaatatcgacgtcaacaatttcaaccgtatcaccggtgagcatcttactgataagaatatggcatggcggcacaatccaaactaccgtaatggtgtgccctatcatgatcaggatatggcaaagcggtttcatcaaaccgatgtcaacggcggaatgagcgccacgcaattacctgccccaacgcgcgacagccagcgtcaggcggcagcaaatcagtttcagcaacgaacacacgccgcaccagtcattacacgagatacccaacgtcaggcagcggcacagcggtttaatgaagctgaacactatgggagctatgacgacttccacgacttcagccgtcgccaaccactgacccagcaacaaaaggacgccgctcgtcagcgttatcagtccgcctcgcctgagcagcgccaggcagttcgcgagagaatgcagactaacccgaagatccagcagcgaagagaggcagcgcgtgagcgcattcagtccgcctcgcctgagcagcgccaggcggttcgcgagaaaatgcagactaacccgcagaaccagcagcgaagagacgcagcgcgtgagcgtattcagtccgcatcaccagagcagcgccaggtgtttaaggaaaaagtacagcagcgcccactgaatcaacagcaacgtgataacgcccgccagcgtgttcaatcggcatcacctgaacaacgtcaggtttttcgggagaaagttcaggagagccgcccacaacgtctaaacgacagtaaccatactgtcaggctgaataacgagcaacggtcagcagtatgcgaacgtctctctgaacgtggagcaagaagactggaaagcctctacggcagacacatgcaggccaacccagaaccaccgaagaagaataatgacaaatcgaaaaagatcagccggaaacccctggcagccaagaacagataa

SEQ ID NO: 134098 - DNA, 2306 bp, Homo sapiens
atgtccccagacattccccaagtgtccccggaggtaggactgtacccagttgcgaatcacagcagtatagttgtgcccacttgtcactccttatcagaggaggacactgaggctcagagaaaccacgaactggacacagtcaaagccctcagagaagacgcacaggtgctgaagatcccaaatcaaagtcccaaggacaccctggtaacagccttgcaattagcccagaaaggaacaaaagctgctgccatccgactgggggccaaagtggggcaaaaacagtctaggcaagcaaagtcaagtccagccctggtggtgccaggcctcctcagcttcccacgagcccggtttttcgagtggcagtctccagggctgccgaatacagcagcgatggagaacggcaccgggccctacggagaagaacgtccacgtgaagtccaggagacgacagtcaccgagggggctgccaaaatcgcctttcccagtgccaacgaggtcttttataacccggtgcaggaattcaatcgggacctgacatgtgctgtgatcaccgagtttgctcgcattcagcttggggccaaaggaatccagatcaaggttccaggagagaaggacacgcaaaaagtggtcgtggacttgtcagagcaagaggaggaaaaggttgaactgaaagagagtgaaaacctggcctcaggagaccaacctcgcacagcggccgtgggggagatctgtgaggaaggcctgcatgtgctggaaggcctggcagcttcaggcctacgttccattcgatttgccctagaggtgcctgggctcagatctgtggttgcaaacgatgcctccacccgggctgtggatctcatacgccggaatgtccagctcaatgacgtggcccacctggtacagccgagccaagcagatgcccggatgctgatgtaccagcaccagagggtgtcggagaggtttgacgtcatcgatctggacccctatggcagcccagccaccttcctggatgcagctgtgcaggctgtgagtgaaggagggttgctgtgtgtgacctgcacagacatggcggtgttggcggggaacagcggggagacgtgctacagcaagtacggggccatggccctcaagagccgggcctgccacgagatggccctgagaatcgtcctgcacagcctggacctccgcgccaactgctaccagcgcttcgtggtgccgctgctcagcatcagcgctgacttctacgtgcgtgtttttgtccgtgtcttcaccggccaggccaaggtcaaggcctcagccagcaagcaggcgctggtgttccagtgtgtgggctgcggggccttccaccttcagcgtctcggcaaagcgtcaggagtccccagcggccgggccaagttctctgcagcctgtggtccccctgtgacccccgagtgtgaacactgtgggcaacgacaccagcttggtggccccatgtgggcagagcccatccatgacctggattttgtgggccgtgtcctggaggctgtgagcgctaaccccggccgcttccacacctcggagcggatccgaggggtcctgagcgtcatcactgaggagctcccggacgtgcctctgtactacaccctggaccagctgagcagcaccatccactgcaacacaccaagcctcctgcagttgcggtcggccctcctccacgctgacttccgggtctcactctcccacgcctgtaagaacgctgtgaagacggatgcccctgcctctgccctctgggacatcatgcgttgctgggagaaggaatgtccggtgaaacgggagcgactatcagagactagcccagcgttccgcatttctcagtgtggagcccaggctgcaggccaacttcacccatccgggaagattgccaaccccagctcccgacagcgaggactcaagcgcttccaggcttaacccggaggcccaactggggtccccggcctcgttcccggcccagggggcaaggcggccgacgaagctatggaggagaggacgcaggctgcttcagaacaagcggaaggagccgccggaagatgttagcccagcgggctgcccggctcaagacatttccttgcaagaggtttaaggagggcacctgtcaacgcggggaccagtgctgctactcccacagccccccgacacccagggtttctgctgatgctgcccctgactgtccagagacctccaaccagaccccccctggacctggggctgccgctgggtcaggcatagactgaacaaataaagagatgtcacgtcaccctctcccaaaa

SEQ ID NO: 134099 - DNA, 2391 bp, Homo sapiens
gtgagaagaaacttaactgtgatttaattttgcatttctttcatgaaaaggttatcatgtataaccaataaaattggataagatgattttgggggagaaaagtaaatgaaaatgtgttataccccaagatcagactgttcttttattctgagtcaataagtaacatgtgatacaaactcaagattttattaaaatcatttgtaagttaaattagcatatctcggtggtgaaggaagacttttaataaagcaaaataatgagttaggtgaatcaacagaaagagtgaaaagtgttaacagtgacatttaaatggttacatgattttaattattcttttgataataaggcaaccttgtgatacctattccaagaaaacccatagccccactagggaaatccgcaggttgaaataagagctttgttcccctgccttttggtaatgttaaaggaaacaaatgggaaatgggttttaaaggaccttataacaatctccccaccctagcaaaaagaatctaaaaggttaaggtgggaagcattaggaaagagagtgaaaagaaaaataaaaaaaggcctcacacgcagcattgggtttattttgagagacaggggcaagagagaatgaagtgttggagagaagaaggtgctggaaggccagcccgatgccaatccctttctttatctgttcttggctgccaggggtttccggctgatctttttcgatttgtcattattcttcttcggtggttctgggttggcctgcatgtgtctgccgtagaggtatttgtatgtctcagaacggatatactcaaaaacatgggacacgccaagctggaactggtctgcaatgggggtcacccaggggattgttctctgctttggaatacctgcttctggcccagttaaaatcccaagtttcctaagttctggggggcagaacggtgaaggcggttcccctgaatgtgggagctctttaagctggggtaagctccccgatttcccttagggcagcgagatccaggtcgttatccctaaggctgaagtatcctgccaactttgtgaacctcccccaatatctggcggccaggattttcaaaaatcgttgtccacttaagaataagaagtgccacgccagggtggtccaggtaagaagaagtttccccaggaagagaattttcgctcaagttgttgtacgtcaagtccagaacctccaaaaacctggccagggaacccgaaagcctcgtggccaaaagtgttccaccctgttccatgcccaaggttccaggtgtttgaagtttcctgaaaggcctaactgaatctgtgtgggcagctcctcgaatttggttattaaaaaagttgaagcacctgccaaattgcttcagttctgcgatgttcggtggcaccattgttagcttgttatggctgaggaccagttgtgtgatatgggataaggtaaagaggccgttgacatccagcatgttggagatgccccggtcactcatgtccacctcgggctggttcttctcccggctctcctccaccaacttcttcagagacttggacatggtcacggaaggtagcccctaagacgatgggcgtgcaaccacaagcttcggcagaacgcacaccagctgagcagcaccatccactgcaacacaccaagcctcctgcagttgcgggtcggccctcctccacgctgactttcggggtctcactctcccacgcctgtaaagaacgctgtgaagacggatgcccctgcctctgccctctggggacatcatgcgttgctgggagaaggaatgtccggtgaaacgggagcgactatcagagactagcccagcgttccgcattctcagtgtggagcccaggctgcaggccaacttcacccatccgggaagatgccaaccccagctcccgacagcgaggactcaagcgcttccaggctaacccggaggccaactggggtccccggcctcgtgcccggccagggtgagtggtggtaaggtgggggtggggctcagccagggaaagaagggttaaagggcagatggggtcccacctactccctccccttcgcacaggggcaaggcggccgacgaagctatggaggagagacgcaggctgcttcagaacaagcggaaggagccccccggaagatgtggcccagcgggctgcccggctcaagacatttccttgcaagaggtttaaggagggcacctgtcaacgcggggaccagtgctgctactcccacagccccccgacacccagggtttctgctgatgctgcccctgactgtccagagacctccaaccagaccccccctggacctggggctgccgctgggccaggcatagactgaaccaataaagagatgtcacgtcaccttcaaaaaaa

SEQ ID NO: 134100 - DNA, 1152 bp, Homo sapiens
atgggcccctcgagcatccatcacagttcccaacacgcaaccgctccacaaatcctgcccaaggtgagggctggtcccaggtcctccggctgccgcatcagcgagtgcaggagggaggagaagcctccaaaggggcgacgtgggctcaaggatgcaactcggccaggagtgaactggggcccagatggaggtgtccagtctggtgctggagcccagccctggtccctgacccccttacctccagggtccgtatctcctgctggccgagcgcagcgccgctctatgcgggctgcagcagcccaggagcggagccctgggcgccggcgtctaggcaaggaacccctgattcgggagagctggaccaggagcgccccttggcgctgccttagtcaggacgccggtagagctggcagccaagtctgcggatccagccctcagacccgcggcgccgcagcggaaaaagtcgcggtgacgggggctaaaagctgcagcggcagggggaaaaaagccgcggcggcgagggcaaaaagccgcggcggtggggggagaaagacgcaaaaagctgcggcggcaaaaagccgcggctgcgagggcaaagatccccaaaaagccgcggcagcaggggctaaattccgcgaggccgggggcagaaagccgcggtggcgggggcagaaagcaacggaggcgggggcaaaaagtcgaggcggcggaggcataaagccgcaaaaacccgcagcagcgggggcaaaaatccatggcggcaaaaagccgcgtcggcgggggcaaagtagtggaaatggggtagaaggccagaacagcttggcattcctggagtgtgatgtggaaggaaaagtgcagaggaagacaaacaaagatgaaataacacatggtggccgttatgtagagagagccacaggacttgtgaataaaatccacaggcaaggacgtggcgattcgttttgcaatattggagggaatgccaaaccctatgtttgctgtggaaaagagtatggtagttcctcaaaacatcaaaatggtattgccttacgattcagcagccccacatctcaagacagcaaaagaattgaaagcagagtcttgaaaaaatatttgcacatccatgtttgcagcagcattattggcaatagctaa

SEQ ID NO: 134101 - DNA, 683 bp, Homo sapiens
attgcaccgcgctgcaggaattcggcacgagagcgcacagactttgaagcaggaaaagacagtctctagagcaacatggaaaggatccagtatttgttttcaggcaaaagcaagcctccaaaagccccttggttcttctctgtgtgtctcgccccttctgccttgtacaccagactgccggcaagcaagcggggaggtggcgaacagctgggatcctccagtgaaaagtttgctcagcgcgagagatgtcaagaggctgggattgtcgcctatcgggaggtggggagctctctcactcacacttcctgggaaatgaaggagaactaataggcagcccgcattttgcagccagccagcctggggtgggtattccttgaagtgaagcgctcataaatcccttctggggccagagccggtttcacaagctgcaggatttgggtggcctgcctgctctttgggagcgggcttgggaagctgaagaaattgaatcaggacctcaggccctttacagactcccttctacacttggttgctgattaagaacattatgtggcatttaaaatggcacaattatcttccgttggccgttcctagctaaaagtagactcctatcagcccgtgactgacgacaagaaggctcttcgtccctgtttttgaaataaacatgggtaaaatctgaaaaa

SEQ ID NO: 134102 - DNA, 1005 bp, Homo sapiens
ctagttttctccaggtgtgtgggcagccctggggctgcgttcttccatcaagaaaacacaagggggcggtagtggcacttgggcttgacggtggtgggacttaaaattgagtcccaatgtcactcggttaataagtgacaacacgagaatatgaaccaaggaggactggttgtttccagagccccgtgttctttcaactaaatgtctctgccaggctgccacactggacatcagaaaataaaaaccattcaaagatacagggcagaaccaattcatctgtggaattcttctcccgataggcgacaatcccagcctcttgacatctctcgcgctgagcaaacttttcactggaggatcccagctgttcgccacctccccgcttgcttgccggcagttttgtggactctccccagagtctttcttgcatgagatccaagaaccctctgttggggtctggatcaggacccctttccccaacttatattctttaagcaacaacccctcattttctccttcctcagcccctgataacaacttctccttcttctccttctcctccttctcctcctcttcctcctcctcctccttctttctcctcttcctattcttcttcttctttttttgagacagggttccactctgctgcccatgctttgggtcagcaataagaaagccgtccccctcagtcagcacaaaagctcgcccccagggagaaacaggaagatccttagctcttcttttccttccccagcgcccatcatcctccctccacagatcagacaccctgtacagggactgtgtacacagaatatgaggccagtttccaggagctttattggcttcataaggcaagtttgattccttaaaggaaagcacaccattccagtcaaagccttgataaaaataaccagtttttccaattgtggccttctggtggctgttgatgaccctggcaagtccctcaatttgtagctgcctgactccagtctctgcttctgctgtcat

SEQ ID NO: 134103 - DNA, 340 bp, Homo sapiens
aaaataaagttatttaatagtctccatttaattggtttatttgctgttaataaattggcaacacaaggaagggccccatgtccaggctcaggcaggagcggctgcctcaggcagaggcagggcaggcacagctgccccgtgccccaagggatggagggaaagggggaaggcagcattctctggtacccaccacccctgcccagggctcagaagcctttgcctgggtccaaaggccagggacaagggaggcttggctcacagatggggggcgggggtcacccatatcttcctccccactctgggactgactgacagccaagaaaccggcaggagctcacac

SEQ ID NO: 134104 - DNA, 1485 bp, Homo sapiens
atggcccagccgaatggccatgctacaagtctgttcagagcaggggcttctgaggagaatggcctgcctcacacgtcagccagaacccagctgccccagtcaatgaagattatgcatgagatcatgtacaaactggaagtgctctatgtcctctgcgtgctgctgatggggcgtcagcgaaaccaggttcacagaatgattgcagagttcaagctgatccctggacttaataatttgtttgacaaactgatttggaggaagcattcagcatctgcccttgtcctccatggtcacaaccagaactgtgactgtagcccgccaccccaggaactgagtatggaagtcgttggccccttactacctttggaatcaatggatttctcaacctactgcccctctaaagcaagagtggacagcgtggctattcccaggggccggcaggaacttcagacaggcaaagccgactgcttactgagcagctggaggattcttccctccacaaggaggaacaagtacttgttactcaacaaccaggagctgaatgaactcagtgccatctctctcaaggccaacatccctgaggtggaagctgtcctcaacaccgacaggagtttggtgtgtgatgggaagaggggcttattaactcgtctgctgcaggtcatgaagaaggagccagcagagtcgtctttcaggttttggcaagctcgggctgtggagagtttcctccgagggaccacctcctatgcagaccagatgttcctgctgaagcgaggcctcttggagcacatcctttactgcattgtggacagcgagtgtaagtcaagggatgtgctccagagttactttgacctcctgggggagctgatgaagttcaacgttgatgcattcaagagattcaataaatatatcaacaccgatgcaaaggtattcctgaagcagatcaacagctccctggtggactccaacatgctggtgcgctgtgtcactctgtccctggaccgatttgaaaaccaggtggatatgaaagttgccgaggtactgtctgaatgccgcctgctcgcctacatatcccaggtgcccacgcagatgtccttcctcttccgcctcatcaacatcatccacgtgcagacgctgacccaggagaacgtcagctgcctcaacaccagcctggtgatcctgatgctggcccgacggaaagagcggctgcccctgtacctgcggctgctgcagcggatggagcacagcaagaagtaccccggcttcctgctcaacaacttccacaacctgctgcgcttctggcagcagcactacctgcacaaggacaaggacagcacctgcctagagaacagctcctgcatcagcttctcatactggaaggagacagtgtccatcctgttgaacccggaccggcagtcaccctctgctctcgttagctacattgaggagccctacatggacatagacagggacttcactgaggagtga

SEQ ID NO: 134105 - DNA, 2456 bp, Homo sapiens
gtgctgacaaggctgcctacctgatgggggtcagcagtggggacctcctcaaaggccttttgcacccccgggtgcgtgtagggaacgagtacgtgaccaagggccagagtgtggagcaggtggtgtttgctgtgggggctctggccaaggccacctatgaccggctgttcaggtggctggtgtctcggatcaaccagaccctggacacaaagctgccccggcagttcttcatcggggttctggacatcgctgggtttgagatctttgagttcaacagcttcgaacagctgtgcatcaacttcaccaatgagaaattgcagcagttcttcaaccagcacatgtttgtgctggagcaggaggagtacaagcgggagggcatcgactgggtcttcatcgacttcggccttgacctgcagccttgcatcgacctcatcgagaaggaggagcgactcaagccttcgcgaaagaaaataaccaaaaagcatacaaagaaacgtacggcgtctctcatattacacgccatgatatgctgcagatccctaaacagcagcaaaacgaaaaataccaagtgcctcaattcgatcaatcaacgattaaaaatttggagtctgcaaaaggacttgatgtgtgggacagctggccgctgcaaaacgctgcacggaaccagtcagctgaatacaacggctatccacgttgtgttagctcttgcgggaagcccgaaagacgctgatgacacatcaatctacatgttttatcaaaagcacatcctttactgcattgtggacagcgagtgtaagtcaagggatgtgctccagagttactttgacctcctgggggagctgatgaagttcaacgttgatgcattcaagagattcaataaatatatcaacaccgatgcaaaggtattcctgaagcagatcaacagctccctggtggactccaacatgctggtgcgctgtgtcactctgtccctggaccgatttgaaaaccaggtggatatgaaagcggcccttctcagcattcctggctttgttgagcggctttgcaaactggcgactcgaaaggtgtcagagtcaacgggcacagccagcttccttcaggagttggaagagtggtacacatggctagacaatgctttggtgctagatgccctgatgcgagtggccaatgaggagtcagagcacaatcaagtgttctggtttgagcaacatggtttggtgtcgggcgcagagaaagccccaggaactacgattgatcaggctcccagaatctatagatggagtgacctgacgaggacacaggcgcagtggcagagcgcgatgacttggtcgatgtccgcgttcactgagacttttttgacggagagggacaaacaatccaagtggagtggaattcctcagctgctcctcaagctgcacaccaccagccacctccacagtgactttgttgagtgtcaaaacatcctcaagcctctgctggtgatacccagacaaacagggtctggagtggacctccagcaaactctgacagacctgcagctgagggtcctgactgttagaaggaaaactaacaaacagaaaggacatccacaccaaaaccccatctgtatgtcaccatcatcaaagaccaaagaagctaaaaaccttgacaaaagattagacgaatggctaactagaataaacagcatagaaaagaccttaaatgacctgatggagctgaacaccatggctcgaaaactacgtgacgcatgcacaagcttcagtagccaattcgatcaagtggaagaaagggtatcagtgattgaagatcaaatgaatgaaatgaagcgagaagagaagtttagagaaaaaagaataaaaagaaacaaacaaagcctccaagaaatatgggactgtgtgaaaagaccaaatctacgtctgattggtgtacctgaaagtgacggggagaatggaaccaagttggaaaacactcttcaggatattatccaggagaacttccccaatctagcaaggcaggtcaacattcaaattcaggaaatacagagaacgccacaaagatactcctcgaggagaggaactccaagacacataattgtcagattcaccaaagttgaaattaaggaaaaaatattaagggcagccagagagaaaggtcgggttacccacaaagggaagcccatcagactaacagcggttctcttggcagaaactctacaagccagaagagagtgggggccaatattcaacattcttaaagaaaagaattttcaacccagagtttcatatccagccaaactaagcttcataagtgaaggagaagtaaaatcctttacagacaagcaaatgctgagagattttgtcaccaccaggcctgccttacaagagctcctgaaggaagcgctaaacatggaaaggaacaaccgataccaactactgcaaaaacatgccaaattgtaa

SEQ ID NO: 134106 - DNA, 1442 bp, Homo sapiens
gggcttctgaggagaatggcctgcctcacacgtcagccagaacccagctgccccagtcaatgaagattatgcatgagatcatgtacaaactggaagtgctctatgtcctctgcgtgctgctgatggggcgtcagcgaaaccaggttcacagaatgattgcagagttcaagctgatccctggacttaataatttgtttgacaaactgatttggaggaagcattcagcatctgcccttgtcctccatggtcacaaccagaactgtgactgtagcccgccaccccaggaactgagtatggaagtcgttggccccttactacctttggaatcaatggatttctcaacctactgcccctctaaagcaagagtggacagcgtggctattcccaggggccggcaggaacttcagacaggcaaagccgactgcttactgagcagctggaggattcttccctccacaaggaggaacaagtacttgttactcaacaaccaggagctgaatgaactcagtgccatctctctcaaggccaacatccctgaggtggaagctgtcctcaacaccgacaggagtttggtgtgtgatgggaagaggggcttattaactcgtctgctgcaggtcatgaagaaggagccagcagagtcgtctttcaggttttggcaagctcgggctgtggagagtttcctccgagggaccacctcctatgcagaccagatgttcctgctgaagcgaggcctcttggagcacatcctttactgcattgtggacagcgagtgtaagtcaagggatgtgctccagagttactttgacctcctgggggagctgatgaagttcaacgttgatgcattcaagagattcaataaatatatcaacaccgatgcaaaggtattcctgaagcagatcaacagctccctggtggactccaacatgctggtgcgctgtgtcactctgtccctggaccgatttgaaaaccaggtggatatgaaagttgccgaggtactgtctgaatgccgcctgctcgcctacatatcccaggtgcccacgcagatgtccttcctcttccgcctcatcaacatcatccacgtgcagacgctgacccaggagaacgtcagctgcctcaacaccagcctggtgatcctgatgctggcccgacggaaagagcggctgcccctgtacctgcggctgctgcagcggatggagcacagcaagaagtaccccggcttcctgctcaacaacttccacaacctgctgcgcttctggcagcagcactacctgcacaaggacaaggacagcacctgcctagagaacagctcctgcatcagcttctcatactggaaggagacagtgtccatcctgttgaacccggaccggcagtcaccctctgctctcgttagctacattgaggagccctacatggacatagacagggacttcactgaggagtga

SEQ ID NO: 134107 - DNA, 3138 bp, Homo sapiens
atggcagaaggcaaaggagaagcaggcaccttcttcacagggcagcaggacagattactatttgtctttttcattataaccatcgtagtagggctgttcagatgttctgttttttcttcttcttcgtcttcttcgtctttgtcttcttcgtcttcgtcttcttcatcttcatctttgtcttcgtcttttcttcatcttttcttcatcttcatcttcgtcttctttgtcttcatcttcttcgtcttcatctttgtcttcgtcttcgccttcttcttcatcttctttgtcttcgtcgtcttcttcgtcttcttcttcttcgtccttcttgtagaaattcttatgaggcctacgatctctatccggggacagaaactgaaaataagtgatgaaatgtccaaggactgcttgagtatcctgtataatacctgtgtctgtacagagggagttacaaagcgtttggcagaaaagaatgactttgtgatcttcctgtttacattgatgacaagtaagaagacattcttacaaacagcaaccctcattgaagatattttgggtgttaaaaaggaaatgatccgactagatgaagtccccaatctgagttccttagtatccaatttcgatcagcagcagctcgctaatttctgccggattctggctgtcaccatttcagagatggatacagggaatgatgacaagcacacgcttcttgccaaaaatgctcaacagaagaagagcttgagtttggggccttctgcagctgaaatcaatcaagcggcccttctcagcattcctggctttgttgagcggctttgcaaactggcgactcgaaaggtgtcagagtcaacgggcacagccagcttccttcaggagttggaagagtggtacacatggctagacaatgctttggtgctagatgccctgatgcgagtggccaatgaggagtcagagcacaatcaagcctccattgtgttccctcctccaggggcttctgaggagaatgggcctggctcacacgtcagccagaaccccagctgccccagtcaatgaagattatgcatgagatcatgtacaaactggaagtgctctatgtcctctgcgtgctgctgatggggcgtcagcgaaaccaggttcacagaatgattgcagagttcaagctgattccctggaacttaataatttgtttgacaaactgatttggaggaagcattcagcatctgcccttgtcctccatggacacaaccattatctgtgactgtagcccggacatcaccttgagagatacagtttttgaggcttcttcagagcttcagtgaccaccacgagaacaagtacttgttactcaacaaccaggagctgaatgaactcagtgccatctctctcaaggccaacatccctgaggtggaagctgtcctcaacaccgacaggagtttggtgtgtgatgggaagaggggcttattaactcgtctgctgcaggtcatgaagaaggagccagcagagtcgtctttcaggttttggcaagctcgggctgtggaagagtttccctcccgagggaccacctcctatgcagaccagatgttcctgctgaagcgacggcctcttggagcacatcctttactgcattgtggacagcgacgtgtaagtcaagggatgtgctccagagttactttgaccttcctgggggagctgattgaagttcaacgttgatgcattcaagagattcaataaatatatcaacaccgatgcaaagttccaggtattcctgaaagcagattcaacagctccctggtggactccaacatgctggtgcgctgtgtcactctgtccctggaccgatttgaaaaccaggtggatatgaaagttgccgaggtactgtctgaatgccgcctgctcgcctacatatcccagggtgcccacgcagatgtccttcctcttccgcctcatcaacatcatccacgtgcagacgctgacccaggagaacgtcagctgcctcaacacccagcctggtgatcctgatgctgggcccgacggaaagagcggttgcccctgtaacttgcggctgcttgcagcggattggagcacagcaagaagtaccctggattgctgcgtcaacaacttccacaacctgctttgcttctggcagcagcactacctgcacaaggacaaggacagcccctgcctatagaacaacctcctgcatgagcttctcatactggaatggagacagtgtccatcctgttgaacccggaccggcagtcaccctctgctctcgttagctacattgaggagccctacatggacatagacagggacttcactgaggagtgaccttgggccaggcctcgggagtgctgctgggccagtgtgggtgagcgtgggtacgatgccacacgccctgccctgttcccgttcctccctgctgctctcttgcctgccccaggtctttggggtacaggcttgggtggggaggggaagtccttaggaagcccttgggtccccctgggtcttgagggccctaaggtcattggagagcctcagtccccataatgaaggacagggtaccatgcccacctttcccttcagaaccctgggggcccagggccacccaagaaggtaaagaggacatttagcatttagttctgttgttgagttccttgccggtttttttgggttgttcagtcagttcccagagtgggggaggaagatatggggtgaccccccaccccccaatctgtgaaagcaaaagcctccccttgtccccctggccctttggaacccccaggcaaaaagcttcctgaacccctgggcaaggggtggtgggtacccagagaatgctgccttcccccaagccttgcccctctgccctcattttcctgtagctcctctggttctgtttgctcattggctgctgtgttcatccaagggggttctcccagaagtgaggggcctttccctccgatcccttggggcacggggcagctgtgcctgccctgcctctgcctgaggcagccgctcctgcctgagcctggacatggggcccttccttgtgttgccaatttattaacagcaaataaaccaattaaatggagactattaaataactttattttaaaaatgaaaaaaaaaaaaaaaaaacctagt

SEQ ID NO: 134108 - DNA, 4226 bp, Homo sapiens
  misc_feature (1)...(4226): n = a,t,c or g
gaccggcccggaattcacgggtcgacgatttcgtgcggaagccgggccacataaaggagcgggcggcgcgacaggggcggcatctttcctgggtggggtttgtgaagtcgtggcccgttagcaggaagcctaacagtcgccccgacgcatagtgagggacccaatctgagtccccggccagccgaatccaagccgtgtgtactgcgtgctcagcactgcccgacagtcctagctaaacttcgccaactccgctgcctttgccagccaccatgcccaaaacgatcagtgtgcgtgtgaccaccatggatgcagagcttggagtttgccatccagcccaacaccaccgggaagcagctatttgaccaggtggtgaaaactatttggttggaggggaagtttgggttctttggtctgcagaaccaggacactatagggtttctccaccctggctgaaactcaataggaaggttgactagcccaggaatgtgcggaaggaaaagccccctgctctttaaagttccgtgccaagttctaccctcgaggatgtgtccgaggaattgattcaggacatcactcagcgcctgttcctttctgcaagtgaaagagggcattctcaatgatgatatttactgccccgcctgagaccgctgtgctgctggcctcgtatgctgtccagtctaagtatggcgacttcaataaggaagtgcataagtctggctacctggccggagacaagttgctcccgcagagagtcctggaacagcacaaactcaacagggacccagtgggaggagcggatccaggtttggccatgaggaacaccgtggcatgctccaggggaggatgctgtcctggaaatatctgaaagattgctccaagatctggagatgtatggtgtgaactacttcagcatccaagaacaagaaaggctcagagctgtggctgggggtggatgccctgggtctcaacatctatgagcagaatgacagactaactcccaagataggcttcccctggaagtgaaatcaggaacatctctttcaatgataagaaattttgtcatcaagcccattgacaaaaaagccccggacttcgtcttctatgctccccggctgcggattaacaagcggatcttggccttgtgcatggggaaccatgaactatacatgcgccgtcgcaagcctgataccattgaggtgcagcagatgaaggcacaggcccgggaggagaagcaccagaagcagatggagcgtgctatgctggaaaatgagaggaagaagcgtgaaatggcagagaaggagaaagagaagattgaacgggagaaggaggagctgatggagaggctgaagcagatcgaggaacagactaagaaggctcagcaagaacttggaagaacagacccctagggctcctggaactttgagccaggaacggaagcgtgcccagagcgaggctgaaaagctggccaaggagcgtcaagaagctgaagaggccaaggaggccttgctgcaggcctcccgggaccagaaaaagactcaggaacagctggccttggaaatggcagagctgacagctcgaatctcccagctggagatggcccgacagaagaaggagagtgaggctgtggagtggcagcagaaggcccagatggtacaggaagacttggagaagacccgtgctgagctgaagactgccatgagtacacctcatgtggcagagcctgctgagaatgagcaggatgagcaggatgagaatggggcagaggctagtggctgacctacgggcctaatcatatggccaaggaccgcagtgaggaggaacgtaccactgagggcagagaagaatgagcgtgtgcagaagcacctgaaggccctcacttcggagctggccaatgccagagatgagtccaagaagactgccaatgacatgatccatgctgagaacatgcgactgggccgagacaaatacaagaccctgcgccagatccggcagggcaacaccaagcagcgcattgacgaatttgagtctatgtaatgggcacccagcctctagggacccctcctccctttttccttgtccccacactcctacacctaactcacctaactcatactgtgctggagccactaactagagcagccctggagtcatgccaagcatttaatgtagccatgggaccaaacctagccccttagcccccacccacttccctgggcaaatgaatggctcactatggtgccaatggaacctcctttctcttctctgttccattgaatctgtatggctagaatatcctacttctccagcctagaggtactttccacttgattttgcaaatgcccttacacttactgatgtcctatgggagtcaagtgtggagtaggttggaagctagctcccctcctctcccctaccactgtcttcttcagggtcctgagatttacacggttggagtgttatgcggtctagggaatgagacaggacctaggatatcttctccagggatgtcaactgacctaaaatttgccctcccatcccgtttagagttatttaggctttgtaacgattgggggaataaaaagatgttcagtcatttttgtttctacctcccagatcggatctgttgcaaactcagcctcaataagccttgtcgttgactttagggactcaatttctccccagggtggatgggggaaatggtgccttcaagaccttcaccaaacatactagaagggcattggccattctgattgtggcaaggctgattagaagatcctgccccgattccttgtaggagtatgggccggtcttaaagtgagctctatgggcagatcttaccccttactttatgattccagatcctgcagtcacttcgtggggatcttgcccctccctgcttcaatacccaaatcctcttccagctattaacagtaggggattgagttacccaaaaggttcagccagccccatcaggactcttgtgaaaagagaggatatgttcacacctagcgtcagtattttccctgctaggggtgtttaggtctcttcccctctcagagctacttgggccatagctcctgctccacagccattccagcctatggcatctacagcttgatgccagtaggctctaactagggagtgagtgcaaaaagctgagtattggtgagagaagcctgtgccctgatccaagttttactcaaccctctcaggtgaccaaaatccccttctcatcactcccctccaaagagggtgactggggccctgcctctgttttggacaaacctctaacccaggtcttgacaccagctgtttnttgtcccttgggagctgtaaaaccagaggagctggctgggggattctgggcctagtccctttccacacccccaccccttgctctcaacccaaggagcatccacctccctcctctgtctcatgggtgctccttcttctttctacaagtattaatgtactctactgatatctaaaatattgatttctgccttcccttggtaatggcaccattaggaagatatttagtcttgggggcaggatgattttggcctcattactttaccacccccacacctggaaaggcatatactataattcaaaaatgacatttttgccaaaatttattaatataagaagctttcagtatttagtgaatgcccatctgtcaactataaggtccatacaaatccatttcttaaaagtacttgtttatttgtttatatttattactggtttggtctttcttcccccaggggttccaagtcccttccaaagggggccatcctgtccccaacccatgcaagtgcccccctagccttagagccctcccctcaaatccccccctgggccacccacccccccactctgtggcctggacctttgagggagtctttgtgtggcattggctgtggaattaagctccacttgggtgatatgtccgtatattgggcttaaattgaaacccggggattgtgggggcaatctatttaataggctgccttaaaagtcagtaaacttaccccttaagggaaggcctgggggaaaaaggttaagatttttgtatttcaggggtttttttgtgtacttttttggggtttttttaaaaaattggttttttggaggggttttatgctcaaatccatgtttctattttcagtgcccaataaaatttaggaagacttcaaaaaaaaaaaaaaaaaagggcggccgct

SEQ ID NO: 134109 - DNA, 3049 bp, Homo sapiens
gccacgtgtccggctcggagcccacggctgtcctcccggtccgcgccgctgcggttgctgctgggctaacgggctccgatccagcgagcgctgcgtcctcgagtccctgcgcccgtgcgtccagtctgcgacccgaggcctccgctgcggctgcgattctgctgcgaacctggacaccatggccaaaccaccacagggtgccggggaccggggctccatccatgacttcccaggctttgaccccaaccaggatgccgaggctctgtacactgccatgaagggctttggcagtgacaaggaggccatactggacataatcacctcacggagcaacaggcaaaggcaggagggctgccacagctacaaagtccctctacggcaaaggacctcattgctgatttaaaagtatgaattgacgggcaagttttgaacggttgattgtgcgcctgatgaggccacctgcctattgtgatgccaaagaaattaaaagatgccatctcgggccattggcactgatgagaagttgcctcattgagatcttggcttcccggaccaatgagcagatgcaccagctggtgaagagaatcacaaagatgcctacggagcgggacctggaggctgacatcatcggcgacacctctggccacttccagaagatgcttgtggtcctgcttcagggaaccagggaggaggatgacgtagtgagcgaggacctggtacaacaggatgtccaggacctatacgaggcaggggaactgaaatggggaacagatgaagcccagttcatttacatcttgggaaatcgcagcaagcagcatcttcggttggtgttcgatgagtatctgaagaccacagggaagccgattgaagccagcatccgaggggagctgtctggggactttgagaagctaatgctggccgtagtgaagtgtatccggagcaccccggaatattttgctgaaaggctcttcaaggctatgaagggcctgggggactcgggacaacaccctgatccgcatcatggtctcccgtagtgagttggacatgctcgacattcgggagatctttcggaccaagtattgaggaagtccctctacagcatggattcaagaatgacacctctgggcgagttacaagaagactctgctgaagctgtctgggggagatgatgatgcggctgaccagttcttcccgaaggcagcgcaggtggcctatcagatgtgggaacttagtgcagtagcccgagtagagctgaagggaactgttgcgcccagccaatgactttcaaccctgaacgcagatgccaaagcgctgcggtaaagccatgaagggactcgggactgacgaagatacaatcatcgatatcatcacgcaccgcagcaatgtccagcggcagcagatccggcagaccttcaagtctcactttggccgggacttaatgactgacctgaagtctgagatctctggagacctggcaaggctgattctggggctcatgatgccaccggcccattacgatgccaagcagttgaagaaggccatggagggagccggcacagatgaaaaggctcttattgaaaatcctggccactcggaccaatgctgaaatccgggccatcaatgaggcctataagggaggactatcacaagtccttggaggatgctctgagctcagacacatctggccacttcaggaggatcctcatttctctggccacggggcatcgtgaggagggaggagaaaacctggaccaggcacgggaagatgcccaggtggctgctgagatcttggaaatagcagacacacccagtggagacaaaacttccttggagacacgtttcatgacgatcctgtgtacccggaagctatccgcacgtccggagagtcatccaggagttcatcagattgaccaactatgacgtggagcacaccatcaagaaggatgatgttctggagatatcagggatgcattttgtggccattgttcaaaagtgcaaagaccaagcctctcttctttcccgacaaacctttacaaatccatgaaggggtgctggcacagatgagaagactctgaccaggatcatgggtatcccgcaggggagattgacctgctcaacatccggagggggattccaatgagaaatttgacaagtctctccaccaagccatttgagggtgaacaactaccggagacttcttgaaaggccttgcgggctctctgtggtgggtgaggactagggcccacagctttggcggcgcacttctgcccaagaaaatggttatcagcaccaggccgccaatggccaagcctgattgttccagctccagagacttaaggaaggggcagggggtggggggaggggttggggttgggctctatttctttcagtggagcttaggaaacgctcccacttcccacggggccatcgagggcccagcacgagctgagcggctgaaaaaccgtagccatagatcctgtccacctccactccccctctgaccctcaggctttcccagcttcctccccttgctacagcctctgcccctggtttgggctatgtcagatccaataaacatcctgaacctctgtctgtaaaatgagtagtgtctgtactttgaatgagggggttggtggcaggggccagttgaatgtgctgggcggggtggtgggaaggatagtaaatgtgctggggcaaactgacaaatcttcccatccatttcaccacccatctccatccagggccgcgctagagtactgggaccagggaatttgggatgcctggggtttcaaatcttgcatcttgccatggcactttgttttcttgaccttagggccagccccttttccttccctgagtctctattttcttatctacaatgagacagttggacaaaaaaatcttggcttcccttctaacattaacttcctaaagtatgcctccgatctcattccccttgacactttttattttctaaggaagaaaataaaaagagatacacaaacacataaacacaaaagaaaaaaaagggggggccgtttttaaaaag

SEQ ID NO: 134110 - DNA, 435 bp, Homo sapiens
tgcattaccgcgcccggaattcccgcgtcgacgatttcgtcgaaaatgctttcattgtgttcattgcctcatccctcgggcacatgctcctcacctgcattctctggcggttgaccaagaagcacacagatcgcaagtcctacagctggaaacagcggctcttcatcatcaacttcatctccttcttctcggcgctggctgtctactttcggcacaacatgtattgtgaggccggagtgtacaccatctttgccatcctggagtacactgttgtcttaaccaacatggcgttccacatgacggcctggtgggacttcaggaacaaggagctgctcataacctctcagcctgaggaaaagcgaatctgaacccctcaatcctgcctgggaggacgcaccccacttgccataatctagataccccgatgccactccg

SEQ ID NO: 134111 - DNA, 939 bp, Homo sapiens
atgatgaaatgtgaggagcagaaggaggaggaggaagagactgtcaggatgttctctgcggcctcccagcctttggaccccgatgggaccttgttccggcttcgcttcacagccatggtctggtgggccatcacttttcctgtgttcggcttcttcttctgcatcatctggtccctggtgttccactttgagtacacggtggccactgactgtggggtgagtgccagctccccagcccctgggtcagggccaggtgcccaattacctgccctcggtgagctcagccatcggcggggagggtgccccagcgctacgtgtggcgtttctgcatcggcctgcactcggcgcctcgcttcttggtggcccttcgcctactggaaccactacctcagctgcacctccccgtgttcctgctatcgcccgctctgccgcctcaacttcggcctcaatgtcgtggagaacctcgcgttgctagtgctcacttatgtctcctcctccgaggacttcaccatccacgaaaatgctttcattgtgttcattgcctcatccctcgggcacatgctcctcacctgcattctctggcggttgaccaagaagcacacagtaagtcaggaggtacggtctatccctagcgggggctccaaggcagcccagaagaaaatcaaggacatctgtcctcaggattcgggtaatggtgaggatcgcaagtcctacagctggaaacagcggctcttcatcatcaacttcatctccttcttctcggcgctggctgtctactttcggcacaacatgtattgtgaggctggagtgtacaccatctttgccatcctggagtacactgttgtcttaaccaacatggcgttccacatgacggcctggtgggacttcgggaacaaggagctgctcataacctctcagcctgaggaaaagcgattctga

SEQ ID NO: 134112 - DNA, 2652 bp, Homo sapiens
aaaattaaaaaatgcagatcctcaggttccaagccttctgcattttcaaacaattcccccagtgagttgtatgggtaattaaagtttgtgaagcactgctctaggccctggagtctaagagagcctcttcccatctttggctttcctgtccccatctaaacccttgttcagtcatcccccatcctttcacctctcaaacaagcaagacaccagtccctgcagctgtgtattatcttctcctttttccttaaggactgaagcttcaataggagttccaggcattaagatggatggtggaaatgcacaagaacatggtcatttccttagactaccccaggtgcccaattacctgccctcggtgagctcagccatcgcgagagaggtgccccagcgctacgtgtggcgtttctgcatcggcctgcactcggcgcctcgcttcttggtggccttcgcctactggaaccactacctcagctgcacctccccgtgttcctgctatcgcccgctctgccgcctcaacttcggcctcaatgtcgtggagaacctcgcgttgctagtgctcacttatgtctcctcctccgaggacttcagtgggtgcctggatgagggaggagtggggaagtgttccctgaggggacgggcctgcccctaccacattcggaccttcctacttcgtggtgtgggcactccctgcaatgtggctcccaatcctctttccctccagccatccacgaaaatgctttcattgtgttcattgcctcatccctcgggcacatgctcctcacctgcattctctggcggttgaccaagaagcacacagtaagtcaggaggtacggtctatccctagcgggggctccaaggcagcccagaagaaaatcaaggacatctgtcctcaggattcgggtaatggtgaggtgggaactgagttctaatgggaaccctggcagaggggtgctggggttggggctggggcttgggaacaaactgagggtggttggtcagaatctaggactatagcactgtgtttgggtagtgtgggagactggagaatagaagagatggaggctgcaaatggggatagaatgaggagtcgcatctaggcggcagtgagttaggaacagtgtcagaggactggtctgtcataattccagcgccccacccatgtacatgggtttcttttcccccacagtatttggaggtggggttggtgggtgactccatgtaactttcatactccatccccctgaagtggaagcggcaggaataccactgctcctcggcccatcactcccccagaggcagggacgtgaacacatagtcgtcattcttgctgcccctgcctgtgctcccttccatgaccgctagtgggagccaagggagataaggcccagcccttaggagttagggctgagaggggagcccacgctctcatacccagcaagctgcagagtgatcagacagcccattccctaggatcgcaagtcctacagctggaaacagcggctcttcatcatcaacttcatctccttcttctcggcgctggctgtctactttcggcacaacatgtattgtgaggctggagtgtacaccatctttgccatcctgggagtacactgttgtcttaaccaacatggcgttccacatgacggcctgggtggggacttcggggaacaaggagcttgcttcataacctctcagccttgaggaaaaagcgatttttgaaacctttcagtcctgcttggggaggacgcagcccactgcccagaaacaagaaacacgataccattctggccttccccaccccacatcctctcttggccttactgaagatgggggaagggtaagaaggaagggtgtaggccaaggctcaccccagtgctgctggcttctcctctccacccctcatatgggcgtggggtcctcaaacatcacctttacctgagaggccccaagaagctgagctggcagagagctccaccatttggtgctaaaaaaaaaaaaacgtcctgaggttcatgaccaccatccagtttctgggcctttacacagtcacctttcactgagggtcagggagcccctgagcaagtggctgctccctgacaaccacaagccatttctctgcacgggggtcattcactaggactaatgtatttcatgatctactgtgcacatccaggcctgtggcccaaagacccctgctaaagttgctcaggtgttctagtcctgacttcacctttttgatttggtgtgtgccctagggtatgtacccttccccatctgagcctcggtgtgtccatgtgtctggtgggggatgggtggactgtatgaatttcccaaggactcctacccagtcagtggttctgatgtcatcgggtggaggtggtgttctaaaccctaaagggatgacctgctcccagaaacagcacccagcacagcatgtattttcttctcttctgaaagttctggcttgtagacccctcccttcctttgcaaaggtatgggatagaggggtcagatgcagatctctactgtaaaatgggctccctggtatctcctgtcttccctactgctccaaaccctaaattttggttgtacattttatttgaaaggaaaataaattttttttttgggccaaaaaaaaaaaaaaaaaa

SEQ ID NO: 134113 - DNA, 206 bp, Homo sapiens
cagaaaaggcggcccagatgaaatcccaggtgatgacacatctccacgtgattgaagaaaggaggaaccaaagcctctctctgctctacaaagtaccttatgtagcccaagaaattcaagaggaaattggatctggagtgggagagcaggatgggggactgatcggtgccgaagagaaagtgattaacagtaagaataaagtggat

SEQ ID NO: 134114 - DNA, 454 bp, Homo sapiens
atgattttccaatgccgagagagttggaggcctcgaggaagagcgggaatccgtgggcccactgcggcaggacttcagtatgagtagcagtgctctcattggcgtgctggtcatcgcagtggccattgccacggtcatcgtcatcagcctggtgatgctgaggaagaggcagtatggcaccatcagccacgggatcgtggaggttgatccaatgctcaccccagaagagcgtcacgtgaacaagatgcagaaccatggctatgagaaccccacctacaaatacctggagcagatgcagatttaggtggcagggagcgcggcagccctggcggagggatgcagatgtgcaggctcctcctctctggactttctccaaaggcactgaccctcggcctctactttgtcccctcacctccaccccctcctgtcaccggccttgtgacattcactcaga

SEQ ID NO: 134115 - DNA, 2111 bp, Homo sapiens
atggcggccaccgggaccgcggccgccgcagccacgggcaggctcctgcttctgctgctggtggggctcacggcgcctgccttggcgctggccggctacatcgaggctcttgcagccaatgccggaacaggatttgctgttgctgagcctcaaatcgcaatgttttgtgggaagttaaatatgcatgtgaacattcagactgggaaatgggaacctgatccaacaggcaccaagagctgctttgaaacaaaagaagaagttcttcagtactgtcaggagatgtatccagagctacagatcacaaatgtgatggaggcaaaccagcgggttagtattgacaactggtgccggagggacaaaaagcaatgcaagagtcgctttgttacacctttcaagtgtctcgtgggtgaatttgtaagtgatgtcctgctagttccagaaaagtgccagtttttccacaaagagcggatggaggtgtgtgagaatcaccagcactggcacacggtagtcaaagaggcatgtctgactcagggaatgaccttatatagctacggcatgctgctcccatgtggggtagaccagttccatggcactgaatatgtgtgctgccctcagacaaagattattggatctgtgtcaaaagaagaggaagaggaagatgaagaggaagaggaagaggaagatgaagaggaagactatgatgtttataaaagtgaatttcctactgaagcagatctggaagacttcacagaagcagctgtggatgaggatgatgaggatgaggaagaaggggaggaagtggtggaggaccgagattactactatgacaccttcaaaggagatgactacaatgaggagaatcctactgaacccggcagcgacggcaccatgtcagacaaggaaattactcatgatgtcaaagttcctccaactcctctgccaaccaatgatgttgatgtgtatttcgagacctctgcagatgataatgagcatgctcgcttccagaaggctaaggagcagctggagattcggcaccgcaaccgaatggacagggtaaagaaggaatgggaagaggcagagcttcaagctaagaacctccccaaagcagagaggcagactctgattcagcacttccaagccatggttaaagctttagagaaggaagcagccagtgagaagcagcagctggtggagacccacctggcccgagtggaagctatgctgaatgaccgccgtcggatggctctggagaactacctggctgccttgcagtctgacccgccacggcctcatcgcattctccaggccttacggcgttatgtccgtgctgagaacaaagatcgcttacataccatccgtcattaccagcatgtgttggctgttgacccagaaaaggcggccccagatgaaattcccaggtgatgacacatctcccacgtgattgaagaaaggaggaaccaaagcctctctctgctctacaaagtaccttatgtagccccaagaaaattcaagaggaaattgatgacgtccttcaggagcagcgtgcagatatggaccagttcactgcctcaatctcagaggacccctgtggacgtccgggttatgctctgatgagagtgaggagatcccaccggttccaccccttccaccccttcccagcccctacctgagaacgaaggatcttgggagttgggagagcagggtgggggggactgatcggtgccgaagagaaagtgattaacagtaaagaataaagtggatgaaaaacatggtccattgaacgagactcttggatgttaaggaaatgattttcaatgccgagagagttggaggccctcgaggaagagcgggaatccgtgggcccactgcgggaggacttcagtctgaagtagcagtgctctcattggcctgctggtcatcgcagtggccattgccacgggtcatcgtcatcagcctggtgatgctgaggaagaggcagtatggcaccatcaagccacgggatcgtggaagggttgatccaatgctcaccccagaagagcgtcacctgaacaagatgcagaaccatggctatgagaaccccacctacaaatacctggagcagatgcagattt

SEQ ID NO: 134116 - DNA, 4069 bp, Homo sapiens
  misc_feature (1)...(4069): n = a,t,c or g
cggtcgcgtgtgctaagcgaaggagtctgagatatttgagacttaggagccccgcactagagccaacccgcagaagggaaatggtccaccggtaacgcggccaccgcaacagcgggagtgctcctgcttnctgctgcttgtggggcttaaacggcgcctgccttggcgctgcgccggctacatcgaggctcttgcagccaatgccggaacaggatttgctgttgctgaaccctcaaatccnccaatgttttgtgggaagttaaatatgccatgtgaaacattccagactgggaaatcgggaaccctgatcccaaccaggcacccaagagctgcttttgaaaccaaaaggaagaagtttcttccagttacttttcaggagatgtatcccagagcttacagatcacaaaatgtgatggaggcaaaaccagccgggttacgtattgacaacttggtgcccggagggacaaaaagcaatggcaagagtcgcttttgttacaccttttcaagttgtctcgtgggttgaattttgtaaagtgatgtccctgctaagtttccagaaaaagtgcccagttttttccacaaaagagcggatggaggtgtgtgaggaatcaccaagcactggcaacacggtaagtcaaaaaaaggccatgtcctgacctccagggaaatgacccttaataatagctaacggcatgcctgcctccccatgtgggggtagaaccagtttccatggcactgaattatgtgtgctgaccttcagcacagagattattgggatcttgtgtcaaaaggaagaggaggaggaagaagaaggagaaagaggaagaggaagatgaaaagggagacttatgctgtatataaaggaaatttcctactgtaagcagatctggaagactccacagaagcatgctgtggatgaggatgatgaggatgagagagaaggggaggatgtggtggaggaccgagaatactactatgacaccttcaaaggagatgactacaatgaggaaaatcctaattgaccccggcagcgccgccaccatgtcagaccaaggaaattactcatgatgatcaaagctgtctgctcccaggaggcgagtgacggggccctgccgggccgtgatgcctctttggtacttctacctctccaagggaaagtgcgtgcgctttatatatggtggctgcggcggcaacaggaacaatttttagtctgaggattattgtatggctgtgtgtaaagcgatgattcctccaactcctctgtctaccaatgatgatgatgtgtttttttagacctctaaagatgataatgagcatgctcgcttccacaaagctaaggagcatgtggtgattcggccccgcaaccgtatggacaggcttaagtaagaatggtaatatgcacaacttccagcttaaataacctccccaaagcagagaggcaaaactctgattcagcacttcccaagcccatggttaaagctttagagaaggaagcagcccagtgagaagcagcagctggtggagaccccaccctggcccgagtggaagctatgctgaatgacctgttgtcttatggctctggagaactaccctggctgccttgcagtctgaccccgccacggcctcatcggnattctccaggccttacggcgttatgtccgtgctgagaacaaagatcgcttacataccatccgtcattaccagcatgtgttggctgttgacccagaaaaggcggcccagatggaaatcccaggtgatggacacatcttccacgtgattgaagaaaggaggaaccaaagcctctctctgctctacaaagtaccttatgtagcccaagaaattcaagaggaaattgatgagctccttcaggagcagcgtgcagatatggaccaagttcactgcctcaatctcagagcacccctgtggacgtcccgggtgagcttctgagggaaggggggagatcccaccgttccaccccttccaccccttcccagccctacctgagaacgaagacactcagccggtgtttgtaccacccaatgaaaaaaggatctggagtgggagagcaggatgggggactgatcgttgccgaagagaaaagtgattaacagtaagaaataaagtggatgaaacattggtcaattgacgagactctggatgttaaggaaatgattttcaatgcgaagagagttggaggcctcgaggaagagcggggaatccgtgggccccactgcgggaggtcttcagtctagatagcagtgctctcattgacctgctggtcataacagtggccattgccacgggtcatccgtcatcagcctgggtgatgctgaggaagagcaagtatggcaccaatcagccacgggatcgtggatggttgatccaattgctcaccccaagaagagcgtcacctgaaccaagatgcagaaccagtggctatgagaaccccacctacaaaatacctggagcaagatgcaagatttaggtggcaggtagcgcggcacgccttggcggaagggatgcaggtgggccgaaagattccccacgattcccaatcgactgccaaacgagcagccgctgccaggggctgcgtcctggacatcctgacctcctggacttgtaggactatataaagtactactgtagaacttgcaatttccattcttttaaatgggtgaaaaaatggtatattacccatttatgattatttaaaccttaaatgaaaaaaaatgatcctattgcggataatgtgaggtagttttctttttttaaattaatcagaaacccccactttccatttgtattgtctggacacatgctcctcaatatataaataaatgggaaattgtcgattttccaataataggacttattatggcagggctgtccgttccgggttatgtttgtgtaaagtccaactctttcaggccttcattccactgtcctgggcttttatttttaaaggaaaaaaagggcagtattcccttttttaaatgagctttcaggaaagttgctgagaaaatgggggtggaaatagggaaactgtaaatggcccacctgaaagcaacgtgaggagacccctcgcaaaaaatgaatgtgaaaaggacccagtttccttgaaagtcccaagtgtttcccacggcctgggataccctgtgtgtcttcccattaaaaagtccctgtcaacccaaggaacgtttaaaaggcaattttaattcccaagcgtcttctaggaggagcttagttgtattacaggatgaggggtgtcccgctgcttgcttttcccttcgggattcccagtggtttccacagagatctagcctgtaagcttattatttggacattcttcactggtctgtttgtttaccctacccgtagcctttttacccgttcactttcccctttccaactatggtcccagatgttgcagggctcctcctctctgggacttttctccaaaagggaactgaaccctcgggcctctactttgtccccctcacctccacccccctcctgttcaccgggccttgtggacattccactccaggggaaggcccacacccaagcgaggcggccgcggctggcccccagggaggagaccacgggggaggtttggtttggtgtgaaagggaaaagtaggtcccagggcttgtcccctgaaaactggaggtcttgtggaccacttgtggaaaagctttggaacaatttgtgtttttcggtcacagggagcctttggaaatgcctggtacaagttggatgtcggatgcctcactgcttcctgctttttctttctttttattttaaaaaatctgaaggttctgggtaacctgtgggtgtatttttaattttcctgtagactgtttttgttttgtgttttttcctttttcctcccctttgacccttattcatgtctctaccccactatggcacaggattaaactttcacctacaaactccattaatatgattctgtgggaggaatggtacacaggtttaaaccacaatcaataaaatacttttaacttccaaaaaaaaaaaaaaaaaacctcgtggccgaattcttgggcca

SEQ ID NO: 134117 - DNA, 1137 bp, Homo sapiens
ctgacccgtctgtgactctgtgtccttggggacctcctattctaaacacaagagcgtggcctgctgtcaccgtcaccatcctggcatctgcagaagagccaccaagcgctgcctcctgagaattttgcgtggccctctgtctctggctcctttcatagagtgtgatgtcctcaaggtccatccacactgtggccggcatcagagccttgttccttttcatggctgagtcctgctccatggtggcgtttgtatgtgcgaggcctggggtagcaaacttttctgcagagatccagatggcaaatgttttagcctttgcaggctggacagtctctgcctgccattgtagcgggaaagccaccacaagcaatatgtcaacaagtgggtgtggccgtgtgccaataaaacagctgtgtttaatcaatgctgggcagccctgcagcttggtgacatcagtgggccactggctactgggtgttttttccatcctgccctgttccctgctggcaccaggggaaaaaggcccatacaggagtctgttccaggtcaccagatcctgctttctggcgaccatgctcaggctgtagctgggggaactctcttcccgccctcctgggacctctcgagcctcttgagtctgctcccagtgccgttcaccgggtggtgaggatgtggtctcgcaacagacgccttctttgcaggctgctaccctggaactgtttttaaatgtgggtgatgctgccccccagggggcactgggcgatgtttggggacgtgtggttatcacaactgggatgctccatctgatcttctgatctccctcaaagagctgcgtctcaggtcgcaggtgaactttctggatggtgtggtctgcgtgcgtgtgtgcgtctggctgcctgccaggagggaaccgctgttgctgccctgtgtcgctgtcgcctgaacgtattgctgtcctggggggactgctccctagaaagcctccgtgccgtgtcgttggtgagcgccggtctgtgctgacactgcaggctacttcccagtgcccacgatgacagctctgcctctgaagtgagaagcggagacgccactgggaggggcggggggcggagggcacggggttcaagtgccaggctgagccta

SEQ ID NO: 134118 - DNA, 1175 bp, Homo sapiens
cctagtccgtgtggtggaattccatgcagaatatattggcagttctcttgagtcagctgatgaaaacccaagagccagcaggcagtctggaggaaaacaacagtgacaagaacagtgggccacaggggccccgaagaactcccacaatgccacaggaggaggcagcagagaagaggccccctgagccccccggacctccaccgccgccacctccaccccctctggttgaaggcgatctttccagcgccccccaggagttgaacccagccgtgacagccgccttgctgcaacttttatcccagcctgaagcagagcctcctggccacctgccacatgagcaccaggccttgagaccaatggagtactccacccgaccccgtccaaacaggacttatggaaacactgatgggcctgaaacagggttcagtgccattgacactgatgaacgaaactctggtccagccttgacagaatccttggtccagaccctggtgaagaacaggaccttctcaggctctctgagccaccttggggagtccagcagttaccagggcacaggtgcctctctcatccctgcaatccagacagcacatgcagcagctcaaaaagcaaaccagtttacatctgatgccaccatttggcattttacagccccttataagatgcagagatgtattcttggggaactattcacaaagaagcctatttttcaagccaatctggaactggctcagctagaactgatcagccgactttgtggtagcccttgtccagctgtgtggcctgatgttatcaaactgccctacttcaacaccatgaaaccgaagaagcaatatcgaaggcgtctacgagaagaattctctttcattccttctgcagcacttgatttattggaccacatgctgacactagatcctagtaagcggtgcacagctgaacagaccctacagagcgacttccttaaagatgtcgaactcagcaaaatggctcctccagaaagagttgtgctggggaccatgccccatcccgctgatacagatcctgaatggaataatcaggaatggcacagtgcaggtgtcaatatcaaagaaataaggttcctaattcccaatcagggccacatccataagatcatcatcttcctccccaatcataaagtctgggctgagccttga

SEQ ID NO: 134119 - DNA, 4029 bp, Homo sapiens
  misc_feature (1)...(4029): n = a,t,c or g
actgagttcagctcccagactggaattaagtggaagcctgacaggtgagatactggaatgacgactgcgtgaactggatctcttctttttactatgagaagatgaatgtcttgaatatgcaggacttctacttctggacttcatggatttcctactggggagtggactccgactcagagaccgcttgctcaggaaagggctgctggaccgccttcgaccatagggactgggcgatcgcccgctgtaagagccacttctttcgtagctggacgaccgtctcctgctttagggactgacagatctctgtcgccttctgtaggggcttggtgaccgggtgcacttcctgtgggggatccctggatcttcggtttgggctgtccactgttttgtaacttttgggtgtttccctttttcgatgacttttactccggtctttgtgcccagacttcagctcccgttctttcctggtcttctccttgtggagcttggatgacctggattccttgctgctgcttttggcttcctgcgcctttccatagtcatcagtctcctcattcgaacgngncctgtgctggtggtgacggtgtttgtgcaggcggtcgctccggtttgatccccgacgttcgtcgttctcccttcggtctagtttgaaggccttgtcatcggtgtaggtgtcggaatcagagctgatatcatcatactccaccaaaggtttgataactgtgcccagggatgctgcttcgggggtcaccaaccccatgtctttggagtgtttggacttatgccgcttgtgcttcgataccaagcggtgacgctctctgctgttagaggtgccgcctcccgatgacggctgcaaagttccagaagctcctccactcccgtccttcttgcccccatgtctctctgaattgggctttccctttcccctgaccagatgcaggacaggctgcttgatcctgaaaatgtctggggagctagatgatgagcttcggccaggtgattggagcagaggaacacagaatccaggaacagccagtcctttggggctgtactccctagaccctgctgcctcctcctgtggcattgtgggagttcttcggggcccctgtggcccactgttcttgtcactgttgttttcctccagactgcctgctggctcttgggttttcatcagctgactcaagagaactgccaatatattctgcatgtcagctggtgtgcttgaagcttcaagggtcgtctgttctgctgaaggcaggatcactggggcagagggtgcttccttcaaagactcctctggggccatggtctctgagtcctgctgctgggaagtagcttccgtcagggcactgatggattggttcagggcttccagctgctgctgcatctctgggttggagtggatgttaagcagctgtgccatttgagggatgctcaggtcggtttggctctgcagcaggtttaataacactgccaattcactttgattcagctgttgtgtgatgtcagcaaggcctattgcatccccagccccagactccaccttgccaggagcaggctgaggtggtgctgggctgctgttcttcacaggctcagtacttgtccctgaggtagtttcttttcgagaagttttggatggaggtggctcttcgactacaacaccactttgtcgctgacgtcgccgtttcttactccacaactcatggcaatcctgccagtgggggaggtctggaggagccattttgctgagttcgacatctttaaggaagtcgctctgtagggtctgttcagctgtgcaccgcttactaggatctagtgtcagcatgtggtccaataaatcaagtgctgcagaaggaatgaaagagaattcttctcgtagacgccttcgatattgcttcttcggtttcatggtgttgaagtagggcagtttgataacatcaggccacacagctggacaagggctaccacaaagtcggctgatcagttctagctgagccagttccagattggcttgaaaaataggcttctttgtgaatagttccccaagaatacatccacagctccaaacatctatggctggtgtgtaacgttcctatcctagcagtagttctggaggtcggtaccacaaagtaatgactttgtttgtgtaagggcgactctcttcagagttatagagccgagcaagtccaaaatctgctagtttgatttgcccactgttattcagcaaaatgttagaacacttaatatcccgatgcaggaaattctttttgtgacagtattccaatccttccattagttgtttcatgaacgacttgatatggtcctcagaaaagtgcactaaaaccagattctagcagtcccattaagtcatggtccatatactcaaatacaaggtaaaaggcacctttgtccttcttgaaatccagtgcatcttgtttatctgtgacaatttccttcatgttaacaacacttcggtggattaactgacgaaggattttgatttcacgaatggctgtgattgggaagccctctttctcattgtctagtctcaccttcttcagagccactagttctcctgtgtctttgtccttggctttatatacttggccataggttccttctccaataatcccaataatgtcaaacttgtccacacagcgtttcccccagtcgctttctgtttgtcttctttctccataacgaggacaacaaatttttggtctctttttatatggttgctgaggtggtgtgattgcctttggttctggagagtctgggggagacagatctccaccagggagctctggagggagaggaaggtctgtgagtaagtgacgtgtcctctgttccttctctttcttcacaggttttgaaggaagagtttcttttggactatccatgtcatcatctccaggtaataagggtgggaggggcaaaggaggcaacgttgaagttttcaggtgtggaatagcagctgttacagatacttgagtcttcacagaaacctgtacagggggctgagaatttgcctgagaggacacagcagatgtctttgagtgagtagaagggggcaaagttgaagtactggaagcaggaacctgactaaatgctggctgagaaggaggcagaggtggttgctgtggaagagctggtattggaggcaaaggtggcaaagggggtgtctgaggtggaggggtagtagttggtagagggggtgggggagaagcaattgtgggaagaggtggaggggtctccttttctgatgtttctgtctcctttggagtaacaatctcctctttcagtgctatgggtttagagtctcttgttccctgtgctttcaaatctttaacaagatgcttctcggagttctcatccaactttactttccctgtatctgaagaattttttacctctgtgtttagatgtgttacattcaccagttcagtatctggggcagatttttccaattttacacttctgggtaactttttagactccaaacctgaatccttagcctctactgaactgttctcttttctaggcaaaaatacaggtgaacccttggactcctttccatccatctttgctgcagcagcagcagctgctctttccttctttttcctactgagttcagctcccagactggaattaagtggaagcctgacaggtgagatactggaatgacgactgcgtgaactggatctcttctttttactatgagaagatgaatgtcttgaatatgcaggacttctacttctggacttcatggatttcctactggggagtggactccgactcagagaccgcttgctcaggaaagggctgctggaccgccttcgaccatagggactgggcgatcgcccgctgtaagagccacttctttcgtagctggactcctttccatccatctttgctgcagcagcagcagctgctctttccttctttttcctactgagttcagctcccagactggaattaagtggaagcctgacaggtgagatactggaatgacgactgcgtgaactggat

SEQ ID NO: 134120 - DNA, 1452 bp, Homo sapiens
  misc_feature (1)...(1452): n = a,t,c or g
aagggcgaactgatggccaaggcgagactacgaatcccagcaagcagtacgcgacgcgaggacgcaggaggaggagcccggagctgcagccaccggggagccagacagggtctctgtcacccaggctggagtgtagtggcgcaatctcagctggctggagcctttgacctccttgggctcaagctatcctcccacctcaagcctctcaagtagctgggactacaggcagcaaacgacctgcatctcgagtatgccatggggaagcgatacttctgtgactactgcgaccgctccttccaggacaacctccacaaccgcaagaagcacctgaacgggctgcagcacctcaaggccaagaaggtctggtacgacatgttccgagatgcagctgccatcttgctggatgagcagaacaagcggccctgcaggaagtttctacttgacaggccagcgcgactttggctccaacttgcagattttccccacatgtcagagcgaagacctgaaggagctgaagcatccaggtggaggaaggaagaggcgagccaagggagtggttacttagatgctcctgagcttccccgagggccatcttggaggacttggcttggaagaaagaagagccaagcggcttgagcttcagccccaagttagccagggctgaaacccattcagaaccactgttctttccagtaaccccgtngggttggccaaccaagttcaggaagcttgcctcccaattcttgcgggcaccccccacctggggggttggccctcttgcagcccagagtcccagtggggctgagcccctttgcccccgacttgaccccccacgtggtcacttttctcatcagtcacaataggaagccaagcccggttcctgctacgccccatggaggctccgagaccatctgccccagcctcactgaggctcaggacacggccacaccaagtgcagccctcgtcctgggtctgcaccgggcagctctcccctcactctcctccacctgcccccctgcttcttaagaagatgggggagaaaacttccaaatgtttaccaaagaaagtctgtcgccacagtggtctggctgtgtttccctccactgggtgctctgagctctgttctccagcccctagcagaggtcgggcaaggagggaatcagatgagattttccccaggtgacccacgctcactcccttctcccttgggaccagcagaggttcagcacggccaggcagagggtgtgccagggtggctgtgcccgttgcctggtaagaagtggctctaggcccaaggagcccaagggctccatctgccatccccgccctggaagaatccacagcccccatgtctgcccatgctgagctgctgcccaagtatttgggatggctcacctggggcatgggagcggcctcgtgccaagctaggcgtactcatggtcataacggtac

SEQ ID NO: 134121 - DNA, 459 bp, Homo sapiens
gcagttgaatgcggagctcaggagccgtggttggggccaacaggatggtccaggccctccctcccctggcaaaagcccaagtccctgcagaaccagcccctccccagacagcctgggcctcccagaggacccttgcttgggccccagaaatgaagggcggcgagcagtgtctgtgcatgaggaccagctccaggcccctgctgaacggcccctgaggctgcagcgctcccccgtcctcaaacgcaggccaaaactcgaggcacctccatccccaagcctaggatctggccttggaaccgagcctctgcccccacagcccacagagccctccagccctgagcggagcccaccctccccagccacagaccaaacgaggcggcggccccaatccctgatcctctcctctcctgccgcatgagattattttattaaaaaactcaaaggaaaaaaaaaaaaaaa

SEQ ID NO: 134122 - DNA, 1137 bp, Homo sapiens
gccaccaccgcccgccgccggggggccccaggtacccccagccttgccgcagaagggaatgggctcagtgcccgcgtggacgagggcgtggaggaattcttctccaaaaggctgatccagcaggatcgcctctgggcccccgaggaggacccggccactgaggggggcgccactcctgtcccccgtacactgcgaaagaagctgggcaccctctttgccttcaagaagcctcgttcaacgcggggtccacggactgatctagagaccagccctggggcagctccccgaacccgaaaaactacatttggcgacctactgcggccgccaacccgtcccagccgtggtgaggagcttggtggggctgagggggacaccagcagccctgaccctgccggcaggagccgacctcgctacacaagagatagcaaggcctactcgatgatactgctgcctgccgaggaggaggcaacgctgggtgccagacccgacaagcggcggcccctggagcggggagaaacagaactggctccatcctttgaacagcgggtacaagtaatgctgcagaggataggcgtcagccgaggcagcgggggtgccgaaggcaagaggaagcaaagcaaagatggcgagatcaagaaagctggctcagatggtgacattatggacagttccacggaggcccctcccatctcgatcaagtcccgcacccactctgtgtctgctgacccttcctgcagacctggcccagggagccaggggcctgagtctgccacctggaagacactggggcagcagttgaatgcggagctcaggagccgtggttggggccaacaggatggtccaggccctccctcccctggtcaaagcccaagtccctgcagaaccagcccctccccagacagcctgggcctcccagaggacccttgcttgggccccagaaatgaagaacggcccctgaggctgcagcgctcccccgtcctcaaacgcaggccaaaactcgaggcacctccatccccaagcctaggatctggccttggaaccgagcctctgcccccacagcccacagagccctccagccctgagcggagcccaccctccccagccacagaccaaagaggcggcggccccaatccctga

SEQ ID NO: 134123 - DNA, 408 bp, Homo sapiens
  misc_feature (1)...(408): n = a,t,c or g
atcctcaactgctaacagagagagctttacatcatttaattgatttggagaaaattaaggcttacattgattccttccgctttggagcccctcctcatgctggtggaggcattggattggaacgagttactatgctgtttctgggattgcataatgttcgtcagacctccatgttccctcgtgatcccaaacgactcactccttaaattcacacttnnnnnnnnnnnnnnnnnnnnnnnnnnnnnnnnnnnnnnnnnnnnnnnnnnnnnnnnntaaatagaaaggccccnnnnnnnnnnnnnnnaccttgtaatggcgaggctgttctttaggtccttaaaattgtgcctaaaataatttggcgggggcctaaaaattcggggcttttttgggaaaactcataatacg

SEQ ID NO: 134124 - DNA, 350 bp, Homo sapiens
ctaaagagagatatggaatatcttcaatgatacaatcacaagaaaaaccagatcgagttttggttcgggttagagacttgacaatacaaaaagctgatgaagttgtttgggtacgtgcaagagttcatacaagcagagctaaaggtaggattggtttcattattaaagctctttcgctggtcttccctctcctcaacagggagaaattcaaaaagagcggggaagcagcagagtggggaggtagagggaagcccaacagaatgtgcctgaaggagcctggaaagaaagaaaaatctgtcaagcagaatgccagtgaagagcttgctctgtgtgtttggaataccaactaa

SEQ ID NO: 134125 - DNA, 610 bp, Homo sapiens
ttttgttgtcgttgccactgtatttacacctcacttacacagggactggtaacccatgctgccttggcaagccaactgcactcctctgtcccaacaagcagggcaatggattgcgaagaggcctcctccgtccccaagcagctacgtcgcccaggggaagagagaaggcgggaaagtccaagagaggagaaaccaaggcccgcgcttaggtgggtgttgtagtgacgagtctgcggttacagccgagcggagttgaaagggggaagcctgcgagggagggtggtgtccactgcccagttccgtgtcccgatgcccagcgccagcgccagccgcaagagtcaggagaagccgcgggagatcatggacgcggcggaagtgggtttcctcctttcctgggcctgggaggacagacccctgggccgggctgcgccgagggagggaggagggggagtggggccctacaggtccttgtcggcacgttctccgcagcctcgcgggcgtggggtccgggcccctccagcccttgccccagcagtggggcaagacactctccggaccgagtttcttgcgggggtcacctggagtgggcggttaattactagcccgacca

SEQ ID NO: 134126 - DNA, 1567 bp, Homo sapiens
gaattcggcacgagcagatggttaaatttgctgccaacatcaacaaagagagcattgtggatgtagaaggtgttgtgagaaaagtgaatcagaaaattggaagctgtacacagcaagacgttgagttacatgttcagaagatttatgtgatcagtttggctgaaccccgtctgcccctgcagctggatgatgctgttcggcctgaggcagaaggagaagagacatcaactagtcaggcagtcttccgtctccagtctggcatctgccatctcttccgagaaactttaattaacaaagggtttgtgggaaatccaaactcctaaaattatttcagctgccagtgaaggaggagccaatgtttttactgtgtcatattttaaaaataatgcatacctggctcagtccccacagctatataagcaaatgtgcatttgtgctgattttgagaaggttttctctattggaccagtattcagagcgggagaactctatacccatagacatctacctgagtttgttggtttggacattgaaatggcttttaattaccattaccacgaagttatggaagaaattgctgacaccatggtacaaatattcaaaggacttcaagaaaggtttcagactgaaattcaaacagtgaataaacagttcccatgtgagccattcaaatttttggagccaactctaagactagaatattgtgaagcattggctatgcttagggaagctggagtcgaaatgggagatgaagacgatctgagcacaccaaatgaaaagctgttgggtcatttggtaaaggaaaagtatgatacagatttttatattcttgataaatatccattggctgtaagacctttctataccatgcctgacccaagaaatcccatttatgtgatcagtttggctgaaccccgtctgcccctgcagctggatgatgctgttcggcctgaggcagaaggagaagaggaaggaagagctactgttaaccaggatacaagattagacaacagagtcattgatcttaggacatcaactagtcaggcagtcttccgtctccagtctggcatctgccatctcttccgagaaactttaattaacaaaggttttgtggaaatccaaactcctaaaattatttcagctgccagtgaaggaggagccaatgtttttactgtgtcatattttaaaaataatgcatacctggctcagtccccacagctatataagcaaatgtgcatttgtgctgattttgagaaggttttctctatatggaccagctaagatttctagtcctatgttgaataacagtggtgaaaatgagcatccttgtcgtgttccagatctaagagaaaaggatttcagtttttcctcattcagtacaatactagctgtgtgtctgtcgtatatggcttttattatgttaagcatcaacaaagagagcattgtggatgtagaaggtgttgtgagaaaagtgaatcagaaaattggaagctgtacacagcaagacgttgagttacatgttcagaaggccctgatgtgtgatgttccccttcctgtgtccaagtga

SEQ ID NO: 134127 - DNA, 2343 bp, Homo sapiens
tgctgagaccccagggtcgggagggcggagactgggagggagggagaagcccctttagcctgccttacggaagcctgcgagggagggtggtgtccactgcccagttccgtgtcccgatgcccagcgccagcgccagccgcaagagtcaggagaagccgcgggagatcatggacgcggcggaagattatgctaaagagagatatggaatatcttcaatgatacaatcacaagaaaaaccagatcgagttttggttcgggttagagacttgacaatacaaaaagctgatgaagttgtttgggtacgtgcaagagttcatacaagcagagctaaagggaaacagtgcttcttaatcctacgtcagcagcagtttaatgtccaggctcttgtggcggtgggagaccatgcaagcaagcagatggttaaatttgctgcaaacatcaacaaagagagcattgtggatgtagaaggtgttgtgagaaaagtgaatcagaaaattggaagctgtacacagcaagacgttgagttacatgttcaagaagatttatgtgatcagtttgggctgaaccccgtctgcccctgcagctggatgatgctgttcggcctgaggcagaaggagaagaggaaggaagagctactgttaaccaggatacaagattagacaacagagtcattgatcttaggacatcaactagtcaggcagtcttccgtctgcacgtctggcatctgccatcccctccgagaaactttaattaacaaaggttttgtggaaatccaaactcctaaaattatttcagctgccagtgaaggaggagccaatgtttttactgtgtcatattttaaaaataatgccatacctggctcagtccccacagctatataagcaaatgtgcatttgtgctgattttgagaaggttttctctattggaccagtattcagagcggaagactctaatacccatagacatctaactgagtttgttggtttggacattgaaatggcttttaattaccattaccacgaagttatggaagaaattgctgacaccatgggtacaaatattcaaaggacttcaagaaagggtttcagactgaatttcaaacagtgaataaacagttcccatgtgaggccatttcaaatttttgggagccaactctaagactagaatattgtgaagcattggctatgcttaggggaaagctggagtccgaaatggggagatgaagacgatctgagcacaccaaatgaaaagcctgttggggtcatttggtaaaggaaaagtatgatacaagatttttatattcttgataaatatcccattgggctgtaaagaccctttccctatacccatgcccttgacccccaagaaatccccaacaggtcccaactcttacgaatatgttccatgagagggagaagaaatatttgtcaggagctcaaaagaatacatggatcctcaactgcctaacagagagagctttacatccatggaatttgatttggagaaaattaaggcttacattgattccttccgctttgggagcccctccccaatgctggtggaggcattgggattggaaccgagttactatgctgtttctgggattgcataatgttccgtcagacctcccatgttccctccgtgatcccaaaccgactcactccttaaattcacactttgccacttaactccagtgtggatgacagagcgagaccctgcctcaaaaaaaaaaaaaaaaaaaaaaaaaaaaaaaaaaaaaaaaaaaaaaaaaaaaaaaaaaaaaagaaagccacacttattcttttcagtaacctgctagtgcacaggctgtactttaggtacttaaaatatgcactagaataaatttgcaaggccctaaaatatcactgttatttttggagtaattcagtataggttcgtttaaaagagatttttataacttcagacatgcatcagtaggaaataacttgagaaattcatatggttatgttacaaattcatattctgttactacagtaaacgttaagagttttaaacagttaagattgtacaatttttcttcttttctatattacaagggccccagtgttaatgtcttagattttcagtatttgaacttatttttttaaattctgtcattgagataagaataattcaggtagcatctgaaattttaatgaatgtataattggcatatcatggaaaattaaccagaaagtatcagttcttaaaagttatgcctagaaattatgtaaagctaaactactggttagaaagtattcagtgtaatattgtattaatttgttaaattctaaacttgaatttcaataaaattttaaagct

SEQ ID NO: 134128 - DNA, 884 bp, Homo sapiens
cggacgcgtgggcggacgcgtgggcggacgcgtgttcggacgcgtgggaagccctgcgatttttggaaaatgagcaccatgaactgcaggccaagattgaatgcctgcaaggggacagagacctgtgcagcttgcatacccaggacctacaagatcaactaaaaaggtcagaggcagagaaactcaccctggtgaccagagtacagcagttgcaggggttgcttcaaaatcaatccttacagcttcaagaacaggagaaactcttaacaaagaaagatcaggctttgcccgtgtggagtccaaagtccttccctaacgaagtggagcctgagggtacagggaaggagaaagcctgggatctcagagaccagctgcaaaagaagactttgcagctccaggccaaggaaaaggaggtgagagggtgacctgagatagtgagggctcatttgcgaaatagcagagaaacctgggaggcagtcaaaaagcagggatttcaaagtttaagttgtgagtggataaccacagacattcatttgcctacataaagtgtctgtgcttatgggctgacttgtcagtctattcccttccttatttataccaactcctattcaaggttttattaaatgatcaccttttagaaagtcgaccaaaactcacacacatttaataaaaatattaacttctcaatatgtcgtcccacattgagtatcttaagtcattatatgtctcttaaagagtaaaactcttcctttgtacatactcacaaacatacacatccccagaagtattgatatgcaactagctcctgggaaagaaacttgtactaaggtcacttgtaggtcggttgttctaagggtcttcaatttcgctgcaggcgggtcaat

SEQ ID NO: 134129 - DNA, 859 bp, Homo sapiens
tttcgtcggtaccaagaagggacgtgttaatggggcccagacctatggattgaaagcgtgtgctttacccatctgctgtcttgctccatctgagaccagagccaagatctgcccaggactggaatgctttcccgagtggcttgagttggagcctgggactaggagcagccttattgaggtacaattcatgtgcttgtgggtttggatggcacaatctgtgtctgggctaaggaaagcagacttggcaccaacattaaccctgacagatccaggcatctattccaggaactggaagccaagcgcaacaggtgcttggaggtcatcatgatcagcccagaccccaggccctcccctggcttggcccggtgggctgagggctatgaggccaagtgtgagcgcaggcaagagatccgggaaagccgccgctgccgtcccaatgtgaccacttgccgccaggtggggaagacgctgaggatccagcagagagagcagctccagagagctcgactgcagcagttcttcaggaggaggaacctggagctagaggagaagggcaaagcgcagcatccccaggccagggagcaagggccctccaggcggccaggacaggtgactgtcctcaaggaacccttgtcttgtgccagaaggatttcttctcccagagagcaggtgacaggcaccagctctgaagtctttccagcccagcatcctcctccctcaggcatctgcagggatctgtctgaccacctctcctcacaggctgggggccttcctccacaggacactcccatcaagaagccacccaaacaccaccgtggtactcagacaaaggcagaaggaccaacaattaagaacgatg

SEQ ID NO: 134130 - DNA, 592 bp, Homo sapiens
tttttttttatgaatttataaagtttatgttgacctttattataattaatattgtattaatcatcacatattattatatataagatataaatttaatataactatctggtaattatacctatgtttactaacaattttacaactgctggctgcagcggtcgcatcgacattcattattattacatttccattttgcaaatgttagaggaactccttccatttgtcaggtgtgacccatgacttgcatgtctctggggacactctgggaagatgtcttcataagataatgaagctcagataaacatgagacagaacagtcccaaaaatccctcagcattgcccaagccctcaggggagtttcctacttggtttatgaatctggtcccatattatagctcgttgagtagagaaattccaggatcttcctggcatgggatttctgatcagaaagagtggtccaggagtgagctggtcataatacacttcttcttggcgcagagcctccccccttggatgattctccagggcacattcctcctttggagctgcttgcatatggaccattcccagaaactgccttcatggctggttc

SEQ ID NO: 134131 - DNA, 3008 bp, Homo sapiens
atcagaaaggaatattcagtgtccagggtcaatgtatcaatcactctctgtgttcttggcctcatagacacaggtaaggtcaatactttgtgtttttttttaattattatactttaagttctagggtacatgtgcagaacatgcatcatcaaagggggagctctgcgccaagaagaagtgtattatgacagctcactctggaccactcttctgatcagaaatccatgcaggaagatcctggaatttctctactcaacgagctataatatggacagattcataaacaagtaggaactccctgagggctgggcatgctgagggattttgggactgttctgtctcatgtttatctgagctcctggcaagagaaggaggaaggtgaagggtacaggatgcacaccagctgactctgacccctgataatgagcacactgggaggccccatccaaaagtttagtcactgggacccaaacaagaggggttactgctgtcctctgggtccttgcctttggcactggactgaccccattcctggagtggaacagtaaagacagtacctctaataactgcatggagccctgggatggaaccatgaatgaaagctgctgccttgtgaagtgtctctttcagaatgcggtacccatgagttacatggtatatttcagttttggggggtaagtcctgcccccactgctcgtaatgtggctgatctccatcaagttcttcacagtgactgcaggcagctcacttgctgttttttaagtgcccttaactcaaatagtcaatatgccagaatggcgtcagggtggcagcgccaccccgtggctgaatgtggtggtgtaccacgcttcacgcaatctccttgcccagtgcgtatcaggttctaccccagggcggccaccacctgcacaccagcgtgcctaccagtgagtcatcgcttagggccctgaactgacctagaggcggggctggactccggcgtccggtaactccgcccctgagaaagacaccacctacttcagaagagcagaaactctttacaacaccaggattgggaagaggtggctaaagaaaaaggaaaatccttacacaaagaactacctgatacacatgaaagcctacactgagaacatctcatctaggtcttaccaccaaaaaggcatttttttccctctcatagaaaccacaaaggtctgaatctgacccagaggactatccttttctaatcatggaaaggaatcttgacttgaaactgtccaagaagctgagccaaacagggaggggacaggaatactttatgtctttattattaaaaggtaacatttattgtgtgctccatgccaggtgcatggcctgcattttgtcatttaatccttataacctacaaaccccaggccctcccctggcttggcccggtgggctgagagctatgaggccaagtgtgagcgcaggcaagagatccgtgaaagccgccgctgccgtcccaatgtgaccacttgccgccaggtggggaagacgctgaggatccaacagagagagcagctccagagagctcgactgcagcagttcttcaggaggaggaacctggagctagaggagaagggcaaagcgcagcatccccaggccagggagcaagggccctccaggcggccaggacaggtgactgtcctcaaggaacccttgtcttgtgccagaaggatttcttctcccagagagcaggtgggccgtgtcaagggacatactgctgtgtgctctgggaccctctctggacaaggagggtgggtgggctcctccctcactccacagggcctgcagagaatcctgagacaactgtcccagctcactggccctaaccctctcacatcccatccattcctctctagagagaacacaatgaatttccatgctctgacattctggaattccatgatttacccccgatcctccaggttaatcttacctcaggcctctgacagctcttggaaggtaagggaatgaaattctttttgaacaaagcttgggcttctatgtgttcccatctcatttttctttccacaggtaagcattctgaaggatacttccatctcaggaatctagaattaaatgagaagaatgtttttgaacctcaaggccaaggagtcactgcagaaagtgctggaggagaaaatgaatgcagagcagcaactacagagcacacaggtatggggatgccacatagacatggggctggggactccaggcagcttggggaacaaggggagccagctgcagaggacccttgggacccagcacagggagctggagagccaactccacgtgcttcagtccaaactgcaggtaccaggcactgggggtggggagggaagacagggtatggggaggagggatggtgatgaaagaagctgttcggccaagattgaatgcctgcaaggggacagagacctgtgcagcttggatacccaggacctacaaggtactcttctccttggaggccttgagtgcatggcagccatggccaagtgagctaagaaaaaagaaactgaagctttccagattctgaaagtccacagggttttcctggggtcctggcccacaaaaggcacccaggtgtggagtccaaagtccttccctaacgaagtggagcctgagggtacagggaaggagaaagactgggatctcagagaccagctgcaaaagaagactttgcagctccaggccaaggaaaaggaggtgagagggtgacctgagatagtgagggctcatttgcgaaatagcagagaaacctgggaggcagtcaaaaactgtcgagaagagctgaaccagagccagcagctgcctcccagagtaagagggtctctccttcccataaagccctggatgatgggacgattccttctttaaccaagttttgcacataaagacaacctgatgatctgaataatttgtgacaactgccttgggtgaaaatcagaagcaagcaactcagcgaaaaactcagaaggtttggg

SEQ ID NO: 134132 - DNA, 1173 bp, Homo sapiens
atggctgcagcggcggccggggccgggagcgggccctgggcggcccaggagaagcagttcccgccggcgctgctgagtttcttcatctacaacccgcgcttcgggccgcgcgaaggacaggttgttcggaatcctataattgaaaaacagagtaaagatggaaaaccagttattgaatatcaagaggaggagttgttggacaaggtttatagctcggtgctgcggcagtgctacagcatgtacaagctttttaatggtacatttctgaaagccatggaagacggaggcgtcaagcttctgaaagaaagattagagaaattcttccatcggtatttgcaaacgctacatttgcagtcatgtgacctacttgacatttttggtggaatcagcttcttcccgttggataaaatgacttatttgaaaatccagtcctttattaatagaatggaggaaagcctgaatatagtcaaatacactgcttttctctataacgatcagctcatctggagtggattagaacaagatgacatgagaattttatacaaataccttaccacctccctttttccaaggcacatcgaacctgaggccatgagtgcggctgtgtgctttatgatcgacggtggaccagtgaagttttcgtttgaatactgttgttcagcgtcgcacagtaaaatgaatcttactggtattttttgtcatgacttgccagcctctgtccacccaacgttggatttttgccgaagactggacagcatcgttgggccccagctcacagtgctggcctctgacatctgtgaacagtttaacatcaacaagaggatgtccgggtctgagaaagaaccccagtttaagtttatctacttcaaccacatgaatctcgccgagaagagcacagttcacatgaggaaaacgcccagcgtgtcgctcacttccgtgcacccggatttaatgaagattctcggtgacatcaacagtgactttaccagagtggatgaagatgaggagatcattgtgaaggccatgagtgattactgggttgttggaaagaagtctgatcggcgggagctctatgttattttgaatcaaaaaaatgcaaacctgattgaagtaaatgaagaggtcaagaaactttgtgcaacgcagttcaacaacatcttcttcttggattga

SEQ ID NO: 134133 - DNA, 1920 bp, Homo sapiens
gcggaagtgcggtgatctagcaggtttctgttttctctgggctggctgtgggaggctcccgaggtggggacccggtcgggatggctgcagcggcggccggggctgggagcgggccctcggcggcccaggagaagcagttcctgccggcgctgctgagtttcttcatctacaacccgcgcttctggccgcgggaaggagaggaggaaaataagattttattttatcatccaaatgaggtagaaaagaatgagaagattagaaatgtcggattgtgtgaagctattgtacagtttacaaggacatttagcccatcaaaacctgcaaaatctttacatacacagaagaacagacagttcttcaattgaaccagaagaaaatttcttggatggtcatggttgttcggtgtcctataattgaaaaacagagtaaagatggaaaaccagttattgaatatccaagaggaggagttgttggacaaggtttatagctcggtgctgcggcagtgctacagcatgtacaagctttttaatggtacatttcctgaaagccatggaagacggaggcgtcaagcttctgaaagaaagattagagaaattcttccatcggtatttgcaaacgctacatttgcagtcatgtgacctacttgacatttttggtggaatcagcttcttcccgttggataaaatgacttatttgaaaatccagtcctttattaatacgaatggaggaaagcctgaatatagtcaaatacactgcttttctctataacgatcagctcatctggagtggattagaacaagatgacatgagaattttatacaaataccttaccacctcccttttcccaaggcacatccgaacctgagttagcaggaagggattctccaataagagcagaaatgccaggaaatcttcaacactatggaagatttcttaccggacccttgaacctcaatgatccagatgcaaaatgcagaattccccaaaatttttgtaaatacagatgacacttatgaagagctccatttaatccgtttataaggccatgagtgcggctgtgtgctttatgatcgacgcctctatccacccaacgttgggatttttgccgaaggactgggacagcatcgttggggccccagcttcacagtggctgggcctctggacatcttgtggaacagttttaacatcaacaagggggatgttccgggtctgaggaaaggaaccccagtttaagtttattctacttcaaccacatgaatctcgtcgagaagagcacagttcacattgaggaaaacgccccagcgtgtccgctcacttccgtgcacccggatttaaatgaagattcctcggtgaccatccaacagtgacctttaccccagagtggaatgaagatgagggagatcattgttgaagggccttgagtgattactggggttgttggaaaggaagtctgatccggccgggagcctctatgttatttttgaaatccaaaaaaatgccaaaccctgattgaaagtaaaatgaaagaggtccaagaaacctttgtgcaacgccagttccaacaacatccttccttccttggattgacgggatgaccggcctcacctgagagcatatcctaaaaaacactctgcaaacatttggtcacatgcaagttagtggtcatatcgacggactgcattccaggacacagggtaaagcaatacttgctttgaagaatcacatttcgactcggtctgctcatctgaggtttttagatcttaactatttatgtggaattaattaaaggtagttggctatatcgctcaccatctcattcttttgacatctctgtgaatattttactggaaaataagactaataaattgttaaaagtttttaaaaaaaaaaaaaaaaaaaaaaaaaaaaagggcggccgct

SEQ ID NO: 134134 - DNA, 491 bp, Homo sapiens
atcagtgatgctttttagaattatagactgttagagttcagggttctaaaagatcaccagtccaatctacagcatgaagtttgactctccaacctcttcttgcatgctactaatgatggagcgctcacttccaccacgattccccaccctccaatgaggcagcctaccagtttgtgatggttctgaaatttttcttcatactgaactgaaacttctggaacctcctcatgcttggccacaatcctgtcctccaaggctgtagatgacacgccagcagcttctacccatgacattcctgctaaaggcacacagtaaagctggaattgagtctcctggcctcaaccccaggcctgggttctccctgcatcctgtactgccggcagcctcctctgcagctttcttgctaccaagtttccgttgactcaggaagctgtcatccctcttccagagtgtagtccggataccccaccccagccctatgctccacgaaa

SEQ ID NO: 134135 - DNA, 563 bp, Homo sapiens
ttaattaaatctgtgctttaggtgtactctgggctttttccagcaggctaaactgaaagcctatttttttttttttgaaagctgcattttaaggccatcaaatttcttcctaatctgtatcaaattgcctttaggtcctggatcctttgtctttattcctgtgtattgggcttaatttagtgacgtttatgtatttatcggtacaattcaaagggctaggagcattgtggtccacaggagaggccttcgctggctgcactggagagaggttttgggctctgctgggcagggtgtgaagaggagagcacaaagcgggccttcgggctcctgcatacggaaaatacatcaccgtctcctgtcttttcagagcaaaatctggagcggcaggtgttacagacacaatgtagacgactggaggcccggcactacagcctcagcctgacggcagagcagctctcccacagcgtggcggagttgaggagccagaaacagaagatggtctcagaactggagctgctccatgcagaacctgaccacttacgaaagtgccttgccttgcctgc

SEQ ID NO: 134136 - DNA, 598 bp, Homo sapiens
atggtgtgtgacttccacgggtactactacgacctcgatgactcttacgacgagagcgatgaggaggaggtcagggcccacctccgttgcgtggccgagcagccgcccctcaaactggacacgtcctctgagaagctagagtttttgcaactttttggcttgaccacccaacagcagaaggaggaattggtggcccagaagcggaggaagcggcggaggatgctgcgagagagaagcccgtcgcccccaacaattcagagcaagcggcagacgccttcaccgagactggcgctgtctacccgctacagccctgatgagatgaacaacagtcccaacttcgaagaaaagaagaagttcctgaccatcttcaacctgacccacatcatcgctgagaagaggaaaggtccactgcttgagatccgtggttacgataccaaccaggccgaaagctggagccgtagcttatcaacgctggcggaagatgcgctggcgaaacgtcccggctttcgttcattccgctgccaggattccagcctgctggcctttgattttgctggcgttcatcatagcgatatggtgacgctgctggcggagtacg

SEQ ID NO: 134137 - DNA, 7434 bp, Homo sapiens
  misc_feature (1)...(7434): n = a,t,c or g
ttggacatttttgagcgccgtggcttgaacggtgctttttgttcattcctgggttttaatattattttccttcttcatccctctctggccactatggaattctaatttgaaccatgtttggattgaagccgcctctgtatttcttaccagggtcctcactgagcagcgagtcgtcccccgtgtcctctccggccaccaaccacagctcccccgccagcacacccaagcgcgtgcccatgggccctatcatcgtcccccctgggggccacagcgtgcccagcaccccccccgtggtgaccatcgctccaaccaaaaccgtgaatggtgtctggaggagtgagagccggcaggatgccggtcccaggagcagcagtggaggtcgggaacgcctcattgtggagcccccgctccctcaggagaaggcagggggaccagccatcccctcgcacctgctcagcaccccctaccccttcggcctctcccccagctcagttgtgcaggattcccgcttcccgccactcaacctccagcggcccgtgcaccacgtggtgccccccagtaccgtgaccgaggactacctgagaagcttccggccctaccacaccaccgacgacctccgcatgtcctcactgcctcccctcggcctggacccggccactgctgcagcctactaccaccccagctacctggccccacaccccttcccccacccggccttcaggatggacgactcctactgcctgtctgccctgaggtccccgttctaccccatccccacccccggctccctgcccccactgcacccatcagcgatgcacctgcacctctctggggtccgctaccctcccgagctctcccactcatccctggcagcgctgcactcggagcgcatgtctggcctcagcgcggagaggctgcagatggacgaggagctaaggcgggagagggagcgcgagcgcgagcgcgagcgtgagcgtgaggctgaccgcgagcgggagaaggaacgtgagcgcgaacgcgagaaggagcgcgagcaagagaaggagcgtgagcgtgagaaggagcgcgagcgcgagctggagcgccagcgggagcagcgggcccgggagaaggagctgctggccgccaaggccctggagcccagcttcctgcccgtggccgagctgcatgggctgcgtggccatgccactgaggagcggggcaagccctcggagcagctgaccccaacccgagcagagaagctgaaggatgccagcctgcaggcgcccaagcccgtccaacaccccttgcatccggtgcccaccccacaccacacggtgcccagcctcatctccaaccatggcatcttctctctgcctagcagcagtgctgccacagccctgctgatccagcgcaccaatgaggaggagaagtggctggcgcggcagcggcggctgcggcaggagaaggaggaccggcagtctcaggtgtccgagttccggcagcaggtgctggagcagcacctggatatgggccggcccccggtgccggcggaggcagagcacaggccggagagcaccaccaggccaggaccaaaccgtcacgagccaggtggccgtgaccctccgcagcactttggggggccaccacctctgatttcgcccaagccccagctccatgctgcacccacggccctctggaaccccgtgtccctgatggacaacaccttggagacgcggcgggccgaaagccactctctgcacagccacccggctgcatttgagcccagccgccaggcagccgtgccgctggtgaaggtggagcgggtcttctgcccggagaaagcagaggaggggccacggaagcgtgagcctgcccctctggacaagtaccagccacctccgccgccaccacgagagggagggagcctggagcaccagcccttcctgcccgggcccgggcccttcctggctgagctcgagaagtccacccagaccatcctgggccagcagcgggcctccctcccacaggcggccaccttcggggagctcagcggacccctgaagcctggctcgccctaccggcccccagtgccacgggcccccgaccctgcctacatctatgatgagtttctgcagcagcgccggaggctggtcagcaagctggacctggaggagcgcaggcggcgggaggcccaggagaaagggtactactacgacctcgatgactcttacgacgagagcgatgaggaggaggtcagggcccacctccgttgcgtggccgagcagccgcccctcaaactggacacgtcctctgagaagctagagtttttgcaactttttggcttgaccacccaacagcagaaggaggaattggtggcccagaagcggaggaagcggcggaggatgctgcgagagagaagcccgtcgcccccaacaattcagagcaagcggcagacgccttcaccgagactggcgctgtctacccgctacagccctgatgagatgaacaacagtcccaacttcgaagaaaagaagaagttcctgaccatcttcaacctgacccacatcagcgctgagaagaggaaagacaaagagagacttgttgaaatgctccgtgccattgaagcagaaggcactgtcagcagcagtggccgactccttgacaaactctccgagggacagtcctgccgtctccctgagtgaaccagccacgcagcaagcctctctggatgtggagaagccggttggtgttgctgcttccttgtctgacatcccaaaggccgcggagcctgggggaagctgggaacaggtccggccccagggagctgttcgagagtccagggagctagctcctgccagcggggagaaggcacaggctgagcggggcccctggaggcaaaaagagtctgagcatgcttcactatatccggggcgctgcacccaaggacattcctgtgccgctgtcccacagcaccaatgggaagagcaagccgtgggagccctttgtggcagaagagtttgcacatcagttccacgagtcagtgctgcagtccacccagaaggccctgcagaagcataaagggagcgtggctgtgctgtctgcagagcagaaccacaaggttgacacgtccgtccactacaacattcctgagctgcagtcctccagccgcgcccctccaccccagcacaatgggcagcaggagccccccactgcaaggaagggccccccaacctaggagttggaccttgactcttaggaggaggaagaggaggatgatgaggatggaggggatgaggaggaagtccccaggcgcaagtggcaagggatcgaggccgtttttgaagcttaccaggaacacatagaagagcaaaatctggagcggcaggtgttacagacacaatgtagacgactggaggcccggcactacagcctcagcctgacggcagagcagctctcccacagcgtggcggagttgaggagccagaaacagaagatggtctcagaaagggagcggctccaggcagaactggaccacttacgaaagtgccttgccttgcctgcaatgcactggcctaggggctacctgaagggatatcccaggtgacggtttcccttgcactaggccgaacctatagtatagaaatattatctattttattaccttgaatatttaatatttttcactgggaggtttgaagcttacaaaatgagaatgtgccatgcatgaagcaaaggattccagggctccagaaaaaatgaatgaacttcaccttgacgtcaatgcaattgaattcaccgttgtcatttcaggcgaggcaaccaatgttagggtttgcccacagttttttctttttaaaagggtggtttttcgccccttcctcttcccacattatttctttaatctgaccttgaaggctccattagcaacactaaaacttgatcattaacagccccctgtgcatatgagtgggatcaaaccggttctgttctttcttgtgttgccatgttactatggcttcaagccccagttttgcttttgccacagcgatggggccagtctcattcctccccaaggagtgaaacttgcttcagctgaaaaggttgggtgcattgtcagtaaaaagggcttatttgtttcattttactttcctgcgaaaattttcttcaaaggcaacaagtcctagggaggcacacaaaggcaacccaaagggcttttcccccgggaaaagctctttccttaccctaaagctaaaaccaaattcaccaaactgaaggtagctttttattaactccgtggggagcatgtacagaagctctgtgtaaaacacagcttcacacccaccagattgttactacagtgggttgggttttcatacagacgtaaattttgagagaaaagtcaaagggtgcttaagccttcgccctgtgtatatatattaaaaaaaaaaccaaagttttgtatgttttttattactttaactattgttataaaaagcctgccatttttaatatgtggtttgggggatttttgtttgtttttcctgtttgggggttttgtttgttgccttsgctttttttgggcaaaaaaaaaaaaaaaaaaccttgcttttaggtgtttggtactgctgctggtcaggacattaaaatattgaagggtttttaaaaattaaagaagaagaaaagtaaaagagcttaccactggcgcctatgcgatcacttcatttttagtttgagttgcaccagaagctgccgtagaaagccatgcgctactgcttacctcctccactccccctgcctgcccccagcatctggacaagctaatagcaaatattacccattgctatcaagggaggagggggtagtcttgtagaacccatgtgtgacagtcatgtgcacacatgggcgggggcttttaaaaaccctttcaggaagtcaatgatttctgtgaatgatataattcttaaggtgtctgagagcaggtacagaataggaacttcagaggctttgtttaaaacgcaaagctttgtaaaagccacaaggtctgagctgaacccctcctttttgaacttactgtgacaagcacaggaacggtcagaaactgggctcatcacaccaaggcaaagcaacgggcgagtcttcctccttgtccgtagttactgcctatggaggcagtgtttagatcaagaaggcctctcttgctcccaagggccctcaccagaggccagggctgccagtcactggtctggggggtggaggcctgagctgagggcagggtgcctgacctgtgtgccggctgctcactgctgtgaccagcagccgagcccttggccctagcccttgctgcgcagaacagcttgctggcagctggcatcgtgtcgctttatctgcccccgcacagtttgctttgtacgtctgccaagaatcttccagttattagcaaactcagacgaatgtaccgccagtattatcagcagtcaacaagcaccttcctctccacagaagcagctggaagagaactcgaggggctgtgctgcaggcctcccctcgaaagacactgggaggtcaacatgttccacaggtgttcagagggagtctgctacaaactatcagggcaaaatctcactggatttctccactgaaaacctacttgaggtttctggtctgaaggcttaagagtcccatcttaggcacttccgctctcaggcctcctcctccatcacagatgtctggatgcttttggaaatggccttggctaaagtaaaagggaaaagtagatccgataacttaaaaacgtagctcatcccttaccatccaaggggcactcccttggttggattttctatgacagcacaggggacaggtggcacaccatgagaggtctgcccaggggtnggagcagtgtcactgtgcttagcaatagttggcttctcccctgtcagtggaaaccccacttctgcccggcccttgagcttcttgcccactgtctccccatcccttccacctacttgtggcgatctgagtacttctacttcttgctcaaagaagtaatacggcaatcagaatacaaaccagtaaggcaacacgaataaactaagaaaaaggtaagaactgtctcaaaaacgaaaccacacccacccaagacacagtacccagtcatggtttccccatccaactattagtttcatactttgaaaacttactttcagattattctcaaagaacacagtagcacctaaatctgttttcaattggacttaaaaattgacatgcaatctcttaagtaagttttttgttcagctacttcacactgagtacctcaaatctgctctggagtcgattatggccacctgtgtgtcaggatgcacctagaaagccctcggctcggtccttaggaccaatcttcctacatttacctggggaggggagcttgccatctgttccctcttgcagagggataccttccaatagtaaattatctggttcctcactgaaacaagttatttttgcttcatatagtcagagtcagactgacatgataaaatatcatgttcctaatctgttgtctcaggataagtgaccaaggacggggactttccacattttagtcttacattctaatcttaaagggattaaaggcacttgaattgggactaacattctggatagggttgcaccctttaagagtattcagagagcatcaaaaggagcccacaccttcagcagtgaagggattctaacacaggggaatctggcagtttgtaggcaggaatgggtatttttcctccaagtaggctccattaatacttgcccaaatcttcaaaagtttaagctggaatttttcacacccaggatccctaccccttttcccttgagggccacatgtttttcacacaagtgtaggaaaatgccaggggatccaccacaaggatgagatggggcagcacaaaccggattctgttcctcttttaaagtgtaataattagcccactttggccaatcctcctaaattcctttccaagtaaacccaagcctggttgactttccttacctaccttgccagtaagccctgtcccccccaacttttccccatccccagtgcccttaccccctaaaaaaactccccttaacctcctgccccttgacccctgagggaagaccccatgcctaactggtgttatattttgtatgtacccctgtgccttaattcctataacatgtaaacccccatacgtcaggtggggaggggagggaacacccggtgccctcggtcacttctggggggcagtttaggatgctgtggaaattaaaccttgttcttaagtgtactttgtttgaattaattgtattgtaatatatatatgttgaatgtagtaattaggtatttatgaatatattgctgtaatttctgccaacatccaaaaaataaaattcttcctaaattaaaaaaaaaaa

SEQ ID NO: 134138 - DNA, 1317 bp, Homo sapiens
gtggcagcccctcggcttgtcgccggagctgagaaccaagagctcgaaggggccatatgacactcctcccggacccctggacacacacagccctggggactggatgccttggagcatggcaagtccagagcaccctgggagccctggctgcatgggacccataacccagtgcacggcaaggacccagcaggaagcaccagccactggccccgacctcccgcacccaggacctgacaggcacctgcccccacacagtggaataaaatacaaactccagcatgaccacgcgggagcttcagcagtactggcagaaccagaaatgccgctggaagcacgtcaaactgctctttgagatcgctttcagctcgcatcgaggagagaaaagtctctagagtttgtggtgtaccaaatcatcgtcatctcagactgggagctttgacaacaacaaggccgtcctggaacggcgctattccgactctcgcgaagctcccagcaaagcgctgctgaagacgttcagggaggagatcgaagacgtggagtttcccaggaagcacctgactggggaacttcgctgaggagatgatctgtgcagcgtcggcgcgccctgcaggagtacctgggcctgctctacgccactccgctgcgtgcgccgctcccgggagttccctggacttcctcacgcggccggagctgcgcgaggctttcggctgcctgcgggccggccagtacccgcgcgccctggagctgctgctgcgcgtgctgccgctgcaggagaagctcaccgcccactgccctgcggccgccgtcccggccctgtgcgccgtgctgctgtgccaccgcgacctcgaccgccccgccgaggccttcgcggccggagagagggccctgcagcgcctgcaggcccgggagggccatcgctactatgcgcctctgctggacgccatggtccgcctggcctacgcgctgggcaaggacttcgtgactctgcaggagaggctggaggagagccagctccggaggcccacgccccgaggcatcaccctgaaggagctcactgtgcgagaatacctgcactgaagccggcctgggaccccgcagagcggctggagatttggggtcaccatggctcacaagtgggctgttatggggttctttttttttatttttccttttcttttttgttattttgagacagtctttgcttctgtcacccaagactgaagttgcagtggctcaattaatgtctcactgcagcctctaactcctgggcacaagcaatcctccccttcgtgcgaattcttgggctcgagggcaaaa

SEQ ID NO: 134139 - DNA, 672 bp, Homo sapiens
  misc_feature (1)...(672): n = a,t,c or g
ctgcagtaaacttttccaacgttggctgcagtaactattttcaataaaagctgtctggatgtctcaagttgtgttgggaaatttttcatattagaagctttcaaattaaattgtattatcatcaaagtctgtaatcatgaaaatctgttgatccgtagagtaacttgtattaaattttccctacattatgagccagtttacctactatgtacatacttcatggatgcattttgaaactttaatataggaaggggaagaagaaggagatgaggaaaatgatccagactatgacccaaagaaggatcaaaacccagcagagtgcaagcagcagtgaagcaggatgtatgtggccttgaggataacctgcactgtaatagcctaaacacaactcttatttacttacagccttatgtttttgtattttcttggtagacttaggtaatttttgttttaaaggacaggaaactgatattttaaagaccaatctgttctacctaggcatttttaactagtttttctgccagctatgttgaatgcacaaattctgtcacgcatgtttcattcattgctacataatttggttcttctgggaatatttttatgtagctcttggagtacagctatgaaaattaacaactgttaaaggaaacacnnnnnnnnnncgtaattttt

SEQ ID NO: 134140 - DNA, 1573 bp, Homo sapiens
  misc_feature (1)...(1573): n = a,t,c or g
atgtccccctggcatttcaaataggcccaaaatttttagctttttacaaaatttagaaaccttttattagattttcctccatatgcccttacccccccctgaggtagtttggttaaccgttcttcccctttttatttcccagttaacaaaagcccgggttaatgacattctcattcttttagccataaaaatttaaaggaacccttgaaggtggggccttttttttagctttaacccaaaaaaaaagaannnnnnnnnnnnnnnnnnaaaaaaaaacagcatcaagttcttaagattttcttcctcttttttttttttttttacacttgcttattagtatagcatctcgttccaaagctggtaccttttcttcaacaatgtgttaaaaactgagtataacccttaattcaaggtaggcctctacttctataaaaataggagccacacaaagatctaaaaagagtgctgactgcccagatccagaacagaggtacttaacacctttgttttccagtttagttatcaaagcgtggtgtgaacaaaatgcttagtgtcacactggcattacaaataggcccaaaattttgagcttttaacaagattgagaaacattatatgagatttaactcaatatgccttaacacatccatgaggtagttaggtaaacagtactacccattttaattacacagtaaacagaagcacggggaaggtgacatactcatactttaagcaataagaattagaagaaaccatagaagcttggggccttctctctagctctaacccaaagaaaatgaattttatttttttttttttaaaagaaaacagcatcaatcacttaagattttcttcctctttttttttttttttttacacttgacttattagtatagcatctcgttccaaagctgggtacctttcctccaacaatgtggttaaaaactgagtataccccttaattcaaggtaggcctctacttcctacctgaattgggtacaaaattaagacattatcttgtaagaactaaaattgtatttgaaatttttattttagctgcaaaaacaaaaacaaggcaaacaaacaacaaataacttggaaaatagggcttgtcaaatggatgtaaattcatcctttccgggggaaggcagaagggtaggaccctaccacaaagggaaaggatggcttaggttaatgggggggttaaattttaaaaaatacagtttaaatttcggggcttactttctgggaaatcccgtttttatgtcacctgcactgtggtaccagtaactatactgagtcaggttactttacagttaactatgtcccctaaaacccaataatccattaaccctctaataacagttattgggtgtggtcatactggggaattcttaaccatatagttgtcttgccaattttttttttaaacaataaattgtcttagtataagtcactgcatttctgtaacaaagtaatgaaaggcacagctaatccaagcggacttaaccctattcaacaaccagctgaaaaaatactttggttcttcaagcgaaaaaattacaaaaaaaaa

SEQ ID NO: 134141 - DNA, 2016 bp, Homo sapiens
  misc_feature (1)...(2016): n = a,t,c or g
cccacgcgtccgcggacgcgtgggctgctcgcggcgccggcgtcctgttcctcccgctgcatgctgccgctgccagccctgagtcacatgcctgcgcagctcctggccgcctggctccccatactagtcgccgatatttggagttcttacaacatggcagacattgacaacaaagaacagtctgaacattgatcaagatttggatgatgttgaagaagtagaagaagaggaaacctggtgaagaaacaaaactcaaagcacggtcagcgtaacttgttcagaatgatgccaaaatcctcagattccttgcagcccgttcaagaaaagacttgatgggtctgggtagaaacaccaacaaggatacattgaaagcctgccttagggtagttaaaagacggagtgaatgctctcaaaaacctgcaagttaaatgtgcacagatagaagccaaattctttgagggaaggttcacgggttctttgaaaggaagtatgctgttcttttatcagcctctatttgattaagcggttttgaaattattaatgcaatttatgaacctacggaaggaaggaatgtgaatgggaaaccagatgaaggaaggatgaggatttcggagggaattggaaagaaaagggccagattgaagatgagaaaaaggatgaaggaaaaagaagaccccaaagggaattccctgaattttggttaactgtttttaaagaatgttgacttgctcagtgatatggttcaggaacacggatgaacctattctgaagcactttgaaagatattaaagtgaagttctcagatgcttggccagcctatgagttttgtcttagaatttcacttttgaacccaatgaaatattttacaaatgaagtgcttgacaaggacatacaggatgaggtccgaaccagaaccagattgattcttgatcccttttcttttgatggaccagaaattatgggttgtacagggtgccagatagattggaaaaaaggaaagaatgtcactttgaaaacctattaaggaggaggcaggaaacacaagggacgtgggaccagttcgtactgtgactaaaaccagtttcccaatgactctttctctaacttttttcccccctcctgagattcctgaggagtgggagatctggatgatgatgctggaagcttattccttgctggcagactttcggaaatttggttcactttttaccgtgagcgtataatcccaagatccagtgttaatattttaccgggagaagcctattgaagatgatgatgatgattatgatgaagaaggtgaagaagcggatgaggaaggggaagaagaaggagatgaggaaaatgatcccagactattgacccaaagaaaggatcaaaacccagcagagtgcaagcagcagttgaagcagggatgtatgtggcctttgagggataacctgcactggtctaccttctgcttccctgggaaaggattgaatttacatcatttgacaagcctattttccaagttatttgttgtttgtttgctttgtttttgtttttgcagctaaaataaaatttttcaaatacaattttagttcttacaagataatgtcttaattttgtaccaattcaggtagaagtagaggcctaccttgaattaagggttatactcagtttttaacacattgttgaagaaaaggtaccagctttggaacgagatgctatactaataagcaagtgtaaaaaaaaaaaaaaaagaggaagaaaatcttaagtgattgatgctgtttttttttnnnnnnnnnnnnntaaaannnnnnnnnnnngggttaaagctaaaaaaaaggccccaccttctagggttttttcaaatttttatggttaaaagaaggagtttgtcatttacccgggcttttgttaactgggaaataaaaaggggaagaactgttaacctaactacctaagggaggggtaagggcatatggagtaaaatctaaaataaggtttctaaatcttgtaaaaagctaaaaattt

SEQ ID NO: 134142 - DNA, 359 bp, Homo sapiens
  misc_feature (1)...(359): n = a,t,c or g
gataaccttgaggctgaggcagtggctccttgcacagcagctgcacgcgccgtggctccggatctcttcgtctttgcagcgtagcccgagtcggtcagcgccggaggacctcagcagccatgtcgaagccccatagtgaagccgggactgccttcattcagacccagcagctgcacgcagccatggctgacacattcctgggctgaggacgtggacctccgggtgaactttgccatgaatgttggcaaggcccgaggcttcttcaagaagggagatgtggtcattgtgctgaccggatggcgccctggctccggcttcaccaacaccatgcgtgttgttcctgtgccgtgatggacccn

SEQ ID NO: 134143 - DNA, 399 bp, Homo sapiens
agcgtatcccgagtcgggcagcgccggaggacctcagcagccatgtcgaagccccatagtgaagccgggactgccttcattcagacccagcagctgcacgcagccatggctgacacattcctggagcacatgtgccgcctggacattgattcaccacccccttcccccagcccatccattaggccagcaacgcttgtagaactcactctgggctgtaacgtggcactggtaggttgggacaccagggaagaagatcaacgcctcactgaaacatggctgtgtttgcagcctgctctagtgggacagcccagagcctggctgcccatcatgtggccccacccaatcaagggaagaaggaggaatgctggactggaggcccctggagccagatggcaagag

SEQ ID NO: 134144 - DNA, 394 bp, Homo sapiens
attaagtccggatctcttcgtctttgcagcgtatcccgagtcggtcagcgccggaggacctcagcagccatgtcgaagccccatagtgaagccgggactgccttcattcagacccagcagctgcacgcagccatggctgacacattcctggagcacatgtgccgcctggacattgattcaccacccatcacagcccggaacactggcatcatctgtaccattggcccagcttcccgatcagtggagacgttgaaggaggcctgggctgaggacgtggacctccgggtgaactttgccatgaatgttggcaaggcccgaggcttcttcaagaagggagatgtggtcattgtgctgaccggatggcgccctggctccggcttcaccaacaccatgc

SEQ ID NO: 134145 - DNA, 428 bp, Homo sapiens
ctgcggaattcggcacgagccggatctcttcgtctttgcagcgtagcccgagtcggtcagcgccggaggacctcagcatccatgtcgaagccccatagtgaagccgggactgccttcattcagacccagcagctgcacgcagacatggctgacacattcctggagcacatgtgccgcctggacattgattcaccacccatcacagcccggaacactggcatcatctgtaccattggcccagcttcccgatcagtggagacgttgaaggagatgattaagtctggaatgaatgtggctcgtctgaacttctctcatggaactcatgagtaccacggaaagctttgcttctgaccccatcctctaccggcccgttgctgtggctctagacactaaaggacctgagatccgaactgggctcatcaagcgca

SEQ ID NO: 134146 - DNA, 830 bp, Homo sapiens
catgcgggacctcaagaatgtgccacaccaccgaagagcttgccttgaccccatcctttacggccgcttgctgtggctctagacactaaagaacctgagatccaaatgggctcatcaagggcagcggcacttcagaggtggagctgaagaagggagccactctcaaattcacgcggaataacgcctactggaaaagtgtgacgagaacatcctgtggctggactacaagaacatctgcaaggtggtggaagtgggcagcaagatctacgtggatgatgggcttatttctctccaggtgaagcagaaaggtgccgacttcctggtgacggaggtggaaaatggtggctccttgggcagcaagaagggtgtgaaccttcctggggctgctgtggacttgcctgctgtgtcggagaaggacatccaggatctgaagtttggggtcgagcaggatgttgatatggtgtttgcgtcattcatccgcaaggcatctgatgtccatgaagttaggaaggtcctgggagagaagggaaagaacatcaagattatcagcaaaatcgagaatcatgagggggttcggaggtttgatgaaatcctggaggccttagggcactgggctgttgttccattgaagccgactcttgccctggcccttacttgcttctctagctctctaggcctctccagtttgcacctgtccccaccctccactcagctgtcctgcagcaaacactccaccctccaccttccattttcccccactactgcagcacctccaggcctgttgctatagagcctacctgtatgtcaataaacaacagctgaagcaaaaa

SEQ ID NO: 134147 - DNA, 424 bp, Homo sapiens
tcctgtggctggactacaagaacatctgcaaggtggtggaagtgggcagcaagatctacgtggatgatgggcttatttctctccaggtgaagcagaaaggtgccgacttcctggtgacggaggtggaaaatggtggctccttgggcagcaagaagggtgtgaaccttcctggggctgctgtggacttgcctgctgtgtcggagaaggacatccaggatctgaagtttggggtcgagcaggatgttgatatggtgtttgcgtcattcatccgcaaggcatctgatgtccatgaagttaggaaggtcctgggagagaagggaaagaacactccaccctccaccttccattttcccccactactgcagcacctccaggcctgttgctatagagcctacctgtatgtcaataaacaacagctgaagca

SEQ ID NO: 134148 - DNA, 401 bp, Homo sapiens
catctaccacttgcaattatttgaggaactccgccgctggcgcccattaccagcgaccccacagaagccaccgccgtgggtgccgtggaggcctccttcaagtgctgcagtggggccataatcgtcctcaccaagtctggcaggtctgctcaccagcaagagttagggccttagggcactgggctgttgttccattgaagccgacttctgccctggcccttacttgcttctctagctctctaggcctctccagtttgcacctgtccccaccctccactcagctgtcctgcagcaaacactccaccctccaccttccattttcccccactactgcagcacctccaggcctgttgctatagagcctacctgtatgtcaataaacaacagctgaagcaaaaaaa

SEQ ID NO: 134149 - DNA, 1362 bp, Homo sapiens
  misc_feature (1)...(1362): n = a,t,c or g
atggccgtggaccagctgggcacaaccctcaccctgcactggggccagggcaccctggtcaccgtctcctcagcacccaccaaggctccggatgtgttccccatcatatcagggtgcagacacccaaaggataacagccctgtggtcctggcatgcttgataactgggtaccacccatcgtccgtgactgtcacctggtacatggggacacagagccagccccagagaaccttccctgagatacaaagacgggacagctactacatgacaagcagccagctctccacccccctccagcagtggcgccaaggcgagtacaaatgcgtggtccagcacaccgccagcaagaacactaaaggacctgagatccgaactgggctcatcaagggcagcggcactgcagaggtggagctgaagaagggagccactctcaaaatcacgctggataatgcctacatggaaaagtgtgacgagaacatcctgtggctggactacaagaacatctgcaaggtggtggaagtgggcagcaagatctacgtggatgatgggcttatttctctccaggtgaagcagaaaggtgccgacttcctggtgacggaggtggaaaatggtggctccttgggcagcaagaagggtgtgaaccttcctggggctgctgtggacttgcctgctgtgtcggagaaggacatccaggatctgaagtttggggtcgagcaggatgtttgatatggtgtttgcgtcattcatccgcaaggcatctgatgtccatgaagttaagggaaggtcctgggagagaagggaaagaacatcanggaggacagcaaaatcgagaatcatgagggggttcggaggtttgatgaaatcctggaggccagtgatgggatcatggtggctcgtggtgatctaggcattgagattcctgcagagaaggtcttccttgctcagaagatgatgattggacggtgcaaccgagctgggaagcctgtcatctgtgctactcagatgctggatagtangatcaagaagccccgccccactcgggctgaaggcagtgatgtggccaatgcagtcctggatggagccgactgcatcatgctgtctggagaaacagccaaaggggactatcctctggaggctgtgcgcatgcagcacctgattgcccgtgaggcagaggctgccatctaccacttgcaattatttgaggaactccgccgcctggcgcccattaccagcgaccccacagaagccaccgccgtgggtgccgtggaggcctccttcaagtgctgcagtggggccataatcgtcctcaccaagtctggcaggtggccagataccgcccacgtgcccccatcattgctgtga

SEQ ID NO: 134150 - DNA, 2839 bp, Homo sapiens
  misc_feature (1)...(2839): n = a,t,c or g
cagcgggataaccttgaggctgaggcagtggctccttgcacagcagctgcacgcgccgtggctccggatcttcttcgtctttgcagcgtacgcccgagtcggtcagcgccggaggaccgtcagcagccatgtcttttctcccatagtgaagccgggactgccttcattcagacccagcagctgcacgcagccaatggctgacacatttcctgggagcacatgtgccgccttggacattgattcaccacccatcacagcccggaacactgggcatcatctgtgaccattgggccagggcttcccgatcaagtggagacgttgaaggaagatgattaaagtctgggaatgaaatgtggctccgtcttgaacttctcctcatgggaacttcatggagttaccatgcgggagaccattcaaggaatgtggcgcacagccaacggaaaagcttttgctttcttgaccccattcctcttaccgggcccgttggctgtgggttttaggacattaaagggacctgagattccgaactggggctcatcaaagggcaacggcacttgcagaggttggagcttgaagaaagggagccactctcaaattcacgctgggataacgcctacatgggaaaagtgttgacgagaacatcctgttggttggattacaagaacatttgcaaggtgggtggaagttgggcagcaagatctacgtggatgatgggcttatttctctccaggggaaacagaaaaggtgccgacttccctggtgacggaggtggaaaatggtggctccttgggcattattgaagggtgtgaaccttccctggggctgctgtggactttgcctgcttgtgtcggagaaaggacatccaggatctgaagtttgggggtcgaaccaggatgttgatatggtgttttgcgtcattcatcccgcaaagcatcctgatgttccatgaagttaggaaggtccttgggagagaagggaaaagaccatcaaggattatccagcaaaatccgagaatccatgagggggttccggaggtttgattgaaatccttggaggccagtgatgggatccatgggtggctcgtgggtgattctaggcattgaggattcctgcagagaagggtcttcccttgctcagaagatgattgatttggaccggttcaaccgagcttgggaagccgtgtcatctgtgctactcagatgctggagagcatgatcaagaagccccgccccactcgggcttgaaggcagtgattgtggccaattgcagtcctggattggaagccgacttgcatcatgctgtcttgggagaaacagccaaagggggactatcctctgggaggctgtgccgcatgcagcaccttgattgcccgtgaagcacgatggctgccatcttaccactttgcaattattttgaggaactccgaccgcctggcgcccaattaaccagcgaccccacagaagccaccgccgtggggtgccgtggaagcctccttcaagtgctgcaagtggggccataatccgtcctcaccaagtctggcaaggtctgctcaccaaggttggccagataccgcccacgtgcccccatcattgctgtgacccggaattccccaggaaagctcgtcagggcccacctgctaccggggcatctttcccgggggtttgccaaggacccgattccaggagggcttgggcttaagacattgggacttcgggtgaaactttgccatggaatgtttggcaaggcccgaggcttctttcaagaaaggggagatgtggttcattgtgcttgaccggaatggcgcccctggcttccggctccaccaaacaacatgcgtgttgttccctgttgccgtgatggaccccgagggccctcttcttcaaggccctgttcccacccttttttccccaagcccattccatttaggcccagcaacggcttggtagaacttcactctggggctgtaaacgtggccactggttaggttggggacaacaggggaaggaagatcagacgcctccactgaaaacatgggctgtgttgtgcagccctgctctaagttgggacagccccagagccctggcttgccccatcagtgtggcccccaccccaatccaagggaagaaggaggaattgctggactgggaggcccccttgggaacccagcatggccaaagagggttgaacagctttcccttttcctgttgtgttattttgttccagttcctttaagaaaaaaatgggatgccccagaggactcccccaaccctgggcttggggtcaagaaaacagcccagccaagagttaggggtccttagggatactgggctggggctggttgttccaattgaagccgactctggccttggccctggccccttactttgcttctctaagctctctagggcctctcccagttttgcacctgttccccaccctccaactcagctgttccttgcagcaaacacttccacccttccaccttccattttcccccactactgcagcacctccaggcctgttgctataaaggcctacctgtatgtcaataaacaaccagctgaagcaaaaggcctggaggtcctgcagcaaacactccaccctccaccttccattttcccccactactgcagcacctccaggcctgttgctatagagcctacctgtatgtcaataaacaacagctgatgctttnnnnnnnnnnnnnnnnnnnnnnnnnnnnnnnnnnnnnnnnnnngggannnnntttnnnnnnnnnnnnnnnnnnnnnnnnnnnnnnttgggggggggcccctttnnnnnnnnnnnnttttaacccccgggggggggcggtttttta

SEQ ID NO: 134151 - DNA, 2673 bp, Homo sapiens
  misc_feature (1)...(2673): n = a,t,c or g
gggccggccgccatcgcgcactggggctccgggcggctgggaccggcctggggtagctgtgcagcaggtgggtcggtcccggggatgcaacgcgggggtcagagagcgaccccaacagggtagacggtctgtgggttctggctaccacctgagcccactgggcatgtggtcatccctggcacctctcctttggagccaccttgtccctggctagacagtcacattttcccagtgccgttttggaaagatgttgcctttggagaaggcgtttgcctccccccaggagctccccagccccgccggatctgcccacgccggggtcagcagccggagttccagcaggaagaacccgagaccatccctgagaggacccctgctgaccctggagttctcccgcctgcgtttccgggaatttgtctacccaggaggctgccgggccccaccagaccctggcccggctgcatgagctgtgccgccagtggctgatgcctgaggcgcgctccaaggagcagatgctggaagcttgctggtgctggagcagttcctgggcatcctgcctgataaggtccggccctgggtggtggcacagtaccctgagagctgcagaagcagcctcctggtggagggcctcgctgatgtcctggaagagccaggtccctccactgttgacagggatgctgctgggctcccctgcgggctcatcctcaattcttagcgatggagtgtacgagaggcacatggaccctctgctgctaccaggcgagctcgcgagccccagccaggcccttggagctggggagatcccggcaccttctgagacaccctggctttctccggaccccctgtttctggaacagaggagggtcagagaagcaaagaccgaagaggacggccctgccaacaccgagcaggtgggtgggcacgagcaggtgggtgggaggtctcagccacgactaatgtttcagaagctgaagtcctttccagaggaccctcagcacctgggggagtggggccacctggaccctgccgaggagaacctgaagagctaccggaagctgctcctgtgggaaggcgggaggcggcaggagagcgctgggtgcgcctgcgaggaggccgcccccgcgggggtgctgcctgagctgcctacggaggcgccccctggggacgcccttgccgatcccccgtcgggcaccactgaggaggaggaagagcagcctgggaaggccccggacccgcaggacccccaggacgcggagtccgactctgccaccggatcgcagaggcagtccgtcatccagcagcctgccccggacaggggcacggcgaaactgggaaccaagaggccgcaccccgaggatggggacgggcagagcctcgagggcgtctctagctccggcgacagcgcagggctggaggccgggcagggccctggggctgacgagccgggcttgtcccgcgggaagccctatgcctgcggcgagtgcggggaggccttcgcgtggctctcgcacctgatggagcaccacagcagccatggcggccggaagcgctacgcctgtcagggctgctggaagaccttccacttcagcctggccctagccgagcaccagaagacccacggtgaaggagaaaagctacgcgctggggggcgcccggggcccccaaccgtccacccgcgaagcccaggcgggggctagggcgggcggtcccccagagagcgtggaggggcgaggctccccccgcacccccagaggcgcagaggtgagccgctgtgctgtcccgttccggaggggccgctttgccggccgtgaatcccagacgaggcattgggcctttccacgcccctgggtggcggcttcctgtggtgtttgtggacgtcctctgcctgtgccctgaatccgctcctgaggctaagcgctcccaacgagaagggtccacgggaagcccctcacctctgtaaacacaccctgggccagcgctcgcatccgaggggagccgccggatgtggaagaagactcggctttcctgcagccatttagtgccgccccatgctaggttatttgacattgtgcagtgtagagttgccttaaagtgcgtgattctgccagtgctttcttcaagtcacccttgccccgattccttcctgtttgcgctccccagggttgctcaagttggaaatttgtccagctgttttagcccttttccgtaacttggccgtgaatgtccaacttccacttcctaatcttgcaaaaagccggaagcctgtttccctaagtttaccctcgccgtgtgtttaccctatatgggagtagcctcgccagagattcacagaaaatgctttgcagccttaaggcaggggtttttcagaccgtggggtccccagccccattttaggtaaaatggggaaaatcaatttagcaagtgggtcancagcattacccagcaatgaagcagaataaagtaggccagaatgcatcatgtagtaaaggcaaatacttgttttgtgaaacttttaacccatacatcttaaatgtgagaactggttgcaatgtaagacatttcttgctgggaagcttgtgacgcaaaataagttgaaaacactaaataaagatcttgtcttgtctgagccaaaggagactaaaataattgggctacataaggtgaaaaaaaaaa

SEQ ID NO: 134152 - DNA, 372 bp, Homo sapiens
ttagagtttatcatttaattcagaatcctgtgtagagtacttgattaaggcaataaggctacatctattccatgggcgccggatgagcgccgccccctgctccacggcgccgagtcccatcgaccacccaagggctgaggagtgcgggcgcacggcgcgggactggcaggcagctccacctgcagcccaggcacgggatccactgggtgaagccagctgggctcctgagtcgcgaaggtctgcagcttcactcctgagccagcgagaccacgaacccaccagaaggaagaaactccgaacatcagaaggaacaaactccagacgcgccaccttaagagctgtaacactcaccacgagggtccgcggcttcat

SEQ ID NO: 134153 - DNA, 519 bp, Homo sapiens
tcatgtattcatttgctcagcacgcattgcctgagcagtcctgtgtgcctgagcatgcattgcctgagcagcacctcctactcccaccagttcctttccatgacatgtggggattatgggagctacaactgaagatgagatttcggtggggacacagccaaaccatatcactgagtccaggtggttaggagaggtgacagcgtgctggcagtcctcacagccctcgctcgctctgggcacctcctctgcctgggctcccactttggtgacacttgaggagcccttcagcccaccgctgcaccgggccagtggctgcggagggtgtactgggtcccccagcagtgccggcccactggcgctgcgctccatttctcgccgggccttagctgccttcccgcggggcagggctcgggacctgcagcccgccatgcctgagcctcccaccccctccatgggctcctgtgcggcccaagcctccccgacgagcgccgccccctgctccacggcgcccagtcccat

SEQ ID NO: 134154 - DNA, 630 bp, Homo sapiens; identical to SEQ ID NO: 120517

SEQ ID NO: 134155 - DNA, 444 bp, Homo sapiens; identical to SEQ ID NO: 116839

SEQ ID NO: 134156 - DNA, 477 bp, Homo sapiens; identical to SEQ ID NO: 117262

SEQ ID NO: 134157 - DNA, 3168 bp, Homo sapiens
atgggcccgcactcctcagcccttgggtggtcgatgggactgggcgccgtggagcagggtgtggcgttcgtcggggaggctcgggccgcacatgagcccatggagggggtgggaggctcaggcatggcaagctgcaggtcccgagccctgccccgtgggaaggcagctaagacccgaccaaaaacagaagacgcttgggtatttgcaaagcccaatgccattcaagcggtcggggttatgtcttttgcatttatttgccaccataactccttcttagtttacagttctctagaagaacccacagtagctaagtggtcccgccttatccatatgtccatcgtgatttctgtatttatctgtatattctttgctacatgtggatacttgacatttactggcttcacccaaggggacttatttgaaaattactgcagaaatgatgacctggtaacatttggaagattttgttatggtgtcactgtcattttgacataccctatggaatgctttgtgacaagagaggatatggccactactatgaagatgacttttggacaaaggactggttttaggaatcctgaaagtttctgggagactttaccagtcttatttctgcaagtcatgattaccacatattttgtagctaaacaattgctgttcctacacagtaagatcatcatcttggccaggaaaaagagatcaaacatgtgcaagaaggaagaagaagaaggaagaggagaagaaggaggagaaatacaaactaccatcagagaatactacaaacccctctacgcaaataaactagaaaatctagaagaaatggataaattcctcgacatatacactctcccaagactaaaccaggaagaagttgaatctctgaatagaccaataacaggatctgaaattgtggcaataatcaatagcttaccaaccaaaaagagtccaggaccagatggattcacagcagaattctaccagaggtacaaggaggaactggtaccattccttctgaaactattcgaatcaacagaaaaagagggaatcctccctaactcattttatgaggccggcaccatcctgataccaaagccaggcagagacacaaccaaaaaagagaattttagaccaatattcttgatgaatattgatgcaaaactcctcaataaaatactggcaaaccaaatccagcagcacatcaaaaagcttatccaccatgatcaagtgggcttcatccctgggatgcaaggctggttcaatatatgcaaaccaataaatgtaatccagcatataaacagaaccaaagacaaaaaccacatgattatctcaatagatgcagaaaaggcctttgacaaaattcaacaaccctccatgctaaaaactctcaataaattaagtactgatgggacgtatctcaaaataataagagctatctatgacaaacccacagccaatatcatactgaatgggcaaaaactggaagcattccctttgaaaactggcacaagacaaggatgccctctctcaccactcctattcaacatagtgttggaagttctggccagggcaattaggcaggagaaggaaataaagggtattcaattaggaaaagaggaagtcaaattgtccctgtttgcagacgacatgattgtatatctagaaaaccccattgtctcagcccaaaatctccttaagctgataagcaacttcagcaaagtctcaggatacaaaatcaatgtacaaaaatcacaagcattcttatacaccaataacagacaaacagagagccaaatcatgagtgaactcccattcacaattgcttcaaagagaataaaatacctaggaatccaacttacaagggacgtgaaggacctcttcaaggagaactacaaaccactgctcaatgaaataaaagaggatacaaacaaatggaagaacattccatgctcatgggtaggaagaatcaatatcatgaaaatggcaatactgcccaaggtaatttatagattcaatgccatccccatcaagctaccaatgactttcttcacagaattggaaaaaactactttaaaaatcatatggaaccaaaaaagagcctgcatcgccaagtcaatcctaagccaaaagaacaaagctggaggcatcatgctacctgacttcaaactatactacaaggctacagtaaccaaaacagcatggtactggtaccaaaacaaagatatagatcaatggaacagaaccgagccctcagaaataatgccgcatatctacaactatctgatatttgataaaccagagaaaaacaagcaatggggaaaggattccctatttaataaatggtgctgggaaaactggctagccatatgtagaaagctgaaactggatcccttccttacaccttatacaaaaattaattcaagatggattaaagacttaaatgttagacctaaaaccataaaaaccctagaagaaaacctaggcattaccattcaggacataggcatgggcaaggacttcatgtctaaaacaccaaaagcaatggcaacagaagccaaaattgacaaatgggatctaattaaactaaagagcttctgcacagcaaaagaaactaccatcagagtgaacaggcaacctacaaaatgggagaaaactttcgcaacctactcatctgacaaagggctaatatccagaatctacaatgaactcaaacaaatttacaagaaaaaaacaaacaaccccatcaacaagtgggcgaaggatatgaacagacacttctcaaaagaagacatttatgcagccaaaagacacatgaaaaaatgctcatcatcgctggccatcagagaaatgcaaatcaaaaccacaatgagatactatctcacaccagttagaatggcgatcattaaaaagtcaggaaacaacagaccactcactctgggagaaagcaactggctatgtcatgaggaaattgaaaccacctatggagaaaggcccacatggatgggttggccaggaggaccagattctggcaaggtagtacacttgacagagactactaaagaacatgcaacctggggcacagagtggagtggaaccttggcagtagaagtattagggacaactgtgactgtgcatcctctcccagctacagcagtgccttcttatatatga

SEQ ID NO: 134158 - DNA, 2322 bp, Homo sapiens
atgaagctgcggaccctcgcggtgagcgttacagctcttaaggtggcgcgtctggggtctgccccttctgatgttcagatgtgtttggagtttcttccttctgactcaggagcccaactggcttcacctagtggatcccgcaccggggctgcaggtggagctgcctgccagtccggcgccgtgcgctcgtactcctcagcccttgggtggtcgatgggactgggcgccgtggagcagggggtggtgctcgtcggggatgctcgggcagcacaggagcccatggagtggatgggaggctcaggcatggcgggctgcaggtcccgagccctgcaccgcgggaaggcagctaaggcccggcgagaaatcgagcacagcgccggccgaaaaggacttttcggcagcgcgcggctgattccagcgacagcgatggcgccgaggagtcgcctgctgagcctggggcgccgagggaacttccggtcccgggttctgcggaggaagagccgccctctggaggaggccgcgcgcaggtggcgggactgccccaccgggttcggggccctcgtggccggggccgggtctgggcgagctcccggcgtgccaccaaagcggctccccgcgcggacgaaggctcaggtgtccagggagacgcggggaagcggggaggtgacggcacagggcgggaaggggccgcggggtctctggatccttctctgggggttctataacttgctgccgaccacaagccatgctgagtcttatccagaaagacttatccagaaggtagtgagcgagaaaatagctcgagcacttgcccgctatctgcatctgccttttggactccttgggggaaataaaacaatcgtgtacagttgggaggctcttcgttttcaccatcagttgactccatcagttataactaacacagttatcaaagtttatgaagaacctaaactgtcacaacaaaaatccagaacccttgatgtgtccacagatgaagaggataaaatacatcactcctcagaaagtaaggatgatcagggtttgtcttctgacagttctagctctcttggagaaaaagaactttcatcaacagttaagatcccagatgcagcttttattcaggcagcccgcagaaaacgtgaattggccagggcccaagatgactatatttctttggatgtacaacatacctcctccatctctggtatgaagagagagagcgaagatgaccctgagataagcagaaatgaagaaacaagtgaagaaagtcaggaagatgaaaagcaagatacttgggaacaacagcaaatgaggaaagcagttaaaatcatagaggaaagagacatagatctttcctgtggcaatggatcttcaaaagtgaagaaatttgatacttccatttcatttccgccagtaaatttagaaattataaagaagcaattaaatactagattaacattactacaggaaactcaccgctcacacctgagggagtatgaaaaatacgtacaagatgtcaaaagctcaaagagtaccatccagaacctagagagttcatcaaatcaagctctaaattgtaaattctataaaagcatgaaaatttatgtggaaaatttaattgactgccttaatgaaaagattatcaacatccaagaaatagaatcatccatgcatgcactccttttaaaacaagctatgacctttatgaaacgcaggcaagatgaattaaaacatgaatcaacgtatttacaacagttatcacgcaaagatgagacatccacaagtggaaacttctcagtagatgaaaaaactcagtggattttagaagagattgaatctcgaaggacaaaaagaagacaagcaagggtgctttctgggaattgtaaccatcaggaaggaacatctagtgatgatgaactgccttcagcagagatgattgacttccaaaaaagccaaggtgacattttacagaaacagaagaaagtttttgaagaagtgcaagatgatttttgtaacatccagaatattttgttgaaatttcagcaatggcgagaaaagtttcctgactcctattatgaagctttcattagtttatgcataccaaagcttttaaatcccctaatacgagttcagttgattgattggaatcctcttaagttggaatccacaggtttaaaagagatgccatggttcaaatctgtagaagaatttatggatagcagtgtggaagattcaaagaaggaaagtagttcagataaaaaagtcttgtctgcaatcatcaacaaaacaattattccccgacttacaggtactgcttcgtaa

SEQ ID NO: 134159 - DNA, 1023 bp, Homo sapiens
tcagcatactgcctcaagctgtactgtgcttatttctaaagtgtgatgtttcattgatcctctccctggccctccgaggtctgtgttattactccactgtagctgctcacttgctccaggtttaattctgacatcaggggaatagatagctgaagccaaagaaacctctgtttgggtagggtctggtatatcctgttttttctttttgctttcttgcagacactggagttggtgtctcatgagaggaggggaaggacaggaatcacaaatgcctgagtgtccaacagtcccaggagggagctgggttttcatgtcttgtgaaggtagcagttcctcctccttttcttgtttagtcacagactcaggagcccagctggcttcacctagtggatcccgcaccggggctgcaggtggagctgcctgccagtcctgcgccatgcgctcgcattcctcagcccttgggtggtcgatgggactgggcgccgtggagcagggggtggagctcgtcggggaggctcgggccacacaggagcccatggagtgggtgggaggctcaggcatggcagactgcaggtcccgagccctctcagagcccgttctccttttcttcttagctgcacactcagctgccaactcgacagcccctgccttacttgcagccaagggcatcagtacaaatatcaacacagtgacaaaggcaaacgtcttactattgttacgaagagttttgacttcataccttcctaaattggattcagggaccctcaaaaatctgcagatggcccttcgcgaatcgctgcctgaggtactgtcaggcctacgggagctagattcctgcctcatctgagctcccactggctgcttcttactgcaagggggctgagaagcactggctggctggatcgtcagacttccagctgaaaaacccattacgtgtgtggtcaaaatgtcgatgaaggcttgacttgcaccagcgcttctggctcctatccttccaaaggccttatcttcaaatacagtcat

SEQ ID NO: 134160 - DNA, 531 bp, Homo sapiens
atgcgcccgcactcctcagcccttgggtggtcgatgggactgggcgccgtggagcagggggcggcgctcatcggggaggctcgggacgcccaggagcccatggagggggtgggaggctcaggcatggcgggctgcaggtcccgagccctgccccgcgggaaggcagctaaggcccggccagacacagttcaagaattatctggcaacacaaacacctttaagcacaaaggtagggatgaagctgctgtgaggcacattccactccctgatgatgagagagagagggaaaatgaaaagcaagatggaggcaaaatagaaagtcagggagaaaaagaaataaagagagcttccacaaacaaatggcccactctcagccaaacagaccacataccttcagaagagagtgaccctaagaggcagcaagagctggagatgatgtctgagagccatgcacttgaaagccggcagtgtcctggccgtggctggctgagctggtgtcctcaccacagtctccctgcaacatggtcttga

SEQ ID NO: 134161 - DNA, 491 bp, Homo sapiens
tattttttttttttttttttttaatttatataggaaaggtttaattgactcacagttccaatgtgtcacctggggagggctggggaggcctcacaatcatgacaaaggcaaggaggagcaaagccacatcttacatggtggcaggcaaaacaagaatgagagccaagcaagaggagaaaccccttataaaaccctcagatctcgtgagacatattcactaccacgagaacaatatgggggaaaccgcccccatgattcaattctctcccaccaggtccctcccacaacacatgggaattatgggagctaacaattcaagatgagatttgggtggggacacagccaaaccatatcagggccacttggccaaattaagtgaccaagccagggatttgaaccagggtggtttgttttccagttgcccttcataccattgggattgagataggttttttaagggacaaaaaccaagatgagttccttggctctgt

SEQ ID NO: 134162 - DNA, 1203 bp, Homo sapiens
atgaagccgtgggccctcaaggtgagtgtcacagctcttaaggtggcgcgtctggagtttgttcctcctgatgttcggatgtgttcagagtttcttccttgtggagtgaagctgcagaccttcgcggtgagtgttacagctcttaaggcggcgcgtctggagtctgttccttctgatattcggatgtgttcggagtttcttccttctggagagaagctgcagaccttcgcggtgagtgttacagctcataaaagcagcgtggacccaaagagtgagcagcagcaagatttattgcaaagaatgaaagaacaaagcttccacactgtggaaggggaccggagcgggtccccgccagactcaggagcccagctggcttcacccagtggatcccgcaccagggctgcaggtggagctgcctgccagtcccgcgccctgcgcccgcactcttcagcccttgggtggtctatgggactgggcgccgtggagcagggggcggtgctcatcagggaggctcgggccgcacatgagcccatggagcgggtgggaggctcaggcatggcgggctgcaggtcccgagccctgccccgcgagaaggcagctaaggcccggcgagaaaccgagggcagcgccgctgtatcaggctggctttctggaatagctcagtggccaaagattgatcacgaagggtttagagctgtgaaaatgccccaggctgcttggctcctgaaagctgttacctttatagatcttactacactttcaggtgatgatacatcttccaacattcaaaggctctgttataaagccaaatacccaatccgggaagatctcttaaaagctttaaatatgcatgataaagtggccgctggatttccagctggacagactcatttgaagacacgattagaagagatcagattggctgtggaagatggagctacagaaatcgacgtggtaattaacagaagcttggtgctgacaggccagtgggaagggcatactccccagttgtttattcagcattaccatgcaacatatgacacagcagactgttccttccttctggtaatgctttgttgttgtggctttggtgcctacattcctgaggtcttcctttctgtttctgattacccctgcgtctcatttgcaagctccttcacctcctctgtcatccctgaagtgtccatgtttctcagaatctga

SEQ ID NO: 134163 - DNA, 1243 bp, Homo sapiens
atgtctactagggtagtgcaaagggaaaatgtaggattggagccccagattccccactggggcattcctagtggagccatgagaagagggccaccatcctccaggccccagagtggtagttccaccaacagcttgcactgtgcatttggaaaagccacagactcaggagcccagctggcttcacccagtggatcctgcacctgggctgcaggtggagctgcctgcaagtccggcgccctgcgcccgaactcctcagcccttgggtggtcgatgggattcggcgccgtggagcagggggtggcgctcctcggggaggctcgggcgcacaggagcccatggagagggtgggaggctcaggcatggcgggctgcaggtcccgagccctgccccgcgggaaggcagctaaggcccggggatacgtgtcttctggccagctctcttcctgcttctgctatcttgctgacgcacgctgctggcacaattggccttgtcccttggactgggcctgagaaaggaggagttattcatcccccaccagcttccaggcccccggaaagactttcagtccccccaacaacacatgggaattatgggaatacaattcaagatgagatttgggtggggacacagaaccaaaccatatcaggtacccagaatgccttcactgaaaatcagtacactccagctcgtcttcagacaatgattaaaaccaccgtgcaggaacaatggcaagcctttagcccgattgggagtggcaatgtgcgcctcactggatcaggagtgcagcagacaccctgctggatccggaggggtagaagtcagctgcgggtctgcgacggcagcaaacagcagtggtggacagcaagcgaaagctcagctcgagccctaacaaacacggaccagaaaagtgtgcagttccaagatttaatagagtgaaaacagagctcccatacaaagggaggtgacccagagagggtagccgttgccagctcgaatgcctgggtttaaatcccggtcattgtccctcccgctgtgctctcagacaatagatgattggctatttctttacctcctgtttttgcctaatgagcgttttagtgagctctctttactacctgattggtcgggtgtgagctaagttgcaagccctgtgtttaaaggtggatgcagtcaccttcccagctaggcttagggattcttagtcagcctaggacatccagctggtcctgtctttcaatatgtt

SEQ ID NO: 134164 - DNA, 1171 bp, Homo sapiens
tcagagccctcgcttgctctcggcacctcccctgcctgggatcccactttggcggcatttgaggagcccctcagcccccactgcactgtgggagcccctttctgggctggccaaggccggagcccactccctcagcttgaagagagttgtggagggagaggcgcgagcgggaaccgcggctgcgggctgcgcttgcgggccagctggagatacgggtgggcgtgggcttggccggccctgcactcggagcagccggccagccctgccggcgccgggcaatgaggggcttagcacccgggccagcggctgcagagggtgtactgggtcccccagcagtgccagcccacgtgcgctgcgctcgatttctcgctgggcattagctgccttcccgcggggcagggctcgggacctgcagcccgccatgcctgagcctcccacccactccatgggctcctgtgcggcccgagcctccccaaggagcaccaccccctgctccacggcgcccagtcccatcgaccacccaagggctgaggagtgcgagcgcacggcacgggactggcaggcagctccacctgcagccctggtgcgggatccactgggtgaagctagctgggctcctgagtctggtggggagccaacaccttcggggccaggggtcgcgggcagcggcagcactcacacacatgcactcacacacgcatgcacacatgcacacacacgcgccgagccccttcggcttcctcctcctcctcgtcctcttcctccacctctttctccacctcccctgcgcctctgctgccttcgaagcctttttccttgtccactgacagaatcagcagcaaaagcaggcagcaaaaagttccattcggtccaagagatcccgagccccgcggtgtgcgagctgggagttggaaccgtactacacattgatccggagaagtggagggctggaagggaaaatgtggagaccggagggaaacgaactggatcaggcaaagattccacgggaagggggtgggggcagacagactatggcttagggaaaaaagagcggaccgaggaggcttccaggagctgcatttgcctggtctgcgtatcaatgcgcagggatgccctctgtgggcaaagcgtgggaagtcacttttgtcaatggagcctgcgaacatcctga

SEQ ID NO: 134165 - DNA, 4805 bp, Homo sapiens; identical to SEQ ID NO: 123522

SEQ ID NO: 134166 - DNA, 1846 bp, Homo sapiens; identical to SEQ ID NO: 123523

SEQ ID NO: 134167 - DNA, 1218 bp, Homo sapiens; identical to SEQ ID NO: 121629

SEQ ID NO: 134168 - DNA, 1341 bp, Homo sapiens; identical to SEQ ID NO: 121631

SEQ ID NO: 134169 - DNA, 5298 bp, Homo sapiens
atgaatctaaaccaagaggaaatccctgatttacctgaaaaagaattcaggaggttagttattaagctaatcagggagggactagagaaaggcaaagcccaatgcaaggaaatccaaaaaatgatacaagaagtgaagagagaaatattccaggaaatagagagcctaaagaaaaaaccaccaaaaattcagaaaactctggacatacttttaaaaatgcaaaatgctctggaaagtctcagtgatagaactgaacaagcagaagaaataaattcagagctcgaagacaaggtcttcaaattaacccagtccaacaaagacaaagaaaaaataacaagaaaatatgagcaaagcctccaagaagtctggagttatgttaaaagaccaaacctaagaataatcggtgttcctgaggaagaagagaacactaaaagcttggaaaacatattggggggaataatcgaggaaaacttccccagctttgctagagacctagacatccaaataccagaagcacaaagaacaactggaaaactcattgcaaaaagatctttgcttagacatattgtcttcaggttatccaaagttaagatgaaggaaagaatcttaagagctgtgagacagaagcaccaggctacagtaagccaaaagaacaaagctggaggcatcacgctacctgacttcaaactatactacaaggctacagtaagccaaaagaacaaagctggaggcatcacgctacctgacttcaaactatactacaaggctacagtaagccaaaagaacaaagctggaggcatcacgctacctgacttcaaactatactacaaggctacagtaaccaaaacagcatgggctggaaacaggattgttgaaatactccctgaacatctgaaagagtttcagtcccttgaaactttggaccttagcagcaacaatatttcagagctccaaactgcatttccagccctacagctcaaatatctcgaattgaaccgaaacaagattaaaaatgtagatggactgacattccaaggccttggtgctctgaagtctctgaaaatgcaaagaaatggagtaacgaaacttatggatggagctttttgggggctgagcaacatggaaattttgcagctggaccataacaacctaacagagattaccaaaggctggctttacggcttgctgatgctgcaggaacttcatctcagccaaaatgccatcaacaggatcagccctgatgcctgggagttctgccagaagctcagtgagctggacctaactttcaatcacttatcaaggttagatgattcaagcttccttggcctaagcttactaaatacactgcacattgggaacaacagagtcagctacattgctgattgtgccttccgggggctttccagtttaaagactttgatactccaaggaaatcggatccgttctattactaaaaaagccttcactggtttggatgcattggagcatctgcatttaaatacatcaagccttttgtgcgattgccagctaaaatggctcccacagtgggtggcggaaaacaactttcagagctttgtaaatgccagttgtgcccatcctcagctgctaaaaggaagaagcatttttgctgttagcccagatggctttgtgtgtgatgattttcccaaaccccagatcacggttcagccagaaacacagtcggcaataaaaggttccaatttgagtttcatctgctcagctgccagcagcagtgattccccaatgacttttgcttggaaaaaagacaatgaactactgcatgatgctgaaatggaaaattatgcacacctccgggcccaaggtggcgaggtgatggagtataccaccatccttcggctgcgcgaggtggaatttgccagtgaggggaaatatcagtgtgtcatctccaatcactttggttcatcctactctgtcaaagccaagcttacagtaaatatgcttccctcattcaccaagacccccatggatctcaccatccgagctggggccatggcacgcttggagtgtgctgctgtggggcacccagccccccagatagcctggcagaaggatgggggcacagacttcccagctgcacgggagagacgcatgcatgtgatgcccgaggatgacgtgttctttatcgtggatgtgaagatagaggacattggggtatacagctgcacagctcagaacagtgcaggaagtatttcagcaaatgcaactctgactgtcctagaaacaccatcatttttgcggccactgttggaccgaactgtaaccaagggagaaacagccgtcctacagtgcattgctggaggaagccctccccctaaactgaactggaccaaagatgatagcccattggtggtaaccgagaggcacttttttgcagcaggcaatcagcttctgattattgtggactcagatgtcagtgatgctgggaaatacacatgtgagatgtctaacacccttggcactgagagaggaaacgtgcgcctcagtgtgatccccactccaacctgcgactcccctcagatgacagccccatcgttagacgatgacggatgggccactgtgggtgtcgtgatcatagccgtggtttgctgtgtggtgggcacgtcactcgtgtgggtggtcatcatataccacacaaggcggaggaatgaagattgcagcattaccaacacagatgagaccaacttgccagcagatattcctagttatttgtcatctcagggaacgttagctgacaggcaggatgggtacgtgtcttcagaaagtggaagccaccaccagtttgtcacatcttcaggtgctggatttttcttaccacaacatgacagtagtgggacctgccatattgacaatagcagtgaagctgatgtggaagctgccacagatctgttcctttgtccgtttttgggatccacaggccctatgtatttgaagggaaatgtgtatggctcagatccttttgaaacatatcatacaggtacctttggaaaagctctcaggagacctcacctagatgcctattcaagctttggacagccatcagattgtcagccaagagccttttatttgaaagctcattcttccccagacttggactctggtggttttatgattgccttgtggtaccacgggactcttagtccagaaccagcttttgtattaaaagctagggatgatgtaggtacctgtcatagtcatagagctggccagcattggctcaagtactacctccttcaagcacttgcagaaggaaatgtggtgccggagcccccacacagagttccccctggggcaccacctactggagctgcgagaagagagctactgtcctccaatcctcagaatggtagatccactgacagcttgcgctctgtgcctgcaaaagccgcagacactcaatgccaatctgtgaaagcagccaggagggaggctgtaccctgcaaagtcacagggccggagctgcccaaggccacaggagcctatctcttgcatcagtgtgacctggatatgagacatggagtcaaaacagatcattctggagctttaagaattggaggaaaataccgagcacctgtcggccagttaaaaacgattagtgtggccaccggacttaagactcagctttcctatcaaaaacccttcattaaccctgtaacccgccgatgcattcaatctgtagcggcaactgctttgctaacagaagaaagtagaaaagaaacttttagaggaaacctcattgtgaggaaacctcattgcaagcggactttggagcctctggaaaagggaaaagctgggaaaattgaatgcctaatagggcttgcttccagtgtggtctacaaggacactttaaaaaagattgtccaagtagaaataagccaccccctcgtccatgccccttatgccaagggaatcactggaaggcccactgacccaggggatgaagctgtacctaacccttacactctgctttcccaaataccagagaaagcagagtggtttatactcctggaccttaaggatgcccttttcttcatccctgtacatcctgactctcaattcttgtttgcctttgaagatccttcaaactcaacatctcaactcacctggactgttttacccctagcgttcaggaatggcccccatctatttggccaggcatcaacccaagacttgagccagctctcatacctggacactcttgtcctttggcatgtggatgatttacttttagctgcctgttcagaaaccttgtgccatcaagccacccaagcactcttaaatttcctcactacctgtggttacaaggtttccaaaccaaaggctcaactctgctcacagcaggttaaatacttagggctaaaattacccaaaggcaccagggcccccagtgaggaatgtatccagcctatactggcttatcctcatcccaaaaccctaaagcaactaagagcgttccttggcataacaggtttctgccgaatatggattcccagcatactcactgctaaaggagacttgtggctgtcagataaccatttacttaaatatcaggttctattacttgaagggccagtgctgcaactgcgcacttgtgcaactcttaacccagccacatttcttccagacaatgaagaaaagatagaacataactgtcaacaagtaattgctcaaacctacgccactcgaggggaccttttagaggttcccttgactgatcccgacctcaacttgtatactgatggaagttcctttgtacaaaaaggacttcaaaaagcgggatatgcagtggtcagtgataatggaatacttgaaagtaatcccttcactccaggaactagcactcagctggcagaactggtagccctcacttgggcactagaattcggagaaggaaaaagggtaaatataaatacaggctctaagtatgcttacctagtcctccatgcccatgcatcaatatggagagaaagggaattcctaacttccgagggaacacctatcaaacatcaggaagccattaggagattattattggttgtacagaaacctgaagaggtggcagtcttacactgctggggtcatccgaaaggaaaggaaagggaaatagaagggaactgccaagcggatattgaagccaaaagagcctcaaggcaggaccctccattagaaatgcttatagaaagacacctagtatggggtaatcccctctgggaaaccaacccccagtactcagcagaagaaatagaatggggaacctcatga

SEQ ID NO: 134170 - DNA, 421 bp, Homo sapiens; identical to SEQ ID NO: 122631

SEQ ID NO: 134171 - DNA, 571 bp, Homo sapiens
aggaagcagagtggtttacagtcctggaccttatggatgcctttttctgcatccctgtacatcctgactctcaattcttgtttgcctttgaagatccttcgaacccagcatctcaacttacctggactgttttaccccagaggttcaagaatagtccccatctatttggccaggcattagcccaagacttgagccagttctcatacctggacactcttgtccttcggtacatggatgatttacttttagctgcctattcagaaaccttgtgccatcaagccaccgaagctctcttaaatttcctcgccacctgtggctacaaggtttccaaaccaaaggctcagctctgctcacagcaggttaaatacttagggctaaagttatccaaaggcaccagggacctcaccacatttcttccagtcaatgaagaaaagatagaacataactgtcaacaagtaattgctcaaagctacgctgctcgaggggaacttctagaggttcccttggctgatcctgacctcaacttgtatactaatggaagttcctttgtagaaaaagcacttgaaaagtg

SEQ ID NO: 134172 - DNA, 323 bp, Homo sapiens
gaactagtgctcagctggcagaactaatagccctcactcgggcaccagaattaggagaaggaaaaagggtaaatatatatgcaaactcaatagggagagaaagggaattcctaacttccaagggaacacttgtcaaacatcaggaagccattaagagattattattggctgtacagaaacctaaagaggtggcagtcttacactgctggggtcatcagaaaggaaaagaaagggaaatagaagagaaccgccaagcggatattgaagccagaagagccgcaaggcaggaccctccattagaaatgcttacagaaggaccccta

SEQ ID NO: 134173 - DNA, 809 bp, Homo sapiens
acttgaagcatattaaaatagacctagataaattctcagataaccctgatggctatattgatgttttacaagggttaggacaatcctttgatctgacatggagagatataatgttactgctagatcagacactaaccccaagtgagagaagtgccgccataactgcagctcgagagtttggcaatctctggtatctcagtcagtctgggcaacagaaggacaatatggacggacaaagaatgcccgtcctgttcaagttaaaggattctgcttcctttccctaccaaaggcggtacccccttagactggaggcccaacaaggactccaaaagattgttaaagacctaaaagcccaaggcttagtaaaaccattcaatagcccctgcaatactccaattttaggagtacagaaacccaacggacagtggaagttagtacaagatctcaggattatcaatgaggccattgtccctctatacccagctgtacctaacccttatactctgctttcccaaataccagaggaagcagagtggtttacagtcctggaccttaaggatgcctttttctgtatccctgtacatcgtgagtctcaattcttgtttgcctttgaagatccttcaaacccaacatctcaactcacctggactgttttaccccaagggttcaggaatagccctcatctatttggccaggcattagcccaagacttgagccagttctcatacctgaatactcttgtccttcggtacctggatgatttacttttagctgcccatttagaaaccttgtgccatcaagccacccaa

SEQ ID NO: 134174 - DNA, 1148 bp, Homo sapiens
caatatggagagaaggggaattcctaatttctgagggaacacctatcaaacatcaggaagccattaggagattattattcgctgtacagcaacctaaagaagtgacagtcttacactgccggggtcatcagaaaggaaaggaaagggaaatagaagggaaccgccaagaggatattgaagccaaaagagccgcaaggcaggaccctccattagaaatgcttataaaaggacccgtagtatggggtaatcccctccgggaaaccaagccccagtactcagaagaagaaatagaatggggaacctcacgaggacatagtttcctcccctcaggatggctagccactgaagaaggaaaaatacttttgctggcagctaaccaatggaaattacttaaaacccttcagcaaacctttcacttaggcattgatagcacccatcagatagccaaatcattatttactggaccaggccttttcaaaactatcaagcagatagtcagggcctgtgaagtgtgccaaagaaataatcccctgccttatcgccaagctccttcaggagaacaaagaacaggcaattacccaagagaagactggcaactagattttatccacatgccaaaatcacagggatttcagtgtctactagtctgggtagatactttcactggttgggcagaggccttcccctccttactaagaatccaaaactctccccaaaaagcaggacttagcccatacagaatgctgtatggacggtccttcctaaccaatgaccttctgcttgaccaagagatggccaacttagttgcagacatcacctccttagccaaatatcaacaagttcttaaaacattacaaggagcctgtccccgagaggagggaaaagaaatattccaccctggtgtcatggtattagtcaagtcccttccctctaattccccatccctagacacatcctggggaggaccctacccagtcattttatctatcccaactgcggttaaagtggctggagtggagtcttggatacatcacactcgaatcaaaccctggatactgccgaaggaacccgaaaatccaggagacaacgctagctatttctttgaacctctagaggatctgtgcctgctcttcaagcaacaaccgtga

SEQ ID NO: 134175 - DNA, 1660 bp, Homo sapiens; identical to SEQ ID NO: 123526

SEQ ID NO: 134176 - DNA, 387 bp, Homo sapiens
catggggatttatgattttagttactttcctcctggttgttgtttgaagagcaggcgcaaatcctctagaggttcacaggaatagctagcgttgtctcctggattttcaggttcctttggcagtatccaggatttgactcaagtgtgatgtatccaagactccactccagccactttaaccgcagttggggtagataaaatgactgggtagggtccttcccaggatgtatcactttggatgtccgttcgtggttgccaaaatgttaccggggggtccttgctcacagagctcccaagatggtggtgaaccacttccaagatggtagcaggccgcttccaagatggtggcaagcctcgtattctctgacctggagttcttggcctcac

SEQ ID NO: 134177 - DNA, 586 bp, Homo sapiens
gcgcctggtgctgaacctaagaagagatcaggaggagcaggcagaacaggacaaacaggataaaaaaaaggccatcactttagtcatggccctcaggcaagtggactttggaggctctgtaaaagggaaaagctgggcaaatcgaatgcctaatagggcttacttccagtgcggtctacaaggacactttaaaaaagattgtccaagtagaactcttaacctggacacatttcttccacacaatgaagaaaagatagaacataactgtcaacaagtaattgctcaaacctatgccactcgaggggaccatttagaggttcccttgactgatcccaaccctaacttgtatactgatggaagatcctttgtagaaaaaggacttcaaaaagtgggaattaaagctgtaaaactacaaatcattcttcaaatggagccccagatgcagtccatgactaagatctaccgcggacccctggaccaccctgacagcccatgctccaatgttaacgacatcgaaggcacccctcctgaggaaatctcaactgcacaacccctactacaccccaggccagcaggaagcagttag

SEQ ID NO: 134178 - DNA, 1125 bp, Homo sapiens
tcactggaaggcccactgccccaggggacaaaagtcctctgagtcagaagccactaaccagatgatccagcagcaggactgagggtgcccggggcaagcgccagccgatgccgtcaccctcacagagccccgggtatgcttgaccattgagggccaggaggttaactgtctcctggacacaggtgcggccttctcagtcttactctcctgtcccggacaactgtcctccagatctgtcactatctgaggggtcctaggacagccagtcactagatacttcccccagccactaagttgtgactggggaactttactcttttcaaatgcttttctaattatgcctgaaagccccactcccttgttagggagaggcattctagcaaaagcaggggccataatacaccatgctgttttggttactgcagccttgtagtacagtttgaaggtagcatgatgcctccagctttgttgtttttgcttacgagtgtcttggctatatgggctcttttttggttccataagaaatttaaagtagtttttcctaattctgcctgtatcactgccaccatggccgcttttttcatgagcccactgaatcttatcttcctccaccaagtgaatgtagagaacttccagtgaggccataggtgcaggctctaggggcctgccaagggctccaaatggcttccctatctgctgcagacacttccaacaccactggattgcaggatcatatggccctggcaaagaagttgcaaggcagcctggatctgtggcagaacctccttttgttctgagtctcagacaaaactggctgtttttccgatcattcactagatgggctctacgtctttcaagtccttgaatgggggcactgatctctgcaatccctttaggaatgtgctctggcttttgttttattgtatccctaggtagacgtaattctacttggcctttgccaccggaatagcccacactccacaggtcagggcaccaatgtggggattctgtcagctgttgagtatatttatgccaatgatgcttttggggttcacgagggaccccattgacatttaggggttcaatggcactgaggttcatcagggccttcccacacgggcccat

SEQ ID NO: 134179 - DNA, 459 bp, Homo sapiens; identical to SEQ ID NO: 121636

SEQ ID NO: 134180 - DNA, 1039 bp, Homo sapiens
ctatgctctgcgttgtattccatctcgaatttctttaactttctcagtgatgattccagattgattaacataataacagcattcttcccctaaaaataaacaggttccccctctttctgcagttagcaagtctaaagctcttcgattttgaagtactactgctgctagggagttaagttgatcttgcaaggtgaccagggagtcggcaacccgttccatgtcaccatttagttcttgagatagtttgtagtagaactgagtagaggttgtgatactgcccatgccagtacctaatctgcctagcattcctgctcggataacaaaaggaagaatgggtactcttttgttgcggggcttaggtacgacataattgtataaatcttgttcagtgtagatggtcatagggtgcactaagaatgagaggaagcacatagattccgaaaagccattcaaacagtgataggctgaggtaccacagacaaaaaatattcctgagggtaggcagactatttgtgtgggaggagttacccatctgatgcactgggagttggttgtgtctatagtattgctaaattttacacgggtgaggtttgaggtatgggttatttccagattggaaacaagaggtcctactaaaatggaagtggtgtttatttctgtgctgaagttgttccattgttcaggtacagggattgaaatatgtggcggttgttgcttgaagagcaggcccagatcctctagaggttcacaggaatagctagcgttgtctcctggatttccgggttcttttggcagtagccagggtttgactcgagtgtgatgtatcctagactccactccagccactttaaccgcggttggggtagataaaatgaccgggtagcgtccttcccaggatgtatctgacatctgcgatagtccctgggttactgttgccttgaaagcagggccattgtcactctgtaagcctcggggaagtccgcatctgggaattatttcatgaactagtgcctttattacctcttgggccttttctgtc

SEQ ID NO: 134181 - DNA, 1743 bp, Homo sapiens
atgacatatggtgtgggcaaaggagatatggtagatggaacgaaggaaagaggtgagagaattgagtctgcattgggcacctcacacatcatgagagtggcagagccacagggaagtcaaagctggtgccccgatgaagaactgaggccagtgggctccccagccaccgccgctcagaagctgccaagcacccccggtgctttgggccccacgcacagcactgagtgctgcagtatccccttagaccccaaggcccaacaaggactccaaaagattgttaaggacctaaaagcccaaggcctagtaaaaccgtgcaatagcccctgcaatactccaattttaggagtacagaaacccaacggacagtggaggttagtgcaagatctcaggattatcaatgaggcccttgtccctctatacccagctgtacctaacccttacactctgctttctcaaataccagaggaagcagagtggtttacagtcctgggccttaaggatgactttttctgcatccctgtacatcctgactctcaattcttgtttgcctttgaagaaccttcaaaccccacatctcaactcacctggactgttttaccgaaagggttcagggatagcccccatctatttggccaggtattagcccaaaacttgagccaattctcatacctggacactcttgtccttcggtacgtggatgatttacttttagctgcccgttcagaaaccttgtgccatcaagccacccaagcactcttaaatttcctcactacctgtggctacaaggtttccaaaccaaaggctcagctctgctcacaggaggttacgtacttagggctaaaattatccaaaggcaccagggccctcagtgaggaacgtatccagcctatactggcttatcctcatcccaaaaccctaaagcaactaagagcgttccttggcataacaggtttctgccgaatatggattcccagcatactcactgctaaaggagacttgtggctgtcagataaccatttacttaaatatcaggttctattacttgaagggccagtgctgcaactgcgcacttgtgcaactcttaacccagccacatttcttccagacaatgaagaaaagatagaacataactgtcaacaagtaattgctcaaacctacgccactcgaggggaccttttagaggttcccttgactgatcccgacctcaacttgtatactgatggaagttcctttgtacaaaaaggacttcaaaaagcgggatatgcagtggtcagtgataatggaatacttgaaagtaatcccttcactccaggaactagcactcagctggcagaactggtagccctcacttgggcactagaattcggagaaggaaaaagggtaaatataaatacaggctctaagtatgcttacctagtcctccatgcccatgcatcaatatggagagaaagggaattcctaacttccgagggaacacctatcaaacatcaggaagccattaggagattattattggttgtacagaaacctgaagaggtggcagtcttacactgctggggtcatccgaaaggaaaggaaagggaaatagaagggaactgccaagcggatattgaagccaaaagagcctcaaggcaggaccctccattagaaatgcttatagaaagacacctagtatggggtaatcccctctgggaaaccaacccccagtactcagcagaagaaatagaatggggaacctcatga

SEQ ID NO: 134182 - DNA, 861 bp, Homo sapiens; identical to SEQ ID NO: 118523

SEQ ID NO: 134183 - DNA, 8294 bp, Homo sapiens
atgtggggcagcgatcgcctggcgggtgctgggggaggcggggcggcagtgactgtggccttcaccaacgctcgcgactgcttcctccacctgccgcggcgtctcgtggcccagctgcatctgctgcagaatcaagctatagaagtggtctggagtcaccagcctgcattcttgagctgggtggaaggcaggcattttagtgatcaaggtgaaaatgtggctgaaattaacagacaagttggtcaaaaacttggactctcaaatgggggacaggagctgcatgctgtttcccttgaacaacatcttctagatcaaattcgaatagtttttccaaaagccatttttcctgtttgggttgatcaacaaacgtacatatttatccaaattgttgcactaataccagctgcctcttatggaaggctggaaactgacaccaaactccttattcagccaaagacacgccgagccaaagagaatacattttcaaaagctgatgctgaatataaaaaacttcatagttatggaagagaccagaaaggaatgatgaaagaacttcaaaccaagcaacttcagtcaaatactgtgggaatcactgaatctaatgaaaacgagtcagagattccagttgactcatcatcagtagcaagtttatggactatgataggaagcattttttcctttcaatctgagaagaaacaagagacatcttggggtttaactgaaatcaatgcattcaaaaatatgcagtcaaaggttgttcctctagacaatattttcagagtatgcaaatctcaacctcctagtatatataacgcgtcagcaacctctgtttttcataaacactgtgccattcatgtatttccatgggaccaggaatattttgatgtagagcccagctttactgtgacatatggaaagctagttaagctactttctccaaagcaacagcaaagtaaaacaaaacaaaatgtgttatcacctgaaaaagagaagcagatgtcagagccactagatcaaaaaaaaattaggtcagatcataatgaagaagatgagaaggcctgtgtgctacaagtagtctggaatggacttgaagaattgaacaatgccatcaaatataccaaaaatgtagaagttctccatcttgggaaagtctggcctaaagacataagtgaagaagacataaaaactgtattttattcatggctacagcagtctactaccaccatgcttcctttggtaatatcagaggaagaatttattaagctggaaactaaagatggtccttctagatcctatggtaaaagaagaaaacaaggagtgaattccttaggcgtatcctccttggagcacatcactcacagcctcctgggacgccctttgtctcggcagctgatgtctcttgttgcaggacttaggaatggagctcttttactcacaggaggaaagggaagtggaaaatcaactttagccaaagcaatctgtaaagaagcatttgacaaactggatgcccatgtggagagagttgactgtaaagctttacgaggaaaaaggcttgaaaacatacaaaaaaccctagaggtggctttctcagaggcagtgtggatgcagccatctgttgtcctgctggatgaccttgacctcattgctggactgcctgctgtcccggaacatgagcacagtcctgatgcggtgcagagccagcggcttgctcatgctttgaatgatatgataaaagagtttatctccatgggaagtttggttgcactgattgccacaagtcagtctcagcaatctctacatcctttacttgtttctgctcaaggagttcacatatttcagtgcgtccaacacattcagcctcctaatcaggaacaaagatgtgaaattctgtgtaatgtaataaaaaataaattggactgtgatataaacaagttcaccgatcttgacctgcagcatgtagctaaagaaactggcgggtttgtggctagagattttacagtacttgtggatcgagccatacattctcgactctctcgtcagagtatatccaccagagaaaaattagttttaacaacattggacttccaaaaggctctccgcggatttcttcctgcgtctttgcgaagtgtcaacctgcataaacctagagacctgggttgggacaagattggtgggttacatgaagttaggcagatactcatggatactatccagttacctgccaagtatccagaattatttgcaaacttgcccatacgacaaagaacaggaatactgttgtatggtccgcctggaacaggaaaaaccttactagctggggtaattgcacgagagagtagaatgaattttataagtgtcaaggggccagagttactcagcaaatacattggagcaagtgaacaagctgttcgggatatttttattagagcacaggctgcaaagccctgcattcttttctttgatgaatttgaatccattgctcctcggcggggtcatgataatacaggagttacagaccgagtagttaaccagttgctgactcagttggatggagtagaaggcttacagggtgtttatgtattggctgctactagtcgccctgacttgattgaccctgccctgcttaggcctggtcgactagataaatgtgtatactgtcctcctcctgatcaggatggaagttccagctctgatagtgacctaagtctgtcttcaatggtctttcttaaccatagcagtggctctgacgattcagctggagatggagaatgtggcttagatcagtcccttgtttctttagagatgtccgagatccttccagatgaatcaaaattcaatatgtaccggctctactttggaagctcttatgaatcagaacttggaaatggaacctcttctgatttggaggacgaatccatgaaccaaccaggaccaatcaaaaccagactggctattagtcagtcacatttaatgactgcacttggtcacacaagaccatccattagtgaagatgactggaagaattttgctgagctatatgaaagctttcaaaatccaaagaggagaaaaaatcaaagtggaacaatgtttcgacctggacagaaattctttgatgaaatcactgagctgacatacctgccctcttttcaccataaagctgctcctcaccaggccgagccaggtcccaattcttcctcagcctctgctcccccaccctataatccttttatcacctcctctcctcacactcagtccggcttacagtttcgttctgtgactagccctcccccatctgcccaacaatttcctcttaaagaggtggctggagctaaaggcatagtcaagacagctttagagactgctcccacactagctctccctgtctcatcccaacccttttcattacacacagccgaagtgcagggctgtgcagtcggaattcttacacaaggaccgggaccatgccctgtagcctttttgtccaaacaacttgaccttactgttttaggctcgccatcatgtctccatgcggtagcttccgctgccctaatacttttagaggccctcaaaatcacaaactatgctcaactcactctctacagctctcacaacttccaaaatctattttctttctcacacctgacgcatatactttctgctccccggctccttcagctgtattcactctttgttgagtctcccacaattaccattcttcctggcccagacttcaatctggcctcccacattattctggataccacacctgaccctgatgattgtatgtctctgatctacctgacattcaccccatttccccatatttccttcttttctgttcctcatgttgatcacatttggtttactgacggcagttccaccaggcctgatcgccactcaccagcaaaggcaggctatgctatagaatcttccacatccatcattgaggctactgctctgcccccctccactacctctcagcaagccgaactgattgccttaactcgggccttcactcttgcaaagggactacacgtcaatatttatactgactctaaatatgccttccatatcttgcaccaccatgctgttatatgggctgaaagaggtttcctcactacgcaagggtcctccatcattaatgcctctttaataaaaactcttctcaaggctgctttacttccaaaggaagctggagtcacacactgcaagggccaccaaaaggcgtcagatcccattactctaggaaatgcttatgctgataagggtgtccgctgtgctcctgatccagcgaggcgcccattgccgctcccaattgggctaaaggcttgccattgttcctgcacggctaaaattggaggaaaataccgggcacttgtcggccagttaaaaacgattagtgtggccaccggacttaagactcaggacaggacgatagatggttcctcccaggtgattgaggaaaaaaaccacaatgggtattcagtaattgatacggggactcttgtggaagcagagttagaaaaattgcctaataactggtctcctcaaacgtgtgagctgtttgcactcagccaagccttaaagtacttacagaatcaaaagactatctcaatcctgattcaaaaggaacccagcccagctctaggactcacccctgagcgcaaaggcaatgttgggcatgctggtaaaggaccactagaatccagcagcccagacccctttctttgtggtcaagaaaggcgggaaaaggggtgcaggactgctacatcggtaagcataactaatccgataaacagaggtccatgggtggttacgcaccctggaaaggaactcacccctgagcacaaaggcaatgttgggcacgctgggagagacattctagcaaaagcaggggccattatacacctgaacataggagaaggaacacccgtttgttgtcccctgcttgaggaaggaattaatcctgaagtctgggcaacagaaggacaatatggacgagcaaagaatgcccgtcctgttcaagttaaactaaaggattccacctcctttccctaccaaaggcagtaccccctcagacccaaggcccaacaaggactccaaaagattgttaaggacctaaaagcccaaggcctagtaaaaccatgcagtaacccctgcagtactccaattttaggagtacagaaacccaacagacagtggagaaaccttgtgccatcaagccacccaagcgctcttcaatttcctcgctacctgtggctacatggtttccaaaccaaaggctcaactctgctcacagcaggttacttagggctaaaattatccaaaggcaccagggccctcagtgaggaacacatccagcctatactggcttatcctcatcccaaaaccctaaagcaactaaggggattccttggcgtaataggtttctgccgaaaatggattcccaggtatggcgaaatagccaggtcattaaatacactaattaaggaaactcagaaagccaatacccatttagtaagatggacaactgaagtagaagtggctttccaggccctaacccaagccccagtgttaagtttgccaacagggcaagacttttcttcatatgtcacagaaaaaacaggaatagctctaggagtccttacacagatccgagggatgagcttgcaacctgtggcatacctgactaaggaaattgatgtagtggcaaagggttggcctcattgtttacgggtagtggcagcagtagtagtcttagtatctgaagcagttaaactaatacagggaagagatcttactgtgtggacatctcatgatgtgaatggcatactcactgctaaaggagacttgtggctgtcagacaaccatttacttaaatatcaggctctattacttgaagggccagtgctgcgactgtgcacttgtgcaactcttaacccagccacatttcttccagacaataaagaaaagatagaacataactgtcagcaagtaattgttcaaacctacgctgctcaaggggatcctttagaggttcccttgactgatcctgacctcaccttatgtactgatggaagttcctttgtagaaaaaggacttcgaaaagtggggtatgcagtagtcagtgataatggaatacttgaaagtaatcccctcactccaggaactagtgctcagctagcagaactaatagccctcacttgggcactagaattaggagaagaaaaaagggcaaatatatatacagactctaaatatgcttacctagtcctccatgcccatgcagcaatatggaaagaaagggaattcctaacttctgagagaacacctatcaaacatcaggaagccattaggaaattattattggctgtacagaaacctaaagaggtggcagtcttacactgccggggtcatcagaaaggaaaggaaagggaaatagaagagaactgccaagcagatattgaagccaaaagagctgcaaggcaggaccctccattagaaatgcttataaaacaacccctagtatagggtaatcccttccgggaaaccaagccccagtactcagcaggagaaacagaatggggaacctcacgaggacatagtttcctcccctcaggatggctagccaccgaacaaggaaaaatacctttgcctgcagctaaccaatggaaattacttaaaaccactcaccaaaactttcacttatgcattgatagcacccatcagatggccaaattgttatttactggaccaggacttttcaaaactctcaagcagatagttggggcctgtgaagtgtgccagagaaataatcccctgccttatcgccaagctccttcaggagaacaaagaacaggccattaccctggagaagactggcaactgattttacccacaagcccaaacctcagggatttcagtatctactagtctgggtagatactttcacgggttgggcagaggccttcccctgtaggacagaaaaggcccaagaggtaataaaggcactagttcatgaaataattcccagattcggacttccccgaggcttacagagtgacaatagccctgctttccaggccacagtaacccagggagtatcccaggcgttaggtatacgatatcacttacactgcgcctgaaggccacagtcctcagggaaggtcgagaaaatgaatgaaacactcaaaggacatctaaaaaagcaaacccaggaaacccacctcacatggcctgttctgttgcctatagccttaaaaagaatctgcaactttccccaaaaagcaggacttagcccatacgaaatgctgtatggaaggcccttcataaccaatgaccttgtgcttgacccaagacagccaacttagttgcagacatcacctccttagccaaatatcaacaagttcttaaaacattacaaggaacctatccctgagaagagggaaaagaactattccacccttgtgacatggtattagtcaagtcccttccctctaattccccatccctaggatacatcctgggggaagggacccttacccagttcatttttattttaccccaattgcgggtttaaagtggctggagtggagtcttggatacatcacacttgagtcaaatcctggatactgccaaaggaacctgaaaatccaggagacaacgctagctattcctgtgaacctctagaggatttgcgcctgctcttcaaacaacaaccaggaggaaaaatcgaagctgtaaaactacaaatggagcccaagatgcagtccaagactaagatctaccgcagacccctggaccggcctgttagcccacgatctgatgttaatgacatcaaaggcacccctcctgaggaaatctcagctgcacaacctctactacgccccaattcagcaggaagcagttagagcggtcgtcggccaacctccccaacagcacttaggttttcctgttgagatgggggactgagagacaggactagctggatttcctaggctgattaagaatccctaagcctagctgggaaggtgaccacatccacctttaaacacggggcttgcaacttagctcacacctgaccaatcagagagctcactaaaatgctaattaggcaaagacaggaggtaaagaaatagccaatcatttattgcctgagagcacagcaggagggacaatgatcgggatataaacccaagttttcgagccggcaacggcaaccccctttgggtcccctccctttgtatgggagctctgttttcatgctatttcactctattaaatcttgcaactgc

SEQ ID NO: 134184 - DNA, 6394 bp, Homo sapiens
  misc_feature (1)...(6394): n = a,t,c or g
atggccctcccttatcatatttttctctttactgttgtttcaccctctttcactctcactgcaccccctccatgccgctgtatgaccagtagctccccttaccaagagtttctatggagaatgcagcgtcccggaaatattgatgccccatcgtataggagtctttgtaagggaacccccaccttcactgcccacacccatatgccccgcaactgctatcactctgccactctttgcatgcatgcaaatactcattattggacaggaaaaatgattaatcctagttgtcctggaggacttggagtcactgtctgttggacttacttcacccaaactggtatgtctgatgggggtggagttcaagatcaggcaagagaaaaacatgtaaaagaagtaatctcccaactcacccggggtacatggcacctctagcccttacaaaggactagatctctcaaaactacatgaaaccctccgtacccatactcgcctggtaagcctatttaataccaccctctctggggttcatgatgtcaacggcttcagaaccctactaactgatgaatatgccttcccctgaacttcaagccatatgtattaatccctgctactgaacaaaggaacaacttacgtacagaaataaacaccacttccgttttaggaggacctcttgcttccaatctgggaaataacccatacctcaaacctcacctgtgtaaaatttaggcaatacttacatacacaaccaactcccaatggcattcaggtgggggtaactccttcccacacaaatagttttgccttaccctcgggattatttttttgtctgtggggtaccttcaggcctattcgttgtttgaatggctcttcagaatctatgtgcttcctctcattcttagtgccccctatgaccatctacactgaacaagatttatacagttatgtcaatatcctaaagcccccgcaaacaaaaagaagtaccccaattcctcccttttgttaataggagcaggaagtgcctaggtgcacctaggtactggcattggcggtatcacaacctctactcagttctactacaaactatctcaagaactaaatggggacatggaacgggtcgcccgactcccctggtcaccttgcaagatcaacttaactccctagcagcagtagtccttcaaaatcgaagagctttagaccttctaaccgctgaaagagggggaacctgtttatttttaggggaagaatgctgttattatgttaatcaatccggaatcgtcactgagaaagttaaagaaattcgagatcgaatacaacgtagagcagaggagcttcgaaacactggaccctggggcctcctcagccaatggatgccctggattctccccttcttaggacctctagcagctataatattgctactcctctttggaccctgtatctttaacctccttgttaactttgtctcttccagaatcgaagctgtaaaactacaaatggagcccaagatgcagtccaagactaagatctaccgcagacccctgggaccggcctgctagcccacgatctgatgttaatgacatcaaaggcacccctcctgaggaaatctcagctgcaaaaacctctacttacgccccaattcaggcagggaaggcagttaggaggcgggtcgttcgggccaaccttccccaacaggcactttagggtttttcctgttggagatggggggactgaggagacagggattagctgggatttccttaggctgacctaagaatcccctaaggncttagcctggggaagggtggaccacatcccacctttttaaaacacggggggctttgcaactttaggttcacaccttgaccaatcagagagctcactaaaatgcctaattaggcaaagacaggaggtaaagaaatagccaatcatctattgcctgaggagcacagtgggagggacaaggattgcaatataaacccaggcattcgagccagcgaacggcaaccgcctttgggtcccttccctttgtatgggagctctgttttcatgctatttcactctatttcactctattaaatcttgcaactgtacactcttctggtcagtgttttttacagctctagctgagcttctgcttgcagtccaccactgctgtttgccgccgccaccgcagacccgctgctggcttccatcccttcggatccggcagggtgtctgctgcattcctgatccagcgaggcgcccattgccacgcccaatcgggctaaaggcttgccattgttcctgcacggttaagtgcccgggttggtcgtaatcgagctgaacacttgtcactgggttccacggttctcttccgtgacccatggcttctaataggaactattaacattaccacatgggcccaagattccattccttgggaattccgtgaggccaagaaccccaggtcagagaatacaaggcttgccaccatcttggaagcggcccgtcgccatcttggaagcggcttgccaccatcttgggagctctgtgcacaaggaccccccggtaacattttggcaaccacgaacggacatccaaagtgatgggaaacgttccccgcaagacaaaaacgcccctaagacgtattctggagaattgggaccaatttgaccctcagacactaaggaaagaaacgacttatattcttctgcagtgccgcctggcactcctgagggaagtataaattataacaccatcttacagctagacttcttttgtagaaaagaaggtaaatggagtgaagtgctatatgtacaaactttcttttcattaagagacaactcacaattattgtaaaaagtgtgatttatgcccctacagggaagccttcagagtctacctcccctatccccagcatccccccaactccttctccaactattaaggaccccccttcaacccaaatggtccaaaaggagatagacaaaagggtaaacagtgaaccaaagagtgccaatattccccaattatgacccctcccaagcagtgggaggaagagaattcggcccagccagagtgcatgtgcctttttctctcccagacttaaagcaaataaaaacagacttaggtaaattctcagataaccctgatggctatattggtgttttacaagggttaggacaattctttgatctgacatggagagatatatatgtcactgctaaatcagacactaaccccaaatgagagaagtgccaccataactgcagcctgagagtttggcgatctctggtatctcagtcaggtcaatggataggatgacaacagagaaaagagaacgattccccacaggccagcaggcagtttccagtgtagaccctcattggggacacagaaatcagtaacatgggagattggtgctgcagacatttgctaacttgtgtgctacaaggactaaggaaaactacgaagaaaatctacgaattactcaatgatgtccaccataacacaggggaagggaagaaaatcctactgcctttctggagagactaagggaggcattgaggaagcgtgcctctctgtcacctgactcttctgaaggccaactaatcttaaagcgtaagtttatcactcagtcagctgcagacattagaaaaaacttcaaaagtctgccgtaggcccggagcaaaacttagaaaccctattgaacttggcaacytcggttttttataatagagatcaggaggagcaggcggaacaggacaaacgggattaaaaaaaaggccaccgctttagtcatgaccctcaggcaagtggactttggaggctctggaaaagggaaaagctgggcaaattgaatgcctaatagggcttgcttccagtgcggtctacaaggacactttaaaaaagattgtccaagtagaagtaagccgccccttcgtccatgccccttatttcaagggaatcactggaaggcccactgccccaggggacaaaggtcttttgagtcagaagccactaaccagatgatccagcagcaggactgagggtgcctggggcaagcgccatcccatgccatcaccctcacagagccctgggtatgcttgaccattgagggccaggaaggttgtctcctggacactggtgcggtcttcttagtcttactcttctgtcccggacaactgtcctccagatctgtcactattctgagggggtcctaagacgggcagtcactagatactttttcccagccactaagttatgaactggggagctttattcttttcacatgcttttctaattatgcttgaaagccccactaccttgttagggagagacattctagcaaaagcaggggccattatacacctgaacataggagaaggaacacccgtttgttgtcccctgcttgaggaaggaattaatcctgaagtctgggcaacagaaggacaatatggacgagccaaagaatgcccgtcctgttcaagttaaactaaaggattctgcctcctttccctaccaaaggcaatacccccttagacctgaggcccaacaaagggcttccaaaagattgttaaggacttaaaagcccaaggcttagtaaaaccatgcataactccctgcagtaattccgtagtggattgaggaggcacagaaacccagtggacagtggagggttagtgcaagatctcaggattatcaatggaggccgttgtccttttatacccagctgtacctagcccttatactgtgctttcccaaataccagaggaagcagagtggtttacactcctggaccttaaggatgccttcttctgcatccctgtacatcctgactctcaattcttgtttgcctttgaagatacttcaaacccaacatctcaactcacctggactgttttaccccaagggttcagggatagcccccatctatttggccaggcattagcccaagacttgagccaatcctcatacctggacactcatgtcctttggtacgtgaatgaaatcacttttagctgtccgttcagaaaccttatgccatcaagccacccaaatgctcttaaatttccttgctacctgtggctacaaggttttcaaaccaaaggctcagctctgctcacagcaggttaaatacttagggctaaaattatccaaaggtaccaaggcccttggtgaggaacgtatccagcctatactggcttaccctcatcccaaaaccctaaagcaactaagagggttccttggcataacaggtttctgccaaatatggattaacaggtatggcaaaatagccaggccattatacacactaattaaggaaactcagaaagccaatacccatttagtaagatggacaactgaagtagaagtggctttccaggccctaacccaagccccagtgttaagtttgccaacagggcaagacttttcttcatatgtcacagaaaaaacaggaatagctctaggagtccttacacagatccgagggatgagcttgcaacctgtggcgtacctgactaaggaaattgatgtagtggcaaagggttggcctcattgtttatgggtaatggtggcagtagcaatcttagtatctgaagcagttaaaataatacaggaaagagatcttactgtgtggacatctcatgatgtgaacagcatactcactgctaaaggagacctgtggctgtcagacagccatttacttaaataccagggtctattacttgaagggccagtgctgcaactgtgcacttgggcaactcttaacccagccacatttcttccagacattgaaaaaaagatagaacgtaactgtcaacaggtgattgctcaaacctatgccgctcgaggaaaccttctagaggttcctttgactgatcctgacctcaacttgtatattgatggaagttcctttgtagaaaaaagacttcgaaaagcagggtatgcagtggtcagtgataatggaatacttgaaaataatcccctcactccaggaactagcgctcagctggcaaaactaatagccattactccggcactaaaattagaaaaagaaaaaagggtaaacatatatacagactctaagtatgcttacctagtcctccatgcccatgcagcaatatggagagaaagggaatacctaacttctgagggaacatctatcaaacatcaggaagccatcaggagattattatcggctgtacagaaacctaaagaggtggcagtcttacactgctggggtcatcagaaaggaaaggaaagggaaatagaagggaaccgccaagcgaatattgaagccaaaagagccacaaggcaggaccctccattaaaaatgcttatagaaggacccctagtatgggcaaggcaatttacctctatagaagggtgtgccctcacagatggagcaatg

SEQ ID NO: 134185 - DNA, 372 bp, Homo sapiens
aacaattaccatttgaagtactttgaggacttcatcccagactcacttgttctgttacagaaactaacctaaaaggctggaaattaaaggatacaacctaagaggttataacagcagactggtaaaacatggcgaaaggagctctctctttccatcactgctggtctcatatcagtccagctcacccccgccttcctccaggaaaggactcctgacctcattaggctcgcgccccctcccgctgacctccgaatgggctgctacaagttcatggttcacctacagggagtggctgcgcacaccagtcactgaggtgagtaagtgcttcatctctctcaatcccggaacagcagacaccaccgtccaaatttt

SEQ ID NO: 134186 - DNA, 1464 bp, Homo sapiens
atggcatgctcttggggaatgtggtggctgctgctgttgtttgaggaagccatcagagtcctgcttcctgaaggaggtggtcctggtgctgacaagaccatgggctcccgaggcttctggaagcagagtgttcaagaaggccagtccaaatggaaaggtccagatgccatcctgcttccccctcagtttagcagattcatggacctagctgaagtgatcgtggtcatcggcggttgcgaccgcaaaggtctcctgaagctgcccttcgccgatgcctaccatccagagagccagcggtggaccccactgcccagcctgcccggctacactcgctcagaattcgccgcctgtgctctccgcaatgacgtctacgtctccggaggccacatcaacagtcatgatgtgtggatgtttagctcccatctgcacacctggatcaaggtagcctctctgcacaagggcaggtggaggcacaagatggcagttgtgcaggggcagctgttcgcggtgggtggcttcgacggcctgaggcgcctgcacagcgtggagcgctacgaccccttctccaacacctgggcggccgccgcgcccctcccggaggccgaaccccaggctattataaactatttcagttccctcatgcagcagagggtgcaagagaaaggagagacagcagaagtaaatgaagaaaacagaattcagtcaactgagaagaaaaaccttgctcaaaagaatgacaagcctggaactcctggggtcaagcggtcttcccacctaagcctctccgtgctgggactccggacgcgctccacctcacgcagccgtattcctgctttcaaagcagatggaagagaacaaggacagggggacatccctacattttacacctatgaagaaggattatcccatctaacagcagaaggccaagccacactggagagattagaaggaatgctttctcagtctgtgagcagccagtataatatggctggggtcaggacagaagattcaataagagattatgaagggggctggagccctgggccaagggagacctgtgaccccaggtgccgccgggagaacttcagcccagaggggaaatcagctctccgtgacccagcacccctacccagcagcgcaacagatcctgagaggagctacaggatgattctagaaacagcgcacttcaggaatcatggttggttccgcggaggcacgagcatcctcatctcacacacgggaagcgaggttcggggagaggaacagctggctgggtcacggagctttgaaggggcagaaccagaaacgaacaccttctgcccatctcaggggctcccccttgtggccatcgtgggaggtggccctgcacacagccatcacactctaaatggtcatgcaactggagccttggatgatggccctttttgccagggacctttagataggcctctgagggagatctga

SEQ ID NO: 134187 - DNA, 1407 bp, Homo sapiens
gcggtgtggtgcacgcattgctgtgctccaactccctcagggcctgtgttgccgcactctgctgctatgagcttcctcaaaagtttcccgccgcctgggccagcggaggggctcctgcggcagcagccagacactgaggctgtgctgaacgggaagggcctcggcactggtaccctttacatcgctgagagccgcctgtcttggttagatggctctggattaggattctcactggaataccccaccattagtttacatgcattatccagggaccgaagtgactgtctaggagagcatttgtatgttatggtgaatgccaaatttgaagaagaatcaaaagaacctgttgctgatgaagaagaggaagacagtgatgatgatgttgaacctattactgaatttagatttgtgcctagtgataaatcagcgttttaatttccttgttcagtggaggcaatgttcactgcaatgtgcgaatgccaggccttgcatccagatcctgaggatgaggattcagatgactacgatggagaagaatatgatgtggaagcacatgaacaaggacagggggacatccctacattttacacctatgaagaaggattatcccatctaacagcagaaggcccaagccacactggagagattagaaggaatgctttctcaggtctgtgagcagcccagtataatatggctgggggtcaggacaagaagattcaataagagattattgaagatggggatgggaggttggataccacacccaacagtttgcttgggacagttttgaggatgcagatgtttgatccacttgaaaatgatttatgcaagtttaagatcctgctccctaagtgtaggagagaacttggtgcctcttccactctggagtgaagttaatgaaagtctttttccttttccaaaacccaacctggaaccagttctttcttgagacagactatactgagacaacaagttgtcaccagcagaagatagataatatgacctttattaacttgatgaattaacttaacccaagagggtatttgtaagtttactatttacccctaaaactttcctgtgtcctgggtacccctctgagtaggcctataattcctaccttgactgtgtgcatcatttgtaagctagcagatctatgtgggtgaaaatgcacaggagcttggtagactgcgggggaaagagagagctcctttcgcacatgttttaccagtctgcgtgttataacctcttaggttgtatcctttaatttccagccttttaggttagtttctgtaacagaacaagtggagtctggggatgaagtcctcaaagtacttcaaatggtaattgttttgtttttggtaatagcttaacaaataaacccaggttttctataaaaaaaaagtcgac

SEQ ID NO: 134188 - DNA, 442 bp, Homo sapiens
  misc_feature (1)...(442): n = a,t,c or g
ggcccagggctgactctctgtgccaaggnctgtgctgccatcctggatacgggnacgcccttcatcacaggacccactgaggagatcggggccctgcatgcagccattgggggaatccccttgctggctggggagactactcgaaatggcgtccgcctctgcttgtccggtttccaggccctggatgtccctccgcctgcagggcccttctggatcctcggtgacgtcttcttggggacgtatgtggccgtcttcgaccgcggggacatgaagagcagcgcccgggtgggcctggcgcgcgctcgcactcgcggagcggacctcggatggggagagactgcgcaggcgcagttccccgggtgacgcccaagtgaagcgcatgcgcagcgggtggtcgcggaggtcctgctacccagtaaaaatccactatttccattgagcg

SEQ ID NO: 134189 - DNA, 690 bp, Homo sapiens
atggtggaaggcaaggaggagcaagtcacatcttacgtggatggcagcaggcaaagagagagcttctgtagagaaactcccatttttaaaaccatcagatctcagaaggagatcctcagacctgtgaaggctgaggttcttgactggttcctgactaggccctctggtttcatgcctgtctttgtttctcttgatggaaaaggggaatctcgatttgccatcatcatgactgagcagatgaccctttgtggcaccctcagggccccaacggctggctgggacaagctggtcaaggtatggaatctggctaactgcaagctgaagaccaaccacattggccacacaggttatctgaacactgtgactatgtctccaaatggatccctctgtgcatctggaggcaaggatggccaggccatgctgtgggatctcaacgaaggcaaacacctttatatgccagatggtgggggcattatcaacaccctgtgcttcagccccaactgctactggctctgtgctgccatgggccccagcatcaagatctgggacttaggggtaaatatcatcgtagatgaactgaagcaagaagttattagtactggcagcaaggcagaaccaccccagtgtacctccctggcctggtctgttggtggtcatttgtttgctggctacacagacaacctggtgtga

SEQ ID NO: 134190 - DNA, 2979 bp, Homo sapiens
atgttaaggagaaagaagcaagaggactgggcagctaaaggaagctcgcatgcctgtggtcagatcccggaggaaagagagaagggtttcgctgtgggcaacgtggtcgcgaaccttggtttggatctcggtagcctctcagcccgcaggttccgggtggtgtctggagctagccgaagattctttgaggtgaaccgggagaccggagagatgtttgtgaacgaccgtctggatcgagaggagctgtgtgggacactgccctcttgcactgtaactctggagttggtagtggagaacccgctggagctgttcagcgtggaagtggtgatccaggacatcaacgacaacaatcctgctttccctacccaggaaatgaaattggagattagcgaggccgtggctccggggacgcgctttccgctcgagagcgcgcacgatcccgatgtgggaagcaactctttacaaacctatgagctgagccgaaatgaatactttgcgcttcgcgtgcagacgcgggaggacagcaccaagtacgcggagctggtgttggagcgcgccctggaccgagaacgggagcctagtctccagttagtgctgacggcgttggacggagggaccccagctctctccgccagcctgcctattcacatcaaggtgctggacgcgaatgacaatgcgcctgtcttcaaccagtccttgtaccgggcgcgcgtcctggaggatgcaccctccggcacgcgcgtggtacaagtccttgcaacggatctggatgaaggccccaacggtgaaattatttactccttcggcagccacaaccgcgccggcgtgcggcaactattcgccttagaccttgtaaccgggatgctgacaatcaagggtcggctggacttcgaggacaccaaactccatgagatttacatccaggccaaagacaagggcgccaatcccgaaggagcacattgcaaagtgttggtggaggttgtggatgtgaatgacaacgccccggagatcacagtcacctccgtgtacagcccagtacccgaggatgcccctctggggactgtcatcgctttgctcagtgtgactgacctggatgctggcgagaacgggctggtgacctgcgaagttccaccgggtctccctttcagccttacttcttccctcaagaattacttcactttgaaaaccagtgcagacctggatcgggagactgtgccagaatacaacctcagcatcaccgcccgagacgccggaaccccttccctctcagcccttacaatagtgcgtgttcaagtgtccgacatcaatgacaacgtttcgcatacatgcaccttgaaggcaaattactttaactcaagtcttaagtacatctcagtctttcaaacacaaggcgcacatgacaagcaccgaagattcgacaaggacgccgaggccgcggtcgcgggcccatcccacgcccctgatacgtccgacgtcggggccacgctgcttgtgtctgacgggacccacagtgtccgatgcctggtgacgcgggaggccctggacacctcggactgggaggagaaggagttcggcttccgcgggacagagggccggctgctgctgctgcaggactgcggggttcatgtccaggtcgctgagggcggcgcgcccgcagagttctatctccaggtggaccgcttcagcctgctgcccacggagcagccccggctacgggtgcctggttgcaaccaagacttagatgttcagaaaaagctctatgactgccttgaggagcacctttcagagtccacctcgtccaatgcaggcctatcactgtcccagcttctggatgaaatgcgggaggaccaggagcatcagggggcactcgtgtgcctggctgaaagctgcctgacactggagggcccttgcacagcaccccctgtcacccactgggctgcctcacgatgcaaggccacgcctcttcagtctctgtcggtggctgagtctcggctgaagctgggtgccagcgtcctactccgggccctagccaccaatcctaacctgaccgcgctggatatcagcggcaacgccatgggggacgcgggcgccaagttgctggccaaggcgctgcgggtcaactcgaggctccggtctgtggtctgggaccggaaccacacatctgctttgggtctgctggacgtggcgcaggcgctggagcagaaccacagcctgaaggccatgcctctgccactgaacgacgtggcccaggcgcagcgcagccgcccggaactgacagcacgtgcagtccatcagatccaagcctgtctcttgaggaacaaccgcgcagaccctgcctcttctgaccacacgacccgccttcagccacttggtctggtctcagacccctcagagcaggtcaatgtcccctccccaaccacgagagcctgcaacatcattttgatggcaagatctgagttggcccacgggaagaaggttcaggcaaagatccaggatgcaaacgggatagctgaacttgctgataaggagtacccagagccaaacagacacagctgggacaagctggtcaaggtatggaatctggctaactgcaagctgaagaccaaccacattggccacacaggttatctgaacactgtgactatgtctccaaatggatccctctgtgcatctggaggcaaggatggccaggccatgctgtgggatctcaacgaaggcaaacacctttatatgccagatggtgggggcattatcaacaccctgtgcttcagccccaactgctactggctctgtgctgccatgggccccagcatcaagatctgggacttaggggtaaatatcatcgtagatgaactgaagcaagaagttattagtactggcagcaaggcagaaccaccccagtgtacctcctggcctggtctgttggtggtcatttgtttgctggctacacagacaacctggtgtgagtgtggcaggtga

SEQ ID NO: 134191 - DNA, 766 bp, Homo sapiens
tttcaatggaaatattggatttttactgagtagcgctagctctgctacccggtgcgcatgcgcatcacctgggcggcacccgcggtactgcgcctgcgcggtctcgcgccttcccaggtccgctccgcgagggcgagcgcgcgccagtcccactcgtgcgccgctcttcatgtccccgcggtcgaagacggtcacatacgcccccaagaaaacgtcgccgaggatccacacaggtactggaggcgaagcgatgtccaaggcccggaagccggacaagcagaggcggacgtcaccctgagcaaactgcaaggcgacaaggcggcaactgggtgtccaggccgccaggaaccaccatttccctgggagtccgtgctctctccgcccccaaccctggggacaagaaatgtttctgtggccccttccggccctagtgatgtccaactaccagctccaccctctcaactccagtcatattacatcactgtggcgtcattatgacggacacctacctggatgacgtaatcctgggccgtgagattaaaccagacccccccaatgaggagtgagactgcggggagctttgggatttctgagcaccggatgatgtactggtggaggagaggaacaagtgaagatgggagattcctgctctgctcaaatcccgtccgtggctccccagtgccatggagtaatgttcatattgagcacctgggtattcagcaccgtgtgtggacagccctgttgcctaggctcctctcatctagtc

SEQ ID NO: 134192 - DNA, 1312 bp, Homo sapiens
ctttgagctgctctccagcgccccccagcagctggtagaagatgtggaagctgcactcgtccttggcctggcggatggcccgcgacttctccagcaggtctggacacagcgagtcaaggtgccccatgggctgtgagaggatacaggtctcaatgttggcgcccacgatgtacccggcaacatcaaagttgatgcggatgaatttgccgaatcgggaggagttgtcattcttcactgtcttggcattgccaaaggcctctaggatggggttggcctgaagcagctgccgctccagctcaccggggacacccggctccttcctgccctttggagacgacgccacgtgggcgaggtactggatgaccttcttggtgttttccgtcttcccagctccagactctccagtgcagagaatggactggtcctcacgatcctgcagcatgctccgataggccccctcggtcactgcgtacacgtggggtggcacctcgtggcgcttcttgccccggtacatctccacaatggcttctgtgtagatgggaagctgcttgtacgggttgatgaccacacagaaagccggagtacgtctggttccccaaccggcagcaactccgccgcacgcgccccccagcaggagcccactcacgtagatgaggccggagtagtaccgctcccggaggttgtgcaggaccgaggcctcgttgaggcaggtcagctcggccatgtcctcggccttgctgaacttgggcgggttcatgcgctggatctggtcccgcggcagtcgcagccgcctcccgctctccgccagctccacctccgcctcctcctcgccttcgtcccgcagcgccgccgcctcgaacccgtgaagctccgaaggcacccacacgagacgccgggccgtccactccacctgcggggaggtgcccgagccaggcccgccacccgcgctgggcccgcggggcgtgaacaggaacggctgggccgcctcgggcactgggcccggcctggggggcgccttccgcccgggcaccgacatggtcacggctgccatggtctgggggcgccgaccggagcggggagatggggtgagggcgcgggaatccccgttctcttcaggtgcagcgacctccgcggtccagcgcagggcggggccccgtcgcgtcacagggcgggagcccggctctgatgtcacccagcacctgcccggcggcttccagggccgtcccgaggcttcggccgtcgcgtggtgtccggcgatggtcgtctcgtgccgtcgagcttctccgtagtgtagcgctgggtaggctgtcat

SEQ ID NO: 134193 - DNA, 3250 bp, Homo sapiens
gctgacttcgcgctggaggccctggccaaggccacctacgagcgcctcttccgctggctggttctgcgcctcaaccgggccttggaccgcagcccccgccaaggcgcctccttcctgggcatcctggacatcgcgggctttgagatcttccaggccacagacaagtcgtttgtggagaaggtagcccaggagcagggcggccaccccaagttccagcggccgaggcacctgcgggatcaggccgacttcagtgttctccactacgcgggcaaggtcgactacaaggccaacgagtggctgatgaaaaacatggaccctctgaatgacaacgtcgcagccttgctccaccagagcacagaccggctgacggcagagatctggaaagacgtggagggcatcgtggggctggaacaggtgagcagcctgggcgacggcccaccaggtggccgcccccgtcggggtatgttccggacagtgggacagctctacaaggagtccctgagccgcctcatggccacactcagcaacaccaaccccagttttgtccggtgcattgtccccaaccacgagaagagggccgggaagctggagccacggctggtgctggaccagcttcgctgcaacggggtcctggagggcatccgcatctgtcgccagggcttccccaaccgcatcctcttccaggagttccggcagcgatacgagatcctgacacccaatgccatccccaagggcttcatggatgggaagcaggcctgtgaaaagatgggtgcaggacttccagtgctaaaacagagaaagcccggggcaacccaggtcaagctgtccgctctccctggccagtccctcgaggggctccagtctggaggtgagacttccatgggcatagagtcccagtcccgggccacaccggacaagcaggtggatgaaggaaaatgggaaagggccttccagaagcgccagcagcagcagagcgccctgagggtgatgcagcggaactgcgcggcctacctcaagctgagacactggcagtggtggcggctgtttaccaaggtgaagccactgctgcaggtgacgcggcaggatgaggtgctgcaggcacgggcccaggagctgcagaaagtgcaggagctacagcagcagagcgcccgcgaagttggggagctccagggccgagtggcacagctggaagaggagcgcgcccgcctggcagagcaattgcgagcagaggcagaactgtgtgcagaggccgaggagacgcgggggaggctggcagcccgcaagcaggagctggagctggtggtgtcagagctggaggctcgcgtgggcgaggaggaggagtgcagccgtcaaatgcaaaccgagaagaagaggctgcagcagcacatacaggagctagaggcccaccttgaggctgaggagggtgcgcggcagaagctgcagctggagaaggtgacgacagaggcaaaaatgaagaaatttgaagaggacctgctgctcctggaagaccagaattccaagctgagcaaggagcggaagctgctggaagatcgtctggccgagttctcatcccaggcagctgaggaggaggagaaggtcaagagcctcaataagctacggctcaaatatgaggccacaatcgcagacatggaggaccgcctacggaaggaggagaagggtcgccaggagctggagaagctgaagcggaggctggatggggagagctcagagctgcaggagcagatggtggagcagcaacagcgggcagaggagctgcgggcccagctgggccggaaggaggaggagctgcaggctgccctggccagggcagaagacgagggtggggcccgggcccagctgctgaaatccctgcgggaggctcaagcagccctggccgaggcccaggaggacctggagtctgagcgtgtggccaggaccaaggcggagaagcagcgccgggacctgggcgaggagctggaggcgctgcggggcgagctggaggacacgctggactccaccaacgcacagcaggagctccggtccaagagggaacaggaggtgacggagctgaagaagactctggaggaggagactcgcatccacgaggcggcagtgcaggagctgaggcagcgccacggccaggccctgggggagctggcggagcagctggagcaggcccggaggggcaaaggtgcatgggagaagacccggctggccctggaggccgaggtgtccgagctgcgggcagaactgagcagcctgcagactgcacgtcaggagggtgagcagcggaggcgccgcctggagttacagctgcaggaggtgcagggccgggctggtgatggggagagggcacgagcggaggctgctgagaagctgcagcgagcccaggctgaactggagaatgtgtctggggcgctgaacgaggctgagtccaaaaccatccgtcttagcaaggagctgagcagcacagaagcccagctgcacgatgcccaggagctgctgcaggaggagaccagggcgaaattggccttggggtcccgggtgcgagccatggaggctgaggcagccgggctgcgtgagcagctggaggaggaggcagctgccagggaacgggcgggccgtgaactgcagactgcccaggcccagctttccgagtggcggcggcgccaggaggaggaggcaggggcactggaggcaggggaggaggcacggcgccgggcagcccgggaggccgaggccctgacccagcgcctggcagaaaagacagagaccgtggatcggctggagcggggccgccgccggctgcagcaggagctggacgacgccaccatggacctggagcagcagcggcagcttgtgagcaccctggagaagaagcagcgcaagtttgaccaggtggggcacctcagttcacccagccggggaatcagcaagtccatctacgcttcccatggtcgttctaatctatttccccctaccccatctccctcaaactggaagcttctggcagaggagaaggcagctgtacttcgggcagtggaggaacgtgagcgggccgaggcagagggccgggagcgtgaggctcgggccctgtcactgacacgggcactggaggaggagcaggaggcacgtgaggagctggagcggcagaaccgggccctgcgggctgagctggaggcactgctgagcagcaaggatgacgtcggcaagagcgtgagcagggcccccgctccccgggacacactgg

SEQ ID NO: 134194 - DNA, 1816 bp, Homo sapiens
atgctgagctcagtctgcgtctcgtccttccgcgggcgccagggggccagcaagcagcagccggcgccaccgcgacagccgcccgagtccccgccgccgccaccgctgccgccgcagcagcatcagcctgcgcagccggccccgcgcgttccccggcgcgcccccggcaccccgcgggcccggggcggccgcgccgtagcattttgttggattgtgttgttcatattacatcactgtggcgtcattatgacggacacctacctggatgacgtaatcctgggccgccgcagtgttcgccatggaattgccatcatcttccccaggacacacccatccagagactgggacctcacctccccagccagcaaggattcccccaatggctgcatgcagggcccgatctcctcagtgggtcctacgatgacagaagccctacagagtcaagtctacaagctgtcatttgacctggactctggcttccggcagccccaggtcaggcccccgttgaagagccgcctcgctggcctacagccccacccagcactcaccctgcagcatgctccgataggccccctcggtcactgcgtacacgtggggtggcacctcgtggcgcttcttgccccggtacatctccacaatggcttctgtgtagatgggaagctgcttgtacgggttgatgaccacacagaaaaggccggagtacgtctgcagtgggccgggaagctggagccgcggctggtgctggaccagcttcgctgcaacggggtcctggagggcatccgcatctgtcgccagggcttccccaaccgcatcctcttccaggagttccggcagcgcctgggcaacacaatccaggcgctggaactggaccccaacctctaccgcgtgggacagagcaagatcttcttccgggctggggtcctggcccagctggaagaggagcgagacctgaaggtcaccgacatcatcgtctccttccaggcagctgcccggggatacctggctcgcagtggagggcatcgtggggctggaacaggtgagcagcctgggcgacggcccaccaggtggccgcccccgtcggggtatgttccggacagtgggacagctctacaaggagtccctgagccgcctcatggccacactcagcaacaccaaccccagttttgtccgctgcattgtccccaaccacgagaagaggcatgggagtcatgcccatcatgaacatatcacagtgctgcagagatttatgccagttttgggccagtttatggcccagatttgggggcctgttcccaacacctgggtgtatgcagatacactgtctagtatgagagtcacagagtgggtgtcttgtgttcgcttcttgcctaacagcagcaaccctatcactgtctcctgtagctgggacaagctggtcaaggtatggaatctggctaactgcaagctgaagaccaaccacattggccacacaggttatctgaacactgtgactatgtctccaaatggatccctctgtgcatctggaggcaaggatggccaggccatgctgtgggatctcaacgaaggcaaacacctttatatgccagatggtgggggcattatcaacaccctgtgcttcagccccaactgctactggctctgtgctgccatgggccccagcatcaagatctgggacttaggggtaaatatcatcgtagatgaactgaagcaagaagttattagtactggcagcaaggcagaaccaccccagtgtacctccctggcctggtctgttggtggtcatttgtttgctggctacacagacaacctggtgtga

SEQ ID NO: 134195 - DNA, 866 bp, Homo sapiens
ttttttttttttttttttcaatggaaatattggatttttactgagtagcgctagctcggctacccggtgcgcatgcgcatcacctgggcggcacccgcggtactgcgcctgcgcggtctccccatatcgccaggtccgctccgcgagggcgagcgcgcgccaagtcccactccgtgcgccgctctctgatgtccccgcggtcgaagacggtcacatacgcccccaagaaaacgtcgccgaggatccacacaggtactggaggcgaacggatgtccaaggccccggaagccggacaagcagaggcggacgtcaccctgagcaaactggatgacgtaaatcctgggccgtgagattaaaccagaccccccccattgagaattgagactgcggggagctttgggatttctgagcaccggatgatgtactccccagccagcaaggggattcccccaatggctgcatgcagggcccggatgctcctcagtgggtcctacgatgacaggtgtgcctgtatccaggatggcagcacagccctgggcgacagagagtcagcggttgagcgcaccttcacactgctccattgtggatctgccagtagtcgggggactgtgactggcacgaaagttgagggggtgggatgtagtgtgtcaggtcttgagccccccaggaccagctctcctccatcagccacttcagggtccctgttgaagtaaaaggagaagacaggcttatccaatagcccctgctccaccagtacatccagcgggggccgaactccttccacagacagaatggggaaaacgaggcgccaatatcccagcggggcgggaaacagtgaagacaaggttggttttccacaagttttc

SEQ ID NO: 134196 - DNA, 397 bp, Homo sapiens
gctagcaccaaccctggctctttgttgcccatcttctcccagaccctttcccatcccagcccatgttcaaggccagacagcgctctcctggctgacacacagattcaacaataaacaacagtaaaatagattcagggaggcttcactaagaactctgccctcacccgtcatcagacagtacacatgaaagcagtactctcatcacaggaaggaagagatgcgttatgagtgtgtcggtaaactgtcagattaagttcctcaggtcagcatgtatgagctttcttctgctgtggagagatctagccagtccctgactttgcaacagacctactgactactggatcttaagacccatgtctaggaccaggagtcagcataaggacgctgacctctcctg

SEQ ID NO: 134197 - DNA, 2385 bp, Homo sapiens
  misc_feature (1)...(2385): n = a,t,c or g
atgtgtgaccggcagtcaagaacatgggaggtgaagggtgaggcggtggagaagcaaaatgttagtgagacagagtcagaacaagtagtccagagccggagccagacaggtggccaccaggagcacagatgtgttcatgctgaatgtgcgctcatgcacacagcaacaggtgtgccctggggctatgaagagaccaagacgctcctggctattcttagtagttctcaattttatggaaaactccagacctgtcagcagaacagccagatctacagggccatggcggaaggactctgggagcagggttttctgcggaccccagaacagtgtcgcaccaagttcaaaagcctacagttgagttaccgcaaagtgaggagaggccgtgtgcctgagccttgtatcttttatggaggaaatgaatgctcttttcaggctcctgggcctctgcacctcctatggcaagcgatgctgtttcctggtccaagaaggaagtgatattgaggctggagagctgaatcaccagaatggggaacccacggaggtagaagatggcactgtggatggtgcagacagggatgaaaaggacttcaggaatcctgggccaggaagtcaggaaactagacctgccagtgctgttcccaaacagacttggttttgagttcaagaacgagattaaaaaagaaaatctaaaatgggatgattcaaaggaagtagaaataaacaaggctttacagagaaagtccagaggagtttattgggcactctgagctacaaaaaggcttgggaggagtgagccaacatcaaggaaggccaatgtaggaaattctccaggggggagaagtngagggaggaaaaccccatcccaggggagaagatggagttcacccagagtttttttgttgccagggggaccaaagccttgttacacatatcctcttgtgggggaaaaactgctcttcagagtgttgccacttttcccccacaagcccagcgcttcaaacttggaaaaagtatctcattgtcctgaatgtgggaaaacctttagccgaagttcttatcttgttcggcatcaaagaatccacacaggcgagaagccttcacaagtgccagttgagtgcgggaagggcttttagtgagcgcttccaacctcactgcccaccttacggaactcacacaggggagaggccctatcagtgtgggcaatgtgggaaaagcttcaaccagagttccagcctcattgtccaccagaggacccataccggggaaaagccttaccagtgcattgtctgtggaaagagattcaacatctagttcccagttcagtgctcaccggcgcatccacactggggagagcccatacaagtgtgcagtgtgtgggaaaatcttcaacaatagctcccacttcagtgcccaccgaaaaacccacactggtgaaaagccttacaggtgttctcactgtgagagaggcttcactaagaactctgccctcacccgtcatcagacagtacacatgaaagcagtactctcatcacaggaaggaagagatgcgttatgagtgtgtcggtaaactgtcagattaagttcctcaggtcagcatgtatgagctttcttctgctgtggagagatctagccagtccctgactttgcaacagacctactgactactggatcttaagacccatgtctaggaccaggagtcagcataaggacgctgaacctctcctggctgtgcctgtgactccagaagtacctatcttactgtgnactttaaagtttgatggagagaaagctgtaggaatccataaattcctaccaggaaatccagggatcttcctgttcctagacactgagaaatgggacacccagtggttccaagaacaattttcttgggctaaacatagtcctcacacagggactgaggaaagaaagtgtctcctttcctgggaaaggcacatggtaaaaaggttaaggggcccggaatcctcttcctaaaacccaataattggaccctctagggcaccccaccataatactgcctacccttcagggccaggaagacactgnctcctttgtaaccccagcccagccacccaaaaagcaaacagaaagaaggaaggatggttaagcccattggataatactggaatctgtttcccctaagtgactttaacctttagagcaagcacaacgatccaggttaattttttggtaagatttctccttttattattgccctcatcatagttcctgattgtctcttaaagtaagtggtttatagacattactatttctgataataatttacaaactactataaacaaatttataaacattactaatttctggatgaaaataaagttgtttctccctccaaaaaaaaaaaaa

SEQ ID NO: 134198 - DNA, 955 bp, Homo sapiens
  misc_feature (1)...(955): n = a,t,c or g
attgtaaaaaaggtatttagcataggtataaccgtttctacgatgcgtgtctcactctctagggaagatgcatatgcgaggctcatgagtgagctcaggagcgcaaggctctcaaatctacgccgagccattcttcgttctccagaggctatcgaggataattctcaagaatagnnnnnnnnnnnnnnnnnnnnnnnnnnnnnnnnnnnnnnnnnnnnnnnnnntgagagagagagagagaaagtcatgtgagaatgtaaacattacgcgaaatcgccgccgacagcagaaacaatagccgacaccatagacacttcaaatggttctgttttcctcatttggactgaaaggtgagagtggaactcggctgcccaaaccgtggcaccaatatcagctgcaggccagagcaagcctttccgaggagattttaaacaaccggtgggagcaagatcctgaagcatttcggcaggatcctgaagaccaagcacgaagccatggctaccaagaggtggcagtgctccagtcgaagcagagacttcttctccaccacgacagtgttcctgatcatgcctttcttcgaacaagggcagctgggcaagacttgccatgggaaaccgtgaggcgtccacctgacaatcctgatttggcgcctgctgacttctctttgtttccttgtcttggaaaactacttgctgagagaagatgtttttctttacaacggagagttccatggccaccagaaaatcaaccaccacaccgacagtgagatacacagatgtgtggatccatgagctgatagaagcttgagacacttagaataagatccaagctgcccccgtaatgcaatgggcatcttcacgaagaataagctccttttcacagcagatggagcctggcgcctgttcttggtgccgctttacacttggcaatgcgttttttggtcaaatcatccctc

SEQ ID NO: 134199 - DNA, 433 bp, Homo sapiens
  misc_feature (1)...(433): n = a,t,c or g
tcaactctcattggctcatcctctcatgttgaatgggaggatgctgtacacattatcccanaaaatgaaagtgatgatgaggaagaggaagaaaaagggccagtgtctcccaggaatctgcaggagtctgaagaggaggaagtcccccaggagtcctgggatgaaggacatcggtgggatcaagtgaaaaaggaggaccaagaggcaacaggtcccaggctcagcagggagctgctggatgagaaagagcctgaagtcttgcaggactcactggatagatgttattcaactccttcagtttatcttggactgactgactcatgccagccctacagaagtgccttttacgtattggagcaacagcgtattggcttggctgttgacatggatgaaattgaaaagtgccaagaagtggaagaagaccaagacccat

SEQ ID NO: 134200 - DNA, 516 bp, Homo sapiens
  misc_feature (1)...(516): n = a,t,c or g
ccccgtacccactgctcgggccagtagagctgcccaactgcncagcgagcagaggtgnacgaaggtcnngcggnanaangcnncaanaannttttcgctacacagaccgcaattaattggggtcccccggggttttccccttcccccgttgttaacacccggcccgtggattttaatttggggcccctataaaaaaacttttcctctgccaggccgcggttcttaactttggttctttaaaacgggccccccnnnnnnnnnnnnnncaatttctcccacgtcaagagaaaagccaacatgtttttcctccaatgcataaaaggaacttccatagggctggcaggagtcaggctgttcaagacaactggaaggagttgaataacatctatccagtgagtcctgcaagacttcaggctctactacctccagcagctccctgctgagcctggggcatggtgggccttggtcttcttcctcttcttggtcctttttaattctgtccacgtcaagagccaa

SEQ ID NO: 134201 - DNA, 406 bp, Homo sapiens
ctgatggaagtggaagagcctgaagtcttgcaggactcactggatatatgttattcgactccgtcaatgtactttgaactacctgacaattgttaacccgctaggctcctttggttagagaagccacagtccttcagcctccaattggtgtcagtacttaggaagaccacagctagatggacaaacagcattgggaggccttagccctgctcctctcaattccatcctgtagagaacaggagtcaggagccgctggcaggagacagcatgtcacccaggactctgccggtgcagaatatgagcaatgccatgttcttgcagaaaacgcttaacctgagtttcataggaggtaatcaccagacaactgcagaatgtggaacactcagctgtctggctcggtggtctt

SEQ ID NO: 134202 - DNA, 439 bp, Homo sapiens
  misc_feature (1)...(439): n = a,t,c or g
ggaccttctctgcccgcagatgggctgaggttggaaactcacagcattgtctctgcagtgttctctacaggatggaattgagaggagcagggctaaggcctcccaatgctgtttgtccatctagctgtggtcttcctaagtactgacaccaattggaggctgaaggactgtggcttctctaaccaaaggagcctagcgggttaacaattgtcaagagcagttggtggttctgaaatacaatcctcagccaaggatccctcctgtgttacagatggatcagctaaaacaagccaacactgaagacacaaagaatgaggttaggttcattgaaaccagggtaacacctttggatgagctaaacacaaagatgacaatgaccttgagcaggtatagaagctccggacgcgtggactcttccnnnttttccggagcggttcct

SEQ ID NO: 134203 - DNA, 328 bp, Homo sapiens
  misc_feature (1)...(328): n = a,t,c or g
aggnagtcccccaggagtcctgggatgaaggttattcgactctctcaattcctcctgaaaggacatcggtgggatcaagtgaaaaaggaggaccaagaggcaacaggtcccaggctcagcagggagctgctggctgagaaagagcctgaagtcttgcaggactcactggatagatgttattcaactccttcagtttatcttggactgactgactcatgccagccctacagaagtgccttttacgtattggagcaacagcgtgttggcttggctgttgacatggatgaaattgaaaagtaccaagaagtggaagaagaccaagacccat

SEQ ID NO: 134204 - DNA, 495 bp, Homo sapiens
cggtgacaagtctccacctggtcttccagatgggagtcatattcccacaataagcagcccttactaagccgagaggtgtcattcctgcaggcaggacctataggcacctgaagatttgaatgaaactatagttccatttggaagcccagacataggatgggtcagtgggcatggctctattcttatttcaaaagcatgccagtgccaacctgtgctcagtctgaagacaatggacccacgttaggtgtgacacattcacataactgtgcagcacatgccgggagtgatcagccggacattttaatttgaaccatgtatctctgggtagctacaaaattcctcagggatttcattttgcaggcatgtctctgagcttctatacctactcaagtgtctgctgttgcaaaaagaagaaaacattctctgcctgagttttaatttttgtccaaagttaattttaatctatacaattaaaaccttttgcctatcaaaaaa

SEQ ID NO: 134205 - DNA, 2996 bp, Homo sapiens
aatatgaagagtgcaaagatctcataaaatctatgctgaggaatgagcgacagttcaaggaggagaagcttgcagagcagctcaagcaagctgaggagctcaggcaatataaagtcctggttcacgctcaggaacgagagctgacccagttaagggagaagttgcgggaagggagagatgcctcccgctcattgaatgagcatctccaggccctcctcactccggatgagccggacaagtcccaggggcaggacctccaagaacagctggctgaggggtgtagactggcacagcaccttgtccaaaagctcagcccagaaaatgacaacgatgacgatgaagatgttcaagttgaggtggctgagaaagtgcagaaatcgtctgcccccagggagatgcagaaggctgaagaaaaggaagtccctgaggactcactggaggaatgtgccatcacttgttcaaatagccatggcccttatgactccaaccagccacataggaaaaccaaaatcacatttgaggaagacaaagtcgactcaactctcattggctcatcctctcatgttgaatgggaggatgctgtacacattattccagaaaatgaaagtgatgatgaggaagaggaagaaaaaggaccagtgtctcccaggaatctgcaggagtctgaagaggaggaagtcccccaggagtcctgggatgaaggttattcgactctctcaattcctcctgaaatgttggcctcgtacaagtcttacagcagcacatttcactcattagaggaacagcaagtctgcatggctgttgacataggcagtgagtactccattgtgaaggtgataaagctccagttcatggcccagtctcaggccatgcccgtgccaacctggactgactgtcacgacattgaactcaaggcaggacatcggtgggatcaagtgaaaaaggaggaccacgaggcaacaggtcccaggctcagcagagagctgctggatgagaaagggcctgaagtcttgcaggactcactggatagatgttattcaactccttcaggttgtcttgaactgactgactcatgccagccctacagaagtgccttttacgtattggagcaacagcgtgttggcttggctgttaacatggatgaaattgaaaagtaccaagaagtggaagaagaccaagacccatcatgccccaggctcagcagggagctgctggatgagaaagagcctgaagtcttgcaggactcactgggtagatgttattcgactccttcaggttatcttgaactgcctgacttaggccagccctacagcagtgctgtttactcattggaggaacagtaccttggcttggctcttgacgtggacagaattaaaaaggaccaagaagaggaagaagaccaaggcccaccatgccccaggctcagcagggagctgctggaggtagtagagcctgaagtcttgcaggactcactggatagatgttattcaactccttccagttgtcttgaacagcctgactcctgccagccctatggaagttccttttatgcattggaggaaaagcatgttggcttttctcttgacgtgggagaaattgaaaagaaggggaaggggaagaaaagaaggggaagaagatcaaagaaggaaagaagaaggggaagaaaagaaggggaagaagatcaaaacccaccatgccccaggctcagcagggagctgctggatgagaaagggcctgaagtcttgcaggactcactggatagatgttattcaactccttcaggttgtcttgaactgactgactcatgccagccctacagaagtgccttttacatattggagcaacagcgtgttggcttggctgttgacatggatgaaattgaaaagtaccaagaagtggaagaagaccaagacccatcatgccccaggctcagcggggagctgttggatgagaaagagcctgaagtcttgcaggagtcactggatagatgctattcaactccttcaggttgtcttgaactgactgactcatgccagccctacagaagtgccttttacatattggagcaacagcgtgttggcttggctgttgacatggatgaaattgaaaagtaccaagaagtggaagaagaccaagacccatcatgccccaggctcagcagggagctgctggatgagaaagagcctgaagtcttgcaggactcactgggtagatgttattcgactccttcaggttatcttgaactgcctgacttaggccagccctacagcagtgctgtttactcattggaggaacagtaccttggcttggctcttgacgtggacagaattaaaaaggaccaagaagaggaagaagaccaaggcccaccatgccccaggctcagcagggagctgctggaggtagtagagcctgaagtcttgcaggactcactggatagatgttattcaactccttccagttgtcttgaacagcctgactcctgccagccctatggaagttccttttatgcattggaggaaaaacatgttggcttttctcttgacgtgggagagaacaggagtcaggagccgctggcaggagacagcatgtcacccaggactctgccggtgcagaatatgagcaatgccatgttcttgcagaaaacgcttaacctgagtttcataggagtatttgaacctaaacatataccggtgacattctgtgattatcatcttgcccctaccttggttttggtttttggtgcagttccaggctcttggtgtctttgtttgggacaccaagagcctggaactgcacggcaccagctggaagggcgcacgcacgaaacttcctccgtcccttgcatcctcagggcccgcccggcaggacgactgagcaaggccttggaagaccggagagattggagtgtcgcttttggggccgctgcggagcttccgctgccatcttcggatcctgtgttccgcacgggggctccaccagagcagggatcgtggtga

SEQ ID NO: 134206 - DNA, 493 bp, Homo sapiens
  misc_feature (1)...(493): n = a,t,c or g
ggcacgagtgagaaaagcctaatattgaagtatctctcctatgagggggtagaactatttgcctacaatttattggggaaaaaattgctcatttgtgtacataaacctaggacagagcacatagggaagataacattccaacacaggggaattttgcccaaggctcatgaaagaacccaagccagttttctcaagacttgacctcaggcctactggaatatttctctcaaagtctcctgttctcacactgacaagactgatgtccctgtgttaggattggacagaggaatgtttctgtgtgcaaggaagaactgcttaatgtaagagggcccatctgaatttatttgcaggacatcggtgggatcaagtgaaaaaggaggaccacgaggcaacaggtcccaggctcagcagagagctgctggatgagaaagggcctgaagtcttgcaggactcactggatagantgtattcgaactcttcaaggtgncttgaa

SEQ ID NO: 134207 - DNA, 257 bp, Homo sapiens
cagctggtgccgtgcagttccaggctcttggtgtcccaaacaaagacaccaagagcctggaactgcaccaaaaaccaaaaccaaggtaggggcaagatgataatcacagaatgtcaccggtatatgtttaggttcaaatactcctatgaaactcaggttaagcgttttctgcaagaacatggcattgctcatattctgcaccggcagagtcctgggtgacatgctgtctcctgccagcggctcctgactcctgttct

SEQ ID NO: 134208 - DNA, 453 bp, Homo sapiens
caaagaggagcaagaagacctcttgagaaagcgagagcgtgaactcaccgccctgaagggagccctgaaagaagaggtttccagccatgatcaggagatggacaagctgaaggagcaatatgatgctgagttgcaggccctgagggagagtgtggaagaagcaaccaagaatgtcgaggtcttggcgagcaggagcaacacttcagagcaagaccaggcggggactgaaatgcgcgtgaagcttctgctggctgagaaagagcctgaagtcttgcaggactcactggatagatggtattcgactccttcaggttatcttgaactgcctgacttaggccagccctacagaagtgctgtttactcattggaggaacagtaccttggcttggctcttgacgtggacagaattaaaaaggaccaagaagaggaagaagaccaaggcccaccatgccc

SEQ ID NO: 134209 - DNA, 1320 bp, Homo sapiens; identical to SEQ ID NO: 120185

SEQ ID NO: 134210 - DNA, 1353 bp, Homo sapiens
atggataagcctcgcccagggaaaaccaccttcgtgatcatggtatctcccctgccagccccatatacctcaccctttacacacatggtcacttgccccgcgcacccccgagccttcctagccctgacacacagctgggaccctcaggtccgaccagcggtcctgaacccgctcccacggcacgggagctccttcgtggtgaaacagccagtggcgaagcagcagcccctgcgctgcctcatctacatagaagtcgccctatccgtgatgtcaccgacagcgccttcctcgtcccgaagcccctggaaacgccccggtctgcgacccgggttcgagcagccagggggctcaagggaagctgaacgcctggtgggctcccgggatggctcttcccgttctttgcacagccttcacccagtgagggagcctgtgccctccctgctcagtcgcattcggggcgctgcggagcttccgctgccttcttcggatcctgcgttcggcaccggggctccaccagggcagggatcgtggcaatataaagtcctggttcacgctcaggaacgagagctgacccagttaagggagaagttgcgggaagggagagatgcctcccgctcattgaatgagcatctccaggccctcctcactccggatgagccggacaagtcccaggggcaggacctccaagaacagctggctgaggggtgtagactggcacagcaccttgtccaaaagctcagcccagaaaatgacaacgatgacgatgaagatgttcaagttgagttggctgagaaagtgcagaaatcgtctgcccccagggagatgcagaaggctgaagaaaaggaagtccctgaggactcacaggaggaatgtgccatcacttattcaaatagccatggcccttatgactccaaccagccacataggaaaaccaaaatcacatttgaggaagacaaagtcgactcaactctgattggctcatcctctcatgttgaatgggaggatgctgtacacattattccagaaaatgaaagtgatgatgaggaagaggaagaaaaagggccagtgtctcccagaagcccgaggaaacgccctcgtccgcgacccgagccgccgcctcgaggctcaggggaagctgaacgctcggtgggctcctgggatgcatcttcgcgttctttgcgccgccttcacccactgagggagcctgtgcccaccctgcccagtcgctttcggggccgctgcggagcttccgctgccatcttcggatcctgtgtcccgcacgggggctccaccagggcagtgatgatgaagaagagttccaaacaaaagatctactaccctgagaagcggtga

SEQ ID NO: 134211 - DNA, 2559 bp, Homo sapiens
gctgaatactttagttttcctcctggaaatcatctggggcattttctttgaactgatgggaacaataaagcataactgtttgcacaaacttgggataaatgattttgggataacgatctaccagaatggggatatttcacccttggttctgagatgcaaaccaaagaatatcatgaccagctttcaggcctcctgaagtatatctctcacattgtcctgttctcatgctgaggagcctgagatccctgtgtggggattagacagtggactgttatgggtgtaggtgaattggcttattttgtctgtccctgtctgaatgttttgcaggaattaaaaaggaccaagaagaggaagaagaccaaggcccaccatgccccaggtaactgagcaattgtgaacagctacttctgtgttgacatctggagactcctggttcagggaaaacagagcgggctgacattatcgattacatcttttcaaccaagcctgaattattcctactaacattgctgttggttttcattgcagtagatatttaggtttccatttcttcctccccttatcatttactaacctactgtaggtggaccagacttcaaaaactgtattctcatggcgactgcatggaaacttgagcacattttatggaaaattattgagcacagtcttttcatgatccctgtatgctgtgtgtcctgagggcactaactcagagtgtcctgttactccctcatcagtgtgtcacctggacaattcactgagctcgttctctctctctgtgtgtgtgtgtgtgtgtgtgtgtgtgtgtgtgtctatctgtctttctctttcattcttttccatttggccctgttctgtcccaacatgaaggcaataatttgttacctcattaatggatctatccttttagttttttaaccacttccctatgctacccatgaaacctagttggggctctgttgtgtctgatttcccctggcttattctttactttttcctccttttccaggctcagcagggagctgctggaggtagtagagcctgaagtcttgcaggactcactggatagatgttattcaactccttccagttgtcttgaacagcctgactcctgccagccctatggaagttccttttatgcattggaggaaaaacatgttggcttttctcttgatgtgggagaaattgaaaagaaggggaaggggaagaaaagaaggggaagaagatcaacgaagaaaagaaggagaaggggaagaaaagaaggggaagaagatcaaaacccaccatgccccaggctcagcagggagctgctggctgagaaagagcctgaagtcttgcaggactcactggatagatggtattcgactccttcagtttatcttggactgactgacccatgccagccctgcagaagtgccttttacgtattggagcaacagcgtgttggcttggctgttgacatggatgaaattgaaaagtaccaagaagtggaagaagaccaagacccatcatgccccaggtaactttgagcaattacggatgcttaattctgtgttgacacctggagatgccaggtccagggaaaacaagagtgtgttcaatttcatgttttcaacgaaggttgaattactcctactgacattgctgttggttttcattgcagtagatgtttaggtttccatttcttcctccccttatcatttactcacttactataggttgaccatacctcaaaggctgtatggcaactgcatggaatcttgagcaagtttatggaaaattattgagcccactcttttcatgatcactgttcgctgtgtgtcccgagggcactaactcagagtgtcctttgaccccttcatcagtgtgtcacccggccaattcgctgagctcactttctcctctctctctctctccctctccctgtctttctctttcattcttttctacctggccctggtctatcccaacataaaggcaataattcattacctcattaatggatctgtcctttttctttttgaacagttccttatgttagccatgaaatctagctggggctgtgtggtttctgattccccctggcttattctttactttttcctacttttccaggctcagcagggagctgctggatgagaaagagcctgaagtcttgcaggactcactggatagatgttattcgactccttcaggttatcttgaactgcctgacttaggccagccctacagcagtgctgtttactcattggaggaacagtaccttggcttggctcttgacgtggacagaattaaaaaggaccaagaagaggaagaagaccaaggcccaccatgccccaggctcagcagggagctcctggaggtagtagagcctgaagtcttgcaggactcactggatagatgttattcaactccttccagttgtcttgaacagcctgactcctgccagccctatggaagttccttttatgcattggaggaaaaacatgttggcttttctcttgacgtgggagaaattgaaaagaaggggaaggggaagaaaagaaggggaagaagatc

SEQ ID NO: 134212 - DNA, 7580 bp, Homo sapiens
atggaggaggtagaagaggacagattcaaggaaaatttggaaggcgcgctggctgggcagctcctgggagatgaagcgacgcaggcgctccaggtactggctgtagagctcgatgtcgttgtgcccggcgccctccacccacagcggctccaccgccttggggcagcgctcgtagagcgccagcccgtgcgagaagtcgatcacctcgtcctccctgccgtggatgatgagcacgggagacgtgatcttggacaccttctcgatgttagggaaggcgtcgaagcagtaggtcttcttggtgtcgcggaaggcgacgcgcatgcccgaggtgagcggcgagtgcagcaccaccgcggcacactcgtagcgcgaggccaggtccatggtgggcaccgtgccgatgctctgcccgtacaggatgatgctgtccgggctgatgccgtacctggcggcgccggagcagggtcagccgcggcctccaacgcgcgcgcacccttcccaccagcgggcgtccccgggcccagctccggatgcgaccctccagtctccccactcagccaagtcagtgcacactgggaactgtgtggcccccacatcctgaatgcttcataccttcctgcccgggttagaaagccgttcctggtgcactggccaggacagcggacactcttcctccctgcagcccttgcccacccccttggccatgaggaattcaggcagctgtgtccccaaatgtctccacccaattttggactctcggagtccccacgcccagtgagatgccagtgcaacccaggtcagcatcgagggtggtggctgcggaggtggcaccccctcccaccagcaccttcccttgggagtggacaagtcctcggccacctcagcaccaccagctcccacccaggggcaccctcacccccaggtcattggtgtgcggcccctgacccagctgatccagcaccagttacaaggcctcctcgtgcccagtcccaagcacgcgggacccacctgccaccctgcccatgccgggaccccacaactctcctcccacacgctctaggctctgatcccaggcagacgccctcttgcaaggcaggagcatgggcaggcaggagcccccagctgccacctggatgtcaccactcaaacgaacgggacacatccccagtggaggccctgggcacgctctggcctccccctcatggctctgggcctaggttcctgcaggacaaaggggcagcaggacagatggccgagcagacagagctcagagctggccatggcaggatggccaagctccgcagccacagggcctcatgggccagtcctccggacctggatgcagcagcctcgcctcacttggccccaagtgctgcctcagccgatgggctcccagccacacgtgcacagacccccagaccaccacccactccctcccgccaggctgagctgcccccagggtcgccctcacctggtgcgcagggcctgccaggtggcgtcgatgtcggcatagaggttcctctcggaaggcctgcccgagctggcaccgtagccggaggagtcgtaggtgaagatgttgcagtggaggcgggagcccaggccaatgtagaagctgctcatctggcccaggtccacggcattgccgtgcgagaagaggaccgtgtacctggcaccaggcacgcagcgaacatacatgcaggagacacggttgccgcgggcgctcttggtggggaagacctcgatggtgtccagctcgcgctggctgtactggaagtcggcacgctccgtcagggcttctggtggactctccgaggcaccgatgtagaaacttacccattcagtgcaccaagagcagcttcacatggtgtgggccgacatgaagagctgccagatccaacaggaccttgtggtggacgccttctttcactgaccattcatggggtgactattaggtaccatgccctgctctgggctagaggccccataatgagtaaatctcaggtcctgggggagtgggagccagtgcaaggagggaagtccagtgagaatgacaaatggacgatgtcagacccaggggctgaggcccccacctgcagccgggcagcttctggagtggacaaggagcagcagggaaggtggcaagggctctggaacagccacataaagcccttgaagataaggatggtcaaacaaaataatatcatacctggagaaactcagatcttgctaagatttactggttgggaatccaaagttaatgccaagaagcagctgccagttgggatcaaatgtgagcctatggatcaagaaaatgagcaaacaggtggccatgaaacagatggtcatagaattgtttcagtgcttatccactttccactcatttccatcctgtcttacgccacttggggcttgtcccttctagaatgcatccctggctcccctgtgtgcacacttctagttaggtttagcaatgtgggcacccgatggagcctggaagtgagaggaagcccatgtggttttggcagcaataaggtgtgtggggtaatgactcctgaaattaaaatggtgtgtgtatgtgaaggaaaggcgggcaaagctgtggggagcggtggagtggaaggaacaaaggaggtcagtactgggaacgctgaaggtcccgtccgccacgaggctgtagatggaggtgtccacctggcctttgcgttgctgcaggggctcctctggtcgctgctgctggggccgcctgggctggcgggttggggaggcggagagctcgatgcagtccctgactccacctcttctgccacaaacgtcagcatggtggtatcagccgggcccttggttcaagtaagaagccagagatgaacattctagaaatcagcgagacgttgcgcccccagctggcagagaagaaacagcagttcagaagcctcaaagagaaatgttttctaactcaactggccggcttcctggccaaccgacagaagaaatacaagtatgaagagtgtaaagacctcataaaatttatgctgaggaatgagcgacagttcaaggaggagaagcttgcagagcagctgaagcaagctgaggagctcaggcaatataaagtcgtagttcactctcaggaacgagagctgaaccagctaagggagaagttacgggaagggagagatgcctcccgctcattgtatgagcatctccaggccctcctcactccggatgagccggacaagtcccaggggcaggacctccaagaacagctggctgaggggtgtagactggcacagcaccttgtccaaaagctcagcccagaaaatgacgaagatgaggatgaagatgttcaagttgaggaggctgagaaagtactggaatcatctgcccccagggaggtgcagaaggctgaagagagcaaagtccctgaggactcactggaggaatgtgccatcacttgttcaaatagccacggcccttgtgactccaaccagcctcacaagaacatcaaaatcacatttgaggaagacgaagtcaactcaactctggttgtagacagagaatcctctcatgatgaatgtcaggatgctctaaacattctcccagtccctggccccacctcttctgccacaaacgtcagcatggtggtatcagccggccctttgtccagcgagaaggcagagatgaacattctagaaatcaatgagaaattgcgcccccagctggcagagaagaaacagcagttcagaaacctcaaagagaaatgttttctaactcaactgtccggcttcctggccaaccaacagaagaaatacaaatatgaagagtgcaaagacctcataaaatttatgctgaggaatgagcgacagttcaaggaggagaagcttgcagagcagctcaagcaagctgaggagctcaggcaatataaagtcctggttcacgctcaggaacgagagctgacccagttaaaggagaagttacgggaagggagagatgcctcccgctcattgaatgagcatctccaggccctcctcactccgtatgagccggacaagtcccaggggcaggacctccaagaacagctggctgaggggtgtagactggcacagcaccttgtccaaaagctcagcccagaaaatgacaacgatgacgatgaagatgttcaagttgaggtggctgagaaagtgcagaaatcatctgcccccagggagatgcagaaggctgaagaaaaggaagtccctgaggactcactggaggaatgtgccatcacttattcaaatagccatggctcttatgactccaaccagccacataggaaaaccaaaatcacatttgaggaagacaaagtcgactcaactctcattggctcatcctctcatgttgaatgggaggatgctgtacacattattccagaaaatgaaagtgatgatgaggaagaggaagaaaaagggccagtgtctcccaggaatctgcaggagtctgaagaggaggaagtcccccaggagtcctgggatgaaggttattcgactctctcaattcctcctgaaatgttggcctcgtaccagtcttacagcagcacatttcactcattagaggaacagcaagtctgcatggctgttgacataggcagtgagtactccattgtgaaggtgataaagctccagttcatggcccaggccagtgtcacccttgtctacctctcagtgaaagatgtgacccaggtttcactgaatttattcccattttctgtgtcttctaagttcgcttgttttagctcatctgtccgtcatgttcctggacatcggtgggatcaagtgaaaaaggaggaccaagaggcaacaggtcccagcagggagctgctggatgagaaagggcctgaagtcttgcaggactcacaggatagatgttattcaactccttcaggttgtcttgaactgactgactcatgccagccctacagaagtgccttttacatattggagcaacagcgtgttggcttggctattgacatggatgaaattgaaaagtaccaagaagtggaagaagaccaagacccatcatgccccaggctcagcagggagctgctggatgagaaagagcctgaagtcttgcaggactcactggatagatgttattcgactccttcaggttatcttgaactgcctgacttaggccagccctacagcagtgctgtttactcattggaggaacagtaccttggcttggctcttgacgtggacagaattaaaaaggaccaagaagaggaagaagaccaagacccactcatgccccaggctcagcagggagctgctggaggtagtagagcctgaagtcttgcaggactcactggatagatgttattcaactccttccagttgtcttgaacagcctgactcctgccagccctatggaagttccttttatgcattggaggaaaaacatgttggcttttctcttgacgtgggagaaattgaaaagaaggggaaggggaagaaaagaaggggaagaagatcaaagaaggaaagaagaaggggaagaaaagaaggggaagaagatcaaaacccaccatgccccaggctcagcagggagctgctgaatgagaaaagggcctgaagtcttgcaggactcactggatagatgttattcaactccttcaggttgtcttgaactgactgactcatgccagccctacagaagtgccttttatgtattggagcaacagcgtgttggcttggctgttgacatggatgaaattgaaaagtacaaagaagtggaagaagaccaagacccatcatgccccaggctcagcagggagctgctggcgtgagaaagagcctgaagtcttgcaggactcactggatagatgttattcgattccttcaggttatcttgagctgcctgacttaggccagccctacaagcaagtgctgttttactcattggaggaacagtaccttggcttggctcttgacgtggacagaaattaaaaaggacgaagaagaggaagaagaccaagacccaccatgccccaggctcagcagggagctgctggaggtagtagagcctgaagtcttgcaggactcactggatagatgttattcaactcctttcagtttgtcttgaacaggctgactcctgccagccctatggaagttcctttttatgcattggaggaaaaacatgttggcttttctcttgacgtgggagaaattgaaaagaaggggaaggggaagaaaagaaggggaagaagatcaaagaaggaaagaagagggggacgaaaagaaggggaagaagaggaaaacccaccatgccccaggctcagcagggagctgctggatgagaaagggcctgaagtcttgcaggactcactggatagatgatattccactccttcagggtggcttgaactgactgactcatgccagccctacagaagtgccttttacgtattggagcaacagcgtattggcttggctgttgacatggatgaaattgaaaagtaccaagaagtggaagaagaccaagacccatcatgccccaggctcagcagggagctgctggatgagaaagagcctgaagtcttgcaggactcactggatagatgttattcgactccttcaggttatcttgaactgcctgacttaggccagccctacagcagtgctgtttactcattggaggaacagtaccttggcttggctcttgacgtggacagaactaaaaaggaccaagaagaggaagaagaccaaggcccaccatgccccaggctcagcagggagctgctggaggtagtagagcctgaagtcttgcaggactcactggatagatgttattcaactccttccagttgtcttgaacagcctgactcctgccagccctatggaagttccttttatgcattggaggaaaaacatgttggcttttctcttgacgtgggagatcctagatgtagagccaaaggagatggcaacccagaaataccaacggctacagatccaacaaaccccaatacgatcctgctctctctaggcaaaggatcagcaaagaggcagtctagcaagacaagacacttatatacgatcatcagtttcctcagtgtctgccctccaacctgcgggggctgcggctgccacggttccacgctgggtggacgctgcctgcccgggatccaagagccgccgttgcaggcgggagttggggagtcgtgtgcagcacattctctcatggaatggcagagcaagaccaactttacccgcctctcctccgtgtctcccatacgacatgaggacgtaaatcaagagcttgagaccacccaggatccccagggaatgggaagtgtggaggaagagctgccctgtgatggagaccagggcacctggacttacaagtggcagctggcggtgaggttggcggagcagcggaggaaggggctcgtcgagcgcagctactacctcctcgtccctgttccagttgctggggacacagtagtgcacaacacaggccgttcctgccctctcagaggctgcgtcctcctgggcgaggcaggcagtgacagcccagagacgctgccttcccacaaggcgacctga

SEQ ID NO: 134213 - DNA, 5025 bp, Homo sapiens
gtaaaagggaaaccatcagtcccatagtcctaggggccttcccgactgtacaagaaatcactacttcatgccccagtgcagtgttttagaggagaggctgcaaggcttgggaaagtggccccgcattcagagtcagacctcaggggctgtgagttctgactccgcttcgttgtggttgaatcatcttgtcaacttccttgacgcgcccttgagtttctctttcttcatctttaaattttggaggatcagatgccagaaagtcaggagactgaagagtaaagatgtggaaatccctgtctagaccctggtactggggagagttttgtccttgggatggacctggctcctgccctgtaggcagtgaccacagcagcatgtccagccttccactgaggcaggcgtgtctgtcttttctcagaggatgaagagtgtaaagacctcataaaatttatgctgaggaatgagcgacagttcaaggaggagaagcttgcagagcagctgaagcaagctgaggagctcaggcaatataaagtcctggttcacgctcaggaacgagagctgacccagttaagggagaagttgcgggaagggagagatgcctcccgcttcattgaatgagcatctccaggccctcctcactccggatgagccggacaagtcccaggggcaggacctccaagaacagctggctgaggggtgtagactgacacagcaccttgtccaaaagctcagcccagaaaatgacaacgatgacgatgaaggtgtttcaaagttgaggtggctgagaaagtgccaaaaatcgtctgcccccagggagatgcagaaggctgaagaaaaggaagtccctgaggactcactggaggaatgtgccatcacttgttcaaatagccatggcccttatgactccaaccagccacataagaaaaccaaaatcacatttgaggaagacaaagtcgactcaactctcattggctcatcctctcatgttgaatgggaggatgctgtacacattattccagaaaatgaaagtgatgatgaggaagaggaagaaaaaggaccagtgtctcccaggaatctgcaggagtctgaagaggaggaagtcctctcagacgccctggcatgaatgactttcgcatctctcaatcctttctgaaatgttggcctcgtacaagtcttacagcagcacatttcactcattagaggaacagcaagtctgcatggctgttgacataggcagacatcggtgggatcaagacgacctgggacgaccatgaggcaacaggtcccatgctcagcagggagctgctggatgagaaagggcctgaagtcttgcaggactcactggatagatgtcattcaactccttcaggttggcttgaactgactgactcatgccagccctacagaagtgcctttttacattattggagccaacagcgtgttggctgggctcttgacatggatgaaattgaaaagtaccaagaagtggaagaagaccaagacccatcatgccccaggctcagcagggagctgctggatgagaaagagcctgaagtcttgcaggactcactggatagatgttattcgactccttcaggttatcttgaactgcctgacttaggccagccctacagaagtgctgtttactcattggaggaacagtaccttggcttggctcttgacgtggacagaattaaaaaggaccaggaagaggaagaagaccaaggcccaccatgccccaggctcagcagggagctgctggaggtagtagagcctgaagtcttgcaggactcactggatagatgttattcaactccttccagttgtcttgaacagcctgactcctgccagccctatggaagttccttttatgcattggaggaaaagcatgttggcttttctcttgacgtgggagaaattgaaaagaaggggaaggggaagaaaagaaggggaagaagatcaatgaagaaaagaaggagaaggggaagaaaagaaggggaagaagatcaaaacccaccatgccccaggctcagcagggagctgctggatgagaaagggcctgaagtcttgcaggactcactggatagatgttattcaactccttcaggttgtcttgaactgactgactcatgccagccctacagaagtgccttttacatattggagcaacagcgtgttggcttggctgttgacatggatgaaattgaaaagtaccaagaagtggaagaagaccaagacccatcatgccccaggctcagtggggagctgttggatgagaaagagcctgaagtcttgcaggagtcactggatagatgctattcaactccttcaggttgtcttgaactgacttgactcatgccagccctacagaagtgccttttacatattggagcaacagcgtgttggcttggctgttgacatggatgaaattgaaaagtaccaagaagtggaagaagaccaagacccatcatgccccaggctcagcagggagctgctggctgagaaagagcctgaaagtcttgcaggactcactggatagatgttattcgactccttcagggttatcttgaactgcctgacttaggccagccctacagcagtgctgtttactcattggaggaacagtaccttggcttggttccttgacgtggacagaattaaaaaggaccaagaagaggaagaagacgaagaccaaggcccaccattcccccagggctcagcagggagctgctggaggtagtagagcctgaagtcttgcagggactcactggatagatgttattcaactccttccagttgtcttgaacagcctgactcctgccagccctacggaagttccttttatgcattggaggtaaaaacatgttgggcttttctcttgacgtgggaggaaattgaaaagaaggggaaggggaagaaaagaaggggaagaagatcaacgaagaaaagaaggagaaggggaagaaaagaaggggaagaagatcaaaacccaccatgccccaggctcagcggtgtgctgactggaagtggaagagcctgaaatcttgcaggactcactgggatagatattattcgactccatcaatgtactttgaactacctgactcattccagcactagagaagtgtgttttactcatttgaggaacagcacatcagctttgcccttgacatggacaataggttttttcactttgacggtgagaagtctccacctggtcttccagatggggagtcatattcccacaataaggcagcccttacttaaggccgagaggtgttcatttcctggcagggcagggacctattagggcacgtggaagattttgaattgaaactatagttccatttgggaagccccagacattagggtggggtcagtggggcatggctctatcccctattctcaaaccatgccagttgcaaccttgtgcttcagtctggaagacaatgggacccacgttaggtgtgacacattcacataactgtgccagcacatgccgggagtgyatcagtcggtacattttaatttgaaccacgtatctctgggtagctacaaaattcctcagggatttcattttgcaggcatgtctctgagcttctatacctgctcaaggtcagtgtcatctttggtgtttagctcatccaaaggtgcttaccctgggtttcaatgaacctaacctgcattctttgtgtctttcagtgttgggcttgttttaggctgatccatctgttaacacagggaggggatccttgggctgagggattgtattttcaggaaccacccaactggcttctttacaattgtttaacccgctagggctcctttgggttagaggaaggccacagtccttcagcctcccaattgggtgtcagtacttagggaagaccacagctaggatgggaccaaacagccattggggaggccttagcccctgctcctctcaattccatcctgtagagaacaggagtcaggagccgctggcaggagacagcatgtcacccaggactctgccggtgcagaatatgagcaatgccatgttcttgcagaaaacgcttagcctgacgtttcataggaggtaatcaccagacaactgcagagtgtagagcactcgggcaggacagctgacctgtctccttcacatagtccatgtcaccacaaatcacacaacaaaaaggagaaagagatattttggggttcaaaaaaaagtaaaaagataatatagctgcattttctttggttattttgggccccaaatatttcctcatctttttgttgtttgtcatgggtggtggtgacatggacttgtttatagaggacaggtcagctctctggctcaatgatctacatttctgaagttgtctgaaaatgtcttcatgattaaattcagcctaaacttttttgacggggaacactgccagagacaatgctgtgagtttccaaccctcagcccatcttscgggacagagaaggttctagtttgtcccatcaccattatgatatcaggactggttacttggttaaggaggggtctaggagatctgtccccttttagagacacttaccttataaatgaagaagtacttgggaaagcgggttttcaagagtataaatatccctgtattttaatgatcattcctctaaacattttatcatttattaatcctccctgcctgtgtctattattatattcgatatctctacactgcaaaatttggggtctcaatttttactgtgcctttgtttttactagtgtcctgctgttgcaaaaagaagaaaacattctctgcctgagttttaatttttgtccaaagttaattttaatctatacaattaaaaccttttgcctatcaaaaaaaaaawwttttttytcttgttttggagcttcaagactttgcatttcctagtatttctgtttgtcagttctcaatttcctgtgtttgcaatgttgaaattttttggtgaagtactgaacctygcttttttccggtttctacatgcagagatgaatttatactgccatct

SEQ ID NO: 134214 - DNA, 641 bp, Homo sapiens
  misc_feature (1)...(641): n = a,t,c or g
ggcacgagagcaaaggcattcattgttaaccttatacccagggctgctgcccagttctgtaaacgcagcccagctaaagctctgctgtctcaagtgtgcatttatacccaggtgatttggacggagcagctaccatggcgtggacgccttcactgaactccgggctgcagtgcagggagctcaaagcagtgctgctaccaaacagtttttaactttgaacaactgtgtcaggcaatggatttgaattttaagtgtattaatagctgtgctctgtgtcgtaggcaaaattccactgaaggagcctctgtgccctgcagccggcagcgcggctgaagcatgtgttggccaaggaatgcctgtcatccaggtgccctgcagccagcagcggncttcaagcatgtgttggccaaggaatgcctgtcagtcatccagggctctgggaggggacgagagttatgtccccaagaacaggaagtcctttacaaagcatccagtctcttcctgtcctccccttccctaggctggggtaggggttagagactggtggcccagggaggtcacctggccttgccctgggatttccctctttcagtgggccagcaggatttgggcagggcaccagttcgccaaggttctggggc

SEQ ID NO: 134215 - DNA, 503 bp, Homo sapiens
caatagagacctctagtagagagccgtggaattccgcgaagcccagccgcttcattttcgactgcgtgtcccaggaatacggcatcaatcccgagcgcaccgtcatggtgggagaccgcctggacacagacatcctcctaggcgccacctgtggcctgaagaccatcctgaccctcaccggagtctccactctaggggatgtgaagaataatcaggaaagtgactgcgtgtctaagaagaaaaaggtccctgacttctatgttgacagcatagccgaccttttgcctgcccttcaaggttaaagattgagtgtctttaatctgcagaataaaaaataagaaattgaaaaccagttacccaaattaataggcggggcttaagcatctgctcggctaagtggcttctaagagtgtacttggagttaagcaaaggcattcattgctaaccttgtaagtacacgtttgggggaccattttgtttacagaagctcggaatcgaacacg

SEQ ID NO: 134216 - DNA, 513 bp, Homo sapiens
ttttgccaggtggaagggtttattagtccctgccagcagctgtcctccctggtgcaggtggcctggccagcccactggattggggacgggccaggctgggccaggtcgggggctcagtctgggaggtaataaaagcagaccgacacgcagatgttgctcgggaagcagatgtcgatgcagagataaatcagccgctgtctccggggcccctctgctcgccgggcccagtagatgggggtcctcatgcacaggcgctgcaccaaagcccccgcctgggcggtagccacttacgaggctcccctgcactgccagcagctcctgggtgtggtgggtgtcctggctggggacccaagcctcttggaccttggaggtatccaccagcagccgcagggtctcccgatcactgtcctccatcaggcggaggaagcagacctggtgctcctcagggcggtaacagatgcagccgctctgcccgtcgaacagcaccgcccagctgtggttgctctgaggtgg

SEQ ID NO: 134217 - DNA, 1593 bp, Homo sapiens
  misc_feature (1)...(1593): n = a,t,c or g
tcagtctgggaggtaataaaagcagaccgacacgcagatgttgctcgggaagcagatgtcgatgcagagataaatcagccgctgtctccggggccctgtggcgagggtgccgtgaatctccaagggctccgcccccagctcctcaaaccatcccgagggcctggccttcccccacagcggtcctgactcaccctctgctcgccgggcccagtagatgggggtcctcatgcacaggcgctgcaccaaagcccccgcctgggcggggtccacttcgaggctcccctgcactgccagcagctcctgggtgtggtgggtgtcctggctggggacccaagcctcttggaccttggaggtatccaccagcagccgcagggtctcccgatcactgtcctccatcaggcggaggaagcagacctggtgctcctcagggcggtaacagatgcagccgctctgcccgtcgaacagcaccgcccagctgtggttgctctgaggtggggtcactgtgatggtcgccgcgttccgggccacgtccaccaggatggtttggttgggccggggcatgtgggggctcgggagggtcattcgcagcgtctgcagccttggcttgggagggccctgagcagagccaagaagccctccagccacaatccccacagcggccagcaccagcagcagcagcagcaggagcaggcccacggctctccagcccccgcaggagggcttggtcttcacctggatgacaggcattccttggccaacacatgcttcagccgcgctgccggctgcagggcacagaggctccttcagtggaattttgccttgaagggcaggcaaaaggtcggctatgctgtcaacatagaagtcagggaccattttcttcttagacacgcagtcactttcctgattattcttcacatcccctagagtggagactccggttgagggtcaggatggtcttcaggccacaggtggcgcctaggaggatgtctgtgtccaggcggtctcccaccatgacggtgcgctcggggttgatgccgtattcctggggacacgcagtccgaaaatgaagcggctggggcttcccgatgatgtcggcctgggcnctggcgcgggccaaattttttcctttttccacccaacccggggggggnnttcggccagacacccggtacgtcgggctccagcggcgcgtgcagccagtcgccgggaccctcgcccctgcagtggctcgggccccacgcccacgctggcgacgcccacggcctccagctccgcggccagggctgggctgcccagcacgtaggccttgggcgcgggggcgccggccaggcgctggcgcaggtagagcgcggtgcagtaggccgtgccgaagacctccaggctggcgccgggccccgcggggccgccgaagcccaggcgccgcagcttctcggcgtaggcagcgcgggtcttgctgctgttgttggtgatgaagcccaggcggccgtcgcagtcgaacagcagcgtgtccacgtcggccagcagcgcctgtgcccgctcggcgctcagccgcacgcagcgggcgtcgtcgccaccggcctccgccgccgccat

SEQ ID NO: 134218 - DNA, 619 bp, Homo sapiens
  misc_feature (1)...(619): n = a,t,c or g
gcggccgcgggggcgggcgttctggaacgtttggcggccgggggagctgagggggctattcgaacggggcggcgggaagccgtgacgtcacgcggccgggcattgttctcggggccgggcgggcccgcgagtcctgggactgcggcccgcctctattcgtgcgtctccgtctccgcaggtcagctccgccgaaggcgccgccaaggaagagcccaagaggagatcggcgcggttgtcagctaaacctcctgcaaaagtggaagcgaagccgaaaaaggcagcagcgaagattcttcaaacacctaaatgaaagtgataaattcaaaactgatccttttagttcctcattatatgatatgaagggattaactgtagcaggatagtcaacctgaccgtacggcatggtgcttttttcangataaatcttcagacaaaaaagtgcaaaccaaagggaaaaggggagcaaagggaaaacatgcncgcagtggctaaccaagaaactaaagaagacttacctgcggaaaacgggaaacgaaactgaggagagtncagcctctgatgagcangagaggaagagccaagtctgataataacatatacatgcttatcatggtccctg

SEQ ID NO: 134219 - DNA, 930 bp, Homo sapiens
atggagagtccctggaggcagtggagacttcgaaaagttgccaggagtgggggaggacgcctgagcaacaagaggaaactccatctaaaaaaaaaaaagaaaggagaaagaggaggaggaggagcagaaagagaaaaagcagcagcagcagtagctccaggctgcaaagctggtgcagggaatgcaaaaaagtttgttcagaatggtccagggacaaaggagagctctgcttctcaggtgccgacaggaccctcagctgcaggtctgttggagtttgctagaggtccactccagaccctgtttgcctgggtatcagcagcggtgtctgcagaaccacggattttcatgatccgcgaatgctgctgtctgatcgttcctctggaagttttgtctcagaggagtacctggccatgtgagtttttgatctcagactgctgtgctagcaatcagcaagactccatgggcgtaggaccctccgagccaggtgcaggatataatctcctggtgcgccatttcctaagcccgtcggaaaagtgcagtattcgggtgggagtggcccgattttccagggttctcccaccgccccttctggggatctcagcagctcgggcggcgggaggagcggcacgacaggcagcccagcttcgcgaaggctctcggtgcccgcggctcacagacatcccgcacgcaccctccacgccgccagagcaaggtcactccgcggaaggggccgccaaggaagagcccaagaggagatcggcgcggttgtctgctaaacctgctcctgcaaaagtggaagcgaagcgaaaaaggcagcagcaaaggataaatcttcagacaaacaagtgcaaacaaaagggaaaaggggagcaaagggaaaacaggccgaagtggctaaccaagaaactaaagaacatttacctgcagtaa

SEQ ID NO: 134220 - DNA, 533 bp, Homo sapiens
gcggccgccgtcagacatccacgacagcgatggcagttccagcagcagccaccagagcctcaagagcacagccaaatgggcggcatccctggagaatctgctggaagacccagaaggcgtgaaaagatttagggaatttttaaaaaaggaattcagtgaagaaaatgttttgttttggctagcatgtgaagattttaagaaaatgcaaaagtggaagcgaagctgaaaaaggcagcagcgaaggataaatcttcaggcaaaaatgtgcaaacaaaagggaaaaggagagcaaagggaaaacaggccaaagtggcaaaccaagaaactaaagaagatttacctgcagaaaacggggaaatgaaaactgaggagagtccagcctctgatgaagcaggagagaaagaaaccaagtctgattaataaccatataccatgtcttatcagtggtccctgtctcccttcttgtacaatccagaggaatatttttatcaactattttgtaaatgcaagttttctagtagctctagaaacat

SEQ ID NO: 134221 - DNA, 1623 bp, Homo sapiens
tcactcaaaggcggtaatacggttatccacagaatcaggggataacgcaggaaagaacatgtgagcaaaaggccagcaaaaggccaggaaccgtaaaaaggccgcgttgctggcgtttttccataggctccgccccccggctccagatttatcagcaataaaccagccagccggaagggccgagcgcagaagtggtcctgcaactttatccgcctccatccagtctattaattgttgccgggaagctagagtaagtagttcgccagttaatagtttgcgcaacgttgttgccattgctacaggcatcgtggtgtcacgctcgtcgtttggtatggcttcattcagctccggttcccaacgatcaaggcgagttacatgatcccccatgttgtgcaaaaaagcggttagctccttcggtcctccgatcgttgtcagaagtaagttggccgcagtgttatcactcatggttatggcagcactgcataattctcttactgtcatgccatccgtaagatgcttttctgtgactggtgagtactcaaccaagtcattctgagaatagtgtatgcggcgaccgagttgctcttgcccggcgtcaatacgggataataccgcgccacatagcagaactttaaaagtgctcatcattggaaaacgttcttcggggcgaaaactctcaaggatcttaccgctgttgagatccagttcgatgtaacccactcgtgcacccaactgatcttcagcatcttttactttcaccagcgtttgcataagtcggtgtatgtcagccgtgatggtgatggcagtgctgaccattgcatgcagatttcttaaaatgacagtgtctgttggccacatatgcagtctgaactttgctttgcagacatccacgacagcgatggcagttccagcagcagccaccagagcctcaagagcacagccaaatgggcggcatccctggagaatctgctggaagacccagaaggcgtgaaaagatttagggaatttttaaaaaaggaattcagtgaagaaaatgttttgttttggctagcatgtgaagattttaagaaaatgcaagataagacgcagaatgacttggttgagtactcaccagtcacagaaaagcatcttacggatggcatgacagtaagagaattatgcagtgctgccataaccatgagtgataacactgcggccaacttacttctgacaacgatcggaggaccgaaggagctaaccgcttttttgcacaacatgggggatcatgtaactcgccttgatcgttgggaaccggagctgaatgaagccataccaaacgacgagcgtgacaccacgatgcctgcagcaatggcaacaacgttgcgcaaactattaactggcgaactacttactctagcttcgcggcaacaattaatagactggatggaggcggataaagttgcaggaccacttctgcgctcggcccttccggctggctggtttattgctgataaatctggagccgactttacgaaacacggaaaccgaagaccattcatgttgttgctcaggtcgcagacgttttgcagcagcagtcgcttcacgttcgctcgcgtatcggtgattcattttgctaaccagtaa

SEQ ID NO: 134222 - DNA, 1368 bp, Homo sapiens
  misc_feature (1)...(1368): n = a,t,c or g
ccgcccccgctgtgggtctcagcagctcgggcggcgggaggagtggcagcggcaaggcagcccggtttcgcgaaggctgtcggcgcgccgcggcccgcaggcacccggcacgcgccttccccgcaggcacccggcacgcgccctccctgccgccaggatgcccaagaggaaggtcatctccaccgaaggggccgccaaggaagaancccaagaggacatcggcgagtttgtcagctaaacctcctgcaaaagtggaagcgcagccaaaaaaggcagcagcgaaggataaatcttcagacaaaaaagtgcaaacaaaagggaaaaggggagcaaagggaaaacaggcccgaagtggctaacccaagaaactaaagaagacttaccttgcggaaaacggggaaacgaagacttgaggagagtccagcctcttgattgaagcaggagagaaaagaagccaagtctgattaataaccatataccatgtcttatcagtgggtccctgtctcccttcttgtacaatccagaggaaatatttttatcaactattttgtaaatgcaagttttttacgtagctctagaaacatttttaaagaaggagggaatccccccctcatccccatttttttaaagtgtaaatgctttttttttaagaaggtgaaatcatttgcctggttgtttattttttggtacaaccagaaaaatagtgtggggatatttgaatttatggggaggctctgactgtctccgggtgtccagcttaaccattcccacagatgggggggttagttttttatatccctataaatccaaagcatatttaaatgggccactctggagtccagtccctgccatttaatgtccttgaaccattttaaattacttcctattacccatgttggttttttaggtaggaattggtttccctaaagggaaaccccactcttttgaaaacatggctcttctctgcccaagaattggggtgccactctgtaaccatctttggttgtggtagtcccgggtttccctaataactttggttactgtgctgtgaaaggattacaggatttggaccatgtagtgtacgtgctatctgcagttgtgacttggtggggccgtaatgtaacagctgaccaaccgtgaagatactgggtactttgatagcctcttaaggaaaaatttgcttcccaaattttaagctggaaagtcactggaataactttaaaaaaggnaattacaatacatggctttttagaatttcgctacgctcatgttaagatttgtgtacaaaattgaaaagtctctactgatcctcaacacaataaaatctcagccatgaaaatattttgaagcacatggaaaaaaaaaaat

SEQ ID NO: 134223 - DNA, 3632 bp, Homo sapiens; identical to SEQ ID NO: 121813
  misc_feature (1)...(3632): n = a,t,c or g

SEQ ID NO: 134224 - DNA, 2679 bp, Homo sapiens
atgtaccaagaattaaaagatgaagatgatgaagatgattgtttcatacttgagaaagcagctagagggaaaaggcctatttttgaatgtttttggaatggacgattaataccatatacatcagttgaagactttgactggtgtactcctcctaagaagagagggcttgcaccaattgaatgctacaataggatatctggtgcattattcactaatgacaaattccaggtcagcacaaataaattgacgtttatggatcttgagctaaaattgaaagataagaacaccctttttacaaggattttaaatggacaggaacagcgaatgaaaattgacagagaatttgctttgtggctgaaggactgtcatgagaagtatgataaacaaataaaatttacactttttaagggagtaattacacgtcctgatcttccttctaaaaagcaaggtccctgggcaacatatgcagcaatagaatgggatggaaagatatacaaagcaggacagctggaacctcaggcactatatgatgaagtaagaactgtgccaattgcaaagctggataggacagttgctgagaaagctgttaaaaaatatgtagaagatgaaatggcaaggctccctgatagattgtcagtaacttggcctgaaggagatgaattattgcctaatgaggttaggcctgctggaacccctattggtgcgttaagaattgaaatactgaataaaaaaggggaagcaatgcaaaagcttccaggaacaagccatggagggtcaaagaaactcctggttgagctcaaagttattttacattatcttcttcagcagtatcgttctgctgtgtgcaaactagacagtgtgaataaggatcttaacagtcaattagagtaccttcgcactccggatatgaggaagaaaaagcaagaacttgatgaacatgagaaaaatctcaaactaatagaggaaaaactaggtatgactcccatacgtaagtgtaatgactcattgcgtcattcaccaaaggttgagacgacagattgtccagttcctcctaaaagaatgagacgagaagctacaagacaaaatagggcacaagcaccagcccttgcaggggttgcaaggcagttctcaggccccgaaggaatgctccagggaggagcagagcaaccactgccatgccaaagatccagcatggggaaagtggggtcgctagggctccacaacctggcaggtgatagtgggacccggttctctacagttttgacctggttggattccctcctaccatctgctgctggcagcaagctgaaacagccagccaagtcacaggcagtctgtcctcagattgtgaatctgtctcaggctgcaaaacgtttctgtgcagcccgctgtgacttaggatcgggaatggctgccttctatttgtaccacccaggtctgggagtatgggtggagcacttcccactgttcccaatgctctccaagtcagatccagtgcttgaaaatattcagaagttggggaattataccttgaaattacaagttgtgttgaatgaaagtaatgcagacacttatgcaggaagaccactaccatctaaagcaattaagttttctgttaaagagggtaagccagagaaattttcatttggtcttctggatcttccttttcgtgttggagttccatttaatatccctctggagtttcaggatgaatttggtcataccagtcaactagtaactgatattcagccagttcttgaagcaagtggtttatctttacattatgaagaaataaccaaaggaccaaattgtgtaattcgaggtgttacagccaagggccctgtaaactcttgtcaaggcaagagttgtaaagatgtggcacctgtggagaagactattaagttgcttcccagtagccatgttgcaagactacaaatattcagtgtagaaggacaaaaggcaattcagatcaaacatcaggatgaggttaattggatagcgggtgatattatgcataatcttatttttcaaatgtatgatgaaggagaaagagaaatcaatataacatcagctttagcagaaaaaattaaagttaattggactcctgagattaacaaagaacacttgctacagggtctgcttcctgatgtgcaagtaccaacatctgtaaaagatatgcgctattgccaggtttcattccaagatgatcatgtgtctttggaaagtgcgtttacagtaagcatgttggaactacttcaattaatggtgtcactaaagacttctaacttgttaaacaatttcagaccacttcctgatgaacctaaacatttaaaatgtgaaatgaaaggaggaaaaacagtacagatgggccaagagcttcaaggagaagtagttataataattacagatcagtacggaaatcagattcaagcattttcaccaagttctttatcttctttgtcaattgctggggttggacttgatagctcaaatttgaaaacaacctttcaggaaaacacacagagtataagtgtaagaggcatcaaatttattccaggtcctcctggaaataaggatctttgttttacttggcgtgagttttctgactttattcgagtgcaactaatttctggacctcctgctaaacttctccttatagactggccagaactaaaggag

SEQ ID NO: 134225 - DNA, 1470 bp, Homo sapiens
atgttttacaatgatgttaagaagcagcaacaaatggcagcacttacaaaagaaaaggaccaattatctcagtctattgttatgtataaaagtttatttgaagccagccaacagcttcttaatgaaatgaaatgtcaagttgaagaagcaagattaaaagaggcccaattgcgaaatgaactaaaaatacataatattgacattcctacaacacaacaggtgccacacattgaagcacttctgaaaagaaagctatcagaacaagaagaactgaagaaaaaacctagaagatcgtgtactcttccaaactatactaaaggcagtggagatgttttgggaaagagttgtaaagatgtggcacctgtggagaagactattaagttgcttcccagtagccatgttgcaagactacaaatattcagtgtagaaggacaaaaggcaattcagatcaaacatcaggatgaggttaattggatagcgggtgatattatgcataatcttatttttcaaatgtatgatgaaggagaaagagaaatcaatataacatcagctttagcagaaaaaattaaagttaattggactcctgagattaacaaagaacacttgctacagggtctgcttcctgatgtgcaagtaccaacatctgtaaaagatatgcgctattgccaggtttcattccaagatgatcatgtgtctttggaaagtgcgtttacagtaagcatgttggaactacttcaattaatggtgtcactaaagacttctaacttgttaaacaatttcagaccacttcctgatgaacctaaacatttaaaatgtgaaatgaaaggaggaaaaacagtacagatgggccaagagcttcaaggagaagtagaaaatattcagaagttggggaattataccttgaaattacaagttgtgttgaatgaaagtaatgcagacacttatgcaggaagaccactaccatctaaagcaattaagttttctgttaaagagggtaagccagagaaattttcatttggtcttctggatcttccttttcgtgttggagttccatttaatatccctctggagtttcaggatgaatttggtcataccagtcaactagtaactgatattcagccagttcttgaagcaaggcgtggcctgtttaagagcttgtcagcatctgtggccttcacccaaaggtctgaaattgattccaagtgggatgtcacggccacttctcttgatgtacaggatctaaaagcaacactgagaacagtggatgggcagctacatgctgaagtgtggctggaggatgtggcacctgggaagagaaagcacagggtgaccaaagtccttgaagagggaggggtgccggtgctgcaaaccagtgaaagcccaggtcaagggaagagcaggagaaaggatgtcagtcattcttgtgacttttgtaggagaacttgggccattaaaaaagaaaggaagtaa

SEQ ID NO: 134226 - DNA, 379 bp, Homo sapiens
cagctgtcctgctttgtatatctttccatcccattctattgctgcatatgttgcccagggaccttgctttttagaaggaagatcaggacgtgtaattactcccttaaaaagtgtaaattttatttgtttatcatacttctcatgacagtccttcagccacaaagcaaattctctgtcaattttcattcgctgttcctgtccatttaaaatccttgtaaaaagggtgttcttatctttcaattttagctcaagatccataaacgtcaatttatttgtgctgacctggaatttgtcattagtgaataatgcaccagatatcctattgtagcattcaattggtgcaagccctctcttcttaggaggagtacaccagtcaaag

SEQ ID NO: 134227 - DNA, 924 bp, Homo sapiens
atggttatagttgaagtcctgcctaatcaacctgtgaagttagtacctaaaattaaaccacctacaccagctgtttcaaatgttcgctcagttgccagtaggaccttggtcagagatctacatcttagtatcacgttttcaggtgctccaaaccttccagtctatgttgtagattgcagtagttctggaaccagtattttaacaggatctgcaattcaagttcagaatattaaaaaagaccagacgcttaaagcaagaattgaaatacctattgcacatctagcacaaattgaagatgatagagctgcgatggttatttcttggcatctggcaagtgacatggactgtgtagtcaccctaaccactgacgctgcacgtcgtatctatgatgaaacccaaggtcgtcagcaggtgttgccccttgattctatttacaagaagactcttccagattggaaaagatctctacctcatttccgaaatggaaaattgtattttaaacccattggagatccagtctttgctcgagacttgttaacatttccagataatgtagaacattgtgaaacagtatttggtatgctgttaggagacaccattattttggataatctggatgcggccaatcattatagaaaagaggacgttttgcagcctgagacagattcacaatctgaggacagactgcctgtgacttggctggctgtttcagcttgctgccagcagcagatggggcagagtacaggactgggacccgtggaagttacacagtccagcccatcatctaggacatcagagtacttctggttaacaaagcattttcgaaccaggaatttggctcatttgaatgctccctactttgtttcagccctcatcaccattttaaaacaggaaggaaagaagaaaacttactggcatgtttag

SEQ ID NO: 134228 - DNA, 726 bp, Homo sapiens
  misc_feature (1)...(726): n = a,t,c or g
tttcgtggaggctgagtctttcgcggctgcctgcgccctgcgggtagtcctcagaggccgaggcgggagagcagggctcgggtggcagcgggggaatctcccgaagagctgtgttctctctgtggaaagggccccgctgccttcccgcctctccaggatcccgactgagcttgtaggtgccgcgccggctgactgagccctctctggctgggtcgcagtggacgcggcgtgcgggaagcttcaggccggcggtactcgccgggcgcagagtccaccaaagcgagcacgtgggtccctctgccgagaaaataggcgctacgagagccggcgcccctttttcctcctcatttcttagtagtactgggtgggctccagcgtgggcccccgaggcaaagcgggtccgtgagaacgtcagaagggcgctctgtgacgtcacagcgtccccgccccccgcaccctctgggggccctggagcgccgacggcattcggggtacgggggtgactccagcgccctagttttaacgctgcctgcgcttcgcggtctcccacgtgcgtgtaaattngcaaaggattttgtccttcactggcataatattcatacatgccacttttaaccagtgtgtcatagtgaggtaagaagtcaattcgttctttcgtagctgtcagtagtaactgattgaccgactgtagcaggtataaggtgactccatctttaacagtttcat

SEQ ID NO: 134229 - DNA, 3183 bp, Homo sapiens
atggcagaagacaaggaggagcaagtcccatcttacaccgatggcagcaggcaaagagagaatgaggaagacacaagagtgaaaacccctgataaaaccatcagatctcatgagacttattcactaccacgagaacagtatgggggaaactatgcccatgattcaattatctcccaccaggtccctcccacaacatgtgggaattatgggagtacaattcaagatgagatatgggtgggtgatcattcaggatatgttcgtccagtaccagtgccacgcagtttaaatagtgatatttcctattttggtgttgggggcaagcaagctgtcttctttgttggacaatcagccagaatgataagcaaacctgcagattcccaagatgttcacgagcttgtgctttctaaagaagattttgagaagaaggagaaaaataaagaggcaatatatagtggatatattagaaacagaaaggatgactacgacaaccatactggaattgatttggttggcactataatagccaccattaaaggctctaatgaggaagatactgataccccactttttattgggaaagttagaacacttgaattccccttcgtgaatggttcggctgaaatcatgctcatgccttcaaaccaacagcataaaacagatgagaaaggcagggctaatttgggagtattcagtgtttttgcccctaggggagagcatactcttcaggttaaagccatctataacaaaagtatcatagaaggacctataattaagttaatgattcttccagacccagaaaaacccgttcgtctcaatgttaaatatgacaaagatgcatccttcttagcagggggtcttttcactgctccaccactgccagcccagctcatgtcctcgctatcttgtgcctggattattgaatcagttcttaacagctggaggaagggatgcaacaaactcaggaaccagagagccctgcataagaaacaagacagagggaagcttccggaggatagagagcttcagcacactaagaaacagactaattgggcaggacttctgatccctgccatgaacaataacgtggatatgactgccagaaagctgcaaagagacctccagccttttaccagtgtgactgtgcattgcagaaagggaaatgaccagacatttgggggaccactggacgctggctctgagctgacattgattccaggggacccaaaacatcattgtggtcccccagttaaagtaggagcttatggaggccaagtaattaatggagttttagctcagccctcttatttggcttgtgcagaagacagatggatcttgagaatgacagtggactattgtaagcttaaccaagtggtgattccaattgcagctgctgtatcagatgtggtttcattgcttgagcaaattaacacatctcctggtacctggtatgcagccattgacttggcaaatgcctttttctccattcctgtccataaggcccagcagaagcaatttgccttcagctggcaaggccagcaatatacctttactgtcctacctcagtggtatatcaactctccagctttgtgtcataatcttattcggagagaccttgattgcttttcgcttccactagatatcacactggtccattacattgatgacattatgctgattggatccagtgagcaagaagtagcaaacacactggacttattcgtgagacatttgcgtgccagaggatgggaaataaatccaactaaaattcagggaccttctacctcagtaaaatttctagggttccagtggtgtggggcctgtcaagctattccttctaagatgagggataagttgctgcatttagtccctcctacaaccaagaaagaggcacaatgtctaacagctcttggcctgttactggctttggtggaaactgaacatttgactataagtcatcaagtcaccatgcgacctgaactgcctatcatgaactgggtgctttttgacccatctagccataaagtgggttgtgcacagcagcattccatcatcaaatggaagtggtatgtacatgattgggctcgagcaggtcctgaaggcacaaccacccctgtcatttcccaatggccccatgaacaatgtggccatggtggcagggatggaggttatgcatgggctcagcaatgtagacttccactcactaaggctgacctgaatacagccaccgctaagcgcccaatttgccaacagcagagaccaacactgagccctcaatatggcaccattcctcagggtgatcaaccagctacctggtggtgggttgattatatgggatctcttccatcatggaaagggcagaggtttgtcctcactggaatagatacttactctggatatgggtttgcctatcctgcatgcaatgcttctgccaagactgccatttgtggactcacggaatgccttatccaccatcatgatatcccacacagcattgcctctgaccaaggcactcactttatggctaaagaagtgcggcagtgggctcatgatcatggaattcactggtcttaccatgtttcccatcatcctgaagcagctggattgatagaatggtggaatggccttttgaagtcacaattacagtgtcaactaggtgacaatacttggcagggctggggcaaagttctccagaaggtcgtgtatgctctgaatcagcatccaatatatggtactgtttctcccatagccaagattcacaggtccaggaatcaagggctagaagtggcaccactcaccatcacccctagggatccactagcaaaatttttgcttccttttcctgcaacattacagtctgctggcctagaggtcttagttccagaggaaggaacgctgccaccaggagacacaatgattccattaaactggaagttaagattgccacccagacactttgggctcctcctacctttaaatcaacaggctaagaagggagttacagtgttggctggggtgactgacctggactataaagatgaaatcactctcctactccataatggaggtaaggaagagtatgcatggaatacaggagatccattagggcttctcttaatattaccatgccctatgattaaggtcaatgggaaactacaacagctcaagccagatcatcctagatga

SEQ ID NO: 134230 - DNA, 2329 bp, Homo sapiens
  misc_feature (1)...(2329): n = a,t,c or g
atgctgtactggtcagtcactgccagaccaattgacaagtcttcaggccaggtatctatgtgtgttattcgaaggccattcaaagctcaccattgtaaagcacaaatcctgttgtttgaaggagcaccggaaatattaaaggtggccatacataatagcacaaataagaagttacctgtggctttcttcaagctatttcgaggccgagccggcgtggggcggagggtcttcacggggtctttgggaccttcttggcaatctccccctctaaagccaggacagcacctccattccaactgtgtcactgtcttatacctagtgacatatctaggtctgaagttcactcgatacctgtggacagaagggatggcatctctctttactggctgccgttacaagcaacttccggcgctagacccaaataaagaggactcaggcatgcaggaccctgcctgctctccaggctggcccagaggggatgttggtctcctcagtccagatctgactgggggtcagctggaggagaggtggcagaggttgcagagccaggtcatctcggagctggatgcttgtaaggaatgcacgcagggggtccagagggaggtctccatggtggagggcagggtgtctcatatggagaaaacttgcagcaagctggactctatctcaggaaatcttcagaggatcaaggaggggctcaacaagcatgtcagcagcctgtggaactgtgtcaggcagatgaacggaacgctcaggtcgcattccagagacatttctggcctgaagaattcagtccagcagttctacagccacgtcttccagatttctactgatttgcaagatctggtcaaatttcagccatcagcaaatggagatcgaattcgaagtaatggaaagtttgggggccttcagaataaagctcctccaatggataaacttcggggaatggtatttggagctccagttccaaaacagtgtctgatcttaggggaacaaataggtgcgttaagaattgaaatactgaataaaaaaggggaagcaatgcaaaagcttccaggaacaagccatggagggtcaaagaaactcctggttgagctcaaagttattttacatttttggaagaaaataaacattaccgtgatactaagatgtagatctctgaccaaggtcctactggcaactgagcgaacatttgaaacagctggtgtaggtggtttaattttagataatgaacccagccaattctcagagcccaggaagactttgtccccaactggtacagcacaaccaagctggggggtagatccaaangaggggcctcaggaacttcaggaaaagaagatacaggtgctagaggagaaggttcttcgactcacaaggacggttcttgacctccagtcttcccttgctggagtgagtgaaaatctcaaacatgccactcaggatgatgccagtagaacacgggcaccagggctcagcagccagcaccccaagcctgacaccactgttagtggagacacagaaacgggccagagtcctggtgtcttcaacactaaggaatctggcatgaaggacatcaagtctgaattggctgaagtcaaagatactctaaagaacaaaagtgacaagctggaagagctggatggaaaagtgaagggctacgaagggcagctcagacagctccaggaagcagctcagggcccgacggtgaccatgacaaccaacgaactctaccaagcctatgtggacagtaagatcgacgccctgagagaggagctcatggagggcatggacagaaagctggctgacctgaaaaactcatgtgagtacaagctcactggcctccagcagcagtgtgatgactatgggagcagctacctgggagtgatagagctcataggggagaaggaaacaagcctgagaaaagaaataaataacctccgagcccggctacaggagccttcagcccaggcaaattgctgcgacagtgaaaagaatggtgacattggtcaacagatcaagacattggaccagaaaatcgagagagttgctgaagccaccagaatgctgaatggaagactggacaatgagtttgaccgccttatagttccagagccagatgtggattttgatgcaaaatggaatgaactcgatgcaaggatcaatgtgacggagaagaacgctgaagaacattgcttttacattgaggaaacccttcggggcgccattaatggagaggtgggtgacttgaagcagcttgttgatcagaaaatacagtctctggaagaccgtctggggagcgttctcctacagatgaccaataacactg

SEQ ID NO: 134231 - DNA, 2298 bp, Homo sapiens
atgttttacaatgatgttaagaagcagcaacaaatggcagcacttacaaaagaaaaggaccaattatctcagtctattgttatgtataaaagtttatttgaagccagccaacagcttcttaatgaaatgaaatgtcaagttgaagaagcaagattaaaagaggcccaattgcgaaatgaactaaaaatacataatattgacattcctacaacacaacaggtgccacacattgaagcacttctgaaaagaaagctatcagaacaagaagaactgaagaaaaaacctagaagatcgtgtactcttccaaactatactaaaggcagtggagatgttttgggaaagattgcacatctagcacaaattgaagatgatagagctgcgatggttatttcttggcatctggcaagtgacatggactgtgtagtcaccctaaccactgacgctgcacgtcgtatctatgatgaaacccaaggtcgtcagcaggtgttgccccttgattctatttacaagaagactcttccagattggaaaagatctctacctcatttccgaaatggaaaattgtattttaaacccattggagatccagtctttgctcgagacttgttaacatttccagataatgtagaacattgtgaaacagtatttggtatgctgttaggagacaccattattttggataatctggatgcggccaatcattatagaaaagaggttgttaaaattacacactgtcctacactgctgaccagagatggagatcgaattcgaagtaatggaaagtttgggggccttcagaataaagctcctccaatggataaacttcggggaatggtatttggagctccagttccaaaacagtgtctgatcttaggggaacaaatagtgattaatggaagagatttacagaaccctattattgttcaactttgtgatcagtgggataatccagcaccggtacaacatgttaaaataagtcttacaaaagctagcaatttaaagctcatgccttcaaaccaacagcataaaacagatgagaaaggcagggctaatttgggagtattcagtgtttttgcccctaggggagagcatactcttcaggttaaagccatctataacaaaagtatcatagaaggacctataattaagttaatgattcttccagacccagaaaaacccgttcgtctcaatgttaaatatgacaaagatgcatccttcttagcagggggtcttttcactgattttatgattagtgttatttctgaagatgacagtatcattaaaaacattaatccagcacgtatttccatgaaaatgtggaagctgtctaccagtgggaaccgacccccagcaaatgttatagttgaagtcctgcctaatcaacctgtgaagttagtacctaaaattaaaccacctacaccagctgtttcaaatgttcgctcagttgccagtaggaccttggtcagagatctacatcttagtatcacggatgactacgacaaccatactggaattgatttggttggcactataatagccaccattaaaggctctaatgaggaagatactgataccccactttttattgggaaagttagaacacttgaattccccttcgtgaatggttcggctgaaatcatgatgcttcctgcccttgaacattggactccaagtccttcagttttgagactcggactggctctccttgctcctcaagcttgcagacagcctattgtgggaccttgtggatcgtcttgcagacagcctactgtgagaccttgtgatcatgttgttaaaattacacactgtcctacactgctgaccagagatggagatcgaattcgaagtaatggaaagtttgggggccttcagaataaagctcctccaatggataaacttcggggaatggtatttggagctccagttccaaaacagtgtctgatcttaggggaacaaatagcacaaattgaagatgatagagctgcgatggttatttcttggcatctggcaagtgacatggactgtgtagtcaccctaaccactgacgctgcacgtcgtatctatgatgaaacccaaggtcgtcagcaggtgttgccccttgattctatttacaagaagactcttccagattggaaaagatctctacctcatttccgaaatggaaaattgtattttaaacccattggagatccagtctttgctcgagacttgttaacatttccagataatgtagaacattgtgaaacaggtaaaagacattatggtgactttacttttgtacagatgttaaatttgtga

SEQ ID NO: 134232 - DNA, 5005 bp, Homo sapiens
gaggaaaaacagtacagatgggccaagagcttcaaggagaagtagttataataattacagatcagtacggaaatcagattcaagcattttcaccaagttctttatcttctttgtcaattgctggggttggacttgatagctcaaatttgaaaacaacctttcaggaaaacacacagagtataagtgtaagaggcatcaaatttattccaggtcctcctggaaataaggatctttgttttacttggcgtgagttttctgactttattcgagtgcaactaatttctggacctcctgctaaacttctccttatagactggccagaactaaaggagtccattccagtgattaatggaagagatttacagaaccctattattgttcaactttgtgatcagtgggataatccagcaccggtacaacatgttaaaataagtcttacaaaagctagcaatttaaagctcatgccttcaaaccaacagcataaaacagatgagaaaggcagggctaatttgggagtattcagtgtttttgcccctaggggagagcatactcttcaggttaaagccatctataacaaaagtatcatagaaggacctataattaagttaatgattcttccagacccagaaaaacccgttcgtctcaatgttaaatatgacaaagatgcatccttcttagcagggggtcttttcactgattttatgattagtgttatttctgaagatgacagtatcattaaaaacattaatccagcacgtatttccatgaaaatgtggaagctgtctaccagtgggaaccgacccccagcaaatgcagaaacatttagttgtaataaaataaaagataatgacaaagaagatggctgcttctatttcagggataaagtaattcctaataaagtggggacatattgtatccagtttggttttatgatggataaaacaaatattctcaacagtgaacaggttatagttgaagtcctgcctaatcaacctgtgaagttagtacctaaaattaaaccacctacaccagctgtttcaaatgttcgctcagttgccagtaggaccttggtcagagatctacatcttagtatcacggatgactacgacaaccatactggaattgatttggttggcactataatagccaccattaaaggctctaatgaggaagatactgataccccactttttattgggaaagttagaacacttgaattccccttcgtgaatggttcggctgaaatcatgagtctggtgctggcagaaagtagtcctggaagggatagtactgaatattttattgtatttgagccccggctaccacttttatcaagaaccttagaaccatatatcctaccgttcatgttttacaatgatgttaagaagcagcaacaaatggcagcacttacaaaagaaaaggaccaattatctcagtctattgttatgtataaaagtttatttgaagccagccaacagcttcttaatgaaatgaaatgtcaagttgaagaagcaagattaaaagaggcccaattgcgaaatgaactaaaaatacataatattgacattcctacaacacaacaggtgccacacattgaagcacttctgaaaagaaagctatcagaacaagaagaactgaagaaaaaacctagaagatcgtgtactcttccaaactatactaaaggcagtggagatgttttgggaaagattgcacatctagcacaaattgaagatgatagagctgcgatggttatttcttggcatctggcaagtgacatggactgtgtagtcaccctaaccactgacgctgcacgtcgtatctatgatgaaacccaaggtcgtcagcaggtgttgccccttgattctatttacaagaagactcttccagattggaaaagatctctacctcatttccgaaatggaaaattgtattttaaacccattggagatccagtctttgctcgagacttgttaacatttccagataatgtagaacattgtgaaacagtatttggtatgctgttaggagacaccattattttggataatctggatgcggccaatcattatagaaaagaggttgttaaaattacacactgtcctacactgctgaccagagatggagatcgaattcgaagtaatggaaagtttgggggccttcagaataaagctcctccaatggataaacttcggggaatggtatttggagctccagttccaaaacagtgtctgatcttaggggaacaaatagatcttcttcagcagtatcgttctgctgtgtgcaaactagacagtgtgaataaggatcttaacagtcaattagagtaccttcgcactccggatatgaggaagaaaaagcaagaacttgatgaacatgagaaaaatctcaaactaatagaggaaaaactaggtatgactcccatacgtaagtgtaatgactcattgcgtcattcaccaaaggttgagacgacagattgtccagttcctcctaaaagaatgagacgagaagctacaagacaaaataggattataaccaaaacagatgtatgagaggtgacagagagaagaggccattggtctcagtaagaatgccctgctttctgcatctctgtttcagaagaccaagagggtgacttaccagactgagtatttctggggacaatacaagtacctgggcatgaatttccatttcgattcagatgggactggaaacaaccattcaattttatgaatcttactggacattatggatttactggaattattccagacattatgccctttggttgtcactaccttgcaaatgtgtaagaggaaaatgtgctaatgtggcagtgactgtaaaactggcacatggcatttattaatcctgaagaaaagtacatgtactatttttcagtataaatataatgaacatgtcagaactatttcttgaaaacctttttattacttttgcgtgaatttatttaacaaagatgttttgtcttttgtgtaagggaggttctagaggctagatgtttaattgtaaatatgtgaggaaactcaatgcagaattcaggataaaaattttaaaagcacaggtatttgggaattgaaatgttaagatacccagaacaacattaaatcaatgagtgaacttgtgacagtggtagcatttcaaatttcaaaagacttatcctgtgtgtgtgtgtgtgtgtatatatatatatatatatataaatatatatatataaaatattcagcagcaccaagttttataactattgtttgtttgactttattaatactagaatatgtagtctcagccttaattttacatttacattattttgtaattttttattactatttttaaggggttaaagagaacatacattctcacattagtgtactttctggtagaaagttgctgcaaaaacatttgaaatgtatattaacctaatgtatgtcatatatatgtctttgtgtaagttcaagactattgatctgtgaagttattttgtaaggacatacatttggtaagtaagtttgtgtcccaggaaatgtatgtgtttttaaaccctttctaaatatgcaggccattaataaataagattgtttcttccctactgaatagataagtgtttttcttttttaaaattggaagcttcataaaagttatcttgttaaaaaacgatgatgatgttaacctatctttataattggaaattatttaaactgtttgttgttacagaagaaacaaaatggtaattacagaattagctgtggggaagattggctcccatggtactacaggttgagtatcccttattcaaaatggttgggacctgaagtgttttggattttggttttttgtggggtttttaaattattattttggaatatttgcattatatttaccaatttagcatccctaatccaaaaatctttcattagaaattggaaatgcttcaatgagcatttcccttatgtgtcatatctgcgctcaaatgttttgaattttggaacatttcttgtttctgacttttagattagggatactcaccccgtaccaatatttggagtccttagacattagattatatgaaaatgattgattgataggtaagaaaggttaaagagaaatgactttttaggaactagacttgaacgtataattaatatgtggaactagtttgcttttataattcattgtatcaagaaggagtcatgttttaaatccaaggcattgagactatctagaagcaaaaaagttggttttaaaaattctttttattagaagtgtgtttaaaaacatgtctttttttcccttgagcgacagtggcctcactacattgcccaggctagtcttgaactcctgggttcaagcagtcttcctgccttggcctcctaagtagcagggattacaggcatgcacccacatgccaatttttattgcttaaaatggcgagttctatggatattatctagccccaagcccatatctgtacacttttgttcattttataataccagaaagaatgttctatcagtaaaagaaggttttaagtatgaatctccatttttgtggagtttttctaccctgtaaaaattaactttgtggttcccagtaattacagtaaggagtttttctatattttcacagttggatttatctaaggatatttctcagcatattaaggaatccttttctacatttgagcaaatactgaggttcatgttgtaccaaataataataaattgcttttgtgtttaatatgtaacacgtaagaacaattgaaattttcttctaagatttaatactagtcttttagtataaaggaatgtaactggagaaaaaaattaatgctacagccatttatcctgtgttatgtgttatataatctgaaatttgtcacaatgttacaatcaggaagttttttttctggtttcttcttccaaaggaaaataatagcctacttgtattttgaagtaactgaaataaaactctctccaagcctttttgc

SEQ ID NO: 134233 - DNA, 3682 bp, Homo sapiens
  misc_feature (1)...(3682): n = a,t,c or g
aatacacgtgtgcttgtataatctggtattacaaagaaatgagaaattgccctgatgacgaatctccagctctaatctcaatttgctgaagtagagaggcaattcatcttacccattaactaagaattagaaaaacaatttgtgtttttctttgagtcatttaactcaaataccactatataaaggaatagaatgagacattcgcatgaatttgaaaggtaaataaaacatcagacttcaaagaaattccattagaatcgggggttacttttttgttttcttttcctccacctccaccttaaggaacatgaacggcatttggccacagtttatgtctttccaattttatcttgcaccatctaccgctcagttctcctcacttccagccaaacaataatttacacgcacgtgggagaccgcgaagcgcaggcagcgttaaaactagggcgctggagtcacccccgtaccccgaatgccgtcggcgctccagggcccccagagggtgcggggggcggggacgctgtgacgtcacagagcgcccttctgacgttctcacggacccgctttgcctcgggggcccacgctggagcccacccagtactactaagaaatgaggaggaaaaaggggcgccggctctcgtagcgcctattttctcggcagagggacccacgtgctcgctttggtggactctgcgcccggcgagtaccgccggcctgaagcttcccgccgccgcgtccacgcgacccagccagagagggctcacggcggacggcggcgggcctggtggggcctctgtggggactgaggaggatggcggaggcgtcggccacaggacggtgtacttgtttgatcggcgcgaaaaggagtccgagctcggggaccggcctctgcaggtcggggagcgctcggactacgcgggatttcgcgcgtatgaaactgttaaagatggagtcaccttatacctgctacagtcggtcaatcagttactactgacagctacgaaagaacgaattgacttcttacctcactatgacacactggttaaaagtggcatgtatgaatattatgccagtgaaggacaaaatcctttgcgatatgttcgtccagtaccagtgccacgcagtttaaatagtgatatttcctattttggtgttgggggcaagcaagctgtcttctttgttggacaatcagccagaatgataagcaaacctgcagattcccaagatgttcacgagcttgtgctttctaaagaagattttgagaagaaggagaaaaataaagaggcaatatatagtggatatattagaaacagaaagccctctgattctgttcacattacaaatgatgatgaaagatttctacatcatcttatcatagaggagaaggaaaaagatagctttactgctgtggttatcacaggggtacaaccagaacacatacagtacttgaaaaattatttccacctttggacacgacagttagcgcatatttatcactactatattcatggcccaaaaggaaatgaaatacgaacatcaaaagaagttgaacctttcaacaatattgatattgaaatttctatgtttgaaaaagggaaggtacctaagattgtcaacctaagggaaatacaagacgacatgcagacgttgtatgtaaacacagcagctgatagttttgaattcaaagctcatgttgaaggagatggtgtagtggaagggattatccgttatcatccattcttatatgatagagaaacttaccctgatgatccatgctttccatcaaaattaaaagatgaagatgatgaagatgattgtttcatacttgagaaagcagctagagggaaaaggcctatttttgaatgtttttggaatggacgattaataccatatacatcagttgaagactttgactggtgtactcctcctaagaagagagggcttgcaccaattgaatgctacaataggatatctggtgcattattcactaatgacaaattccaggtcagcacaaataaattgacgtttatggatcttgagctaaaattgaaagataagaacaccctttttacaaggattttaaatggacaggagtggaaagagctgtcgatggagggctacccattaccctcccctcctccacaaaggagctgtcacctccccttaataggcaaacaactcaggggccatccccatttgtttcttaaacctgcaagtttctggtgggtggagtctcctgcttcagaacaaatgatatctttctcccaagtcagaggtctcaaggctcaacaccacgcagaagctgccaaggtgtgggacttccaccctctgaagccacagcccaagctgtacgttggcccctttcagccatggctggagtggctgggaacagggcaccaagtccctagactgcacactgcagatgttaagaagcagcaacaaatggcagcacttacaaaagaaaaggaccaattatctcagtctattgttatgtataaaagtttatttgaagccagccaacagcttcttaatgaaatgaaatgtcaagttgaagaagcaagattaaaagaggcccaattgcgaaatgaactaaaaatacataatattgacattcctacaacacaacaggtgccacacattgaagcacttctgaaaagaaagctatcagaacaagaagaactgaagaaaaaacctagaagatcgtgtactcttccaaactatactagaaggcagtggagatgttttgggaaagattgcacatctagcacaaattgaagatgatagagctgcgatggttatttcttggcatctggcaagtgacatggacttgtgttagtcacccttaaccacttgacgcttgcacgtcgttattctnatggatggaaacccccagggtcgttcaggcaggtgtttgccccttgattctatttacaagaagactcttccagattggaaaagatctctacctcatttccgaaatggaaaattgtattttaaacccattggagatccagtctttgctcgagacttgttaacatttccagataatgtagaacattgtgaaacagtatttggtatgctgttaggagacaccattattttggataatctggatgcggccaatcattatagaaaagaggttatagttgaagtcctgcctaatcaacctgtgaagttagtacctaaaattaaaccacctacaccagctgtttcaaatgttcgctcagttgccagtaggaccttggtcagagatctacatcttagtatcacggatgactacgacaaccatactggaattgatttggttggcactataatagccaccattaaaggttctaatgaggaagatactgataccccactttttattgggaaagttagaacacttgaattccccttcgtgaatggttcggctgaaatcatgctttttgatgaaacacaaggaaaacctgctgttgcagtgatagataatggaagaggaatgacctctaaacagcttaacaactgggccgtgtataggttgtcaaaattcacaaggcaaggtgactttgaaagagctctttttgcaaaacattcaggagtggaatctagtggagttatatatcagaatgtgcttgtagaaaatatcctgaatgaggatgtcacagggaaaacaaaatgtgctaaaagccatcagacataa

SEQ ID NO: 134234 - DNA, 530 bp, Homo sapiens
gagctgaagaggcgagatgccaggcgaacggctgaaggcagaggtctttttacccccatctcccttgtctcccacacaagttgtagggcccctccaccgtgtctggtcctgaattgggaatgccagctcccagcgcggcgaggcccaggtccggtcctaggtgagtttttctctccggctggaagactcgacgccgtggataccagggacccgagccctccggggctgctggctttggagggatttccagacgttgcagtcggggtgagcggagagactaagaagtacaggggactagagaaagcagatgaggaaggggagagttcaataccgtgcacgcgaccacaaagttgttttcgacgagaattcgatgggaagcggaggaacgaatttttcccacattcagaggccaagccaggaactgtaaaacgttcacctttgaaaggtcccaccgagattcgaactcggattgctggattcaaagtccagagtgctaaccattacaccatgggaccaaccacaagggtaca

SEQ ID NO: 134235 - DNA, 4021 bp, Homo sapiens
atgaatcctattagggaaatgcaagtgagtgggatagcattgaagggaacaatgaagggttggactgaacttcccaaaagtcctgtctggacccaaggtaacaaaggccgtaattatttcactaatcttgctctttctctcctctttgaagatgataccaagttgaatccttatgcaggaggagatgcaatccgagttcgaatctcggtgggacctttcaaaggtgaacgttttacagttcctggcttggcctctgaatgtgggaaaaattcgttcctgcgcttcccatcgaattctcgtcgaaaacaactttgtggtcgcgtgcacgggtcatttttgtggttttccatgatgtctcaaagcatgggtggtgataacctcagtagcttagatactaatgaagcagaaattgaaccagaaaacatgagagaaaagttcttcagaagcttagcaaggttactggaaaacaaaagtaataatactaagatattttctaaagcaaagtactgtcagttgataaaggaagtgaaagaagctaaagctaaggcgaaaaaggaatcagttgactaccgtcgcttggctagatttgatgttatccttgtacaaggaaatgagaagctaattgaggctgtaaatggggaaacagataaaatacggtattacttacacagtgaggacttatttgacattctgcataatacacatctcagcattggacatggtggacgtactcgcatggagaaagagttacaagcgaaatacaagaacatcacaaaagaagttataatgctgtatctgaccctctgtaaaccatgccaacagaaaaattcaaaactcaagaaggttctaacatcaaaatcaattaaggaagttagttcaagatgccaagtagatcttatagacatgcagttgaatcctgatggggagtacagatttattttgcattatcaagatctctgtacaaagttaacttttttgcggtcattaaagtctaaaaggcctacggaagttgcacatgctcttttagatatatttacaattattggagcacccagtgtcctacaatctgacaatgggagggaattttcaagccaggttgtcagtgaactcagtaatatttggccagaattgaaaattgtccatgggaagtctcagacctgccaaagccagagttctgcagaacaaactgaggatatccgaaagaggattttctcctggatgcaaactaacaactcatcacactggactgaatttttgtggttcattcagatgtcccaaaatcagccctatcacagaagcatgcaacagactccatgtgaaagtgcatttagctctgaagctaaactgggcttgtcccattctcagctaactgaagaacttgttgccagcttgcatacagaaaatgaattagatcaggctgacaaagagttagaaaatactttaagagcccagtatgaagaaaacattgagactggaacagacagtagtgatattgaagagaatctttctgtcactcctaaggtggctgaaaaaagccctcctgagagcagactaagatttttatcctgtgtagtttgtgaaaaagaatgcacaggtgttaatagttgtatatcatgtgatggaaatatccatgcaatttgtggagtgccctctcaacatgggactgagggctgtggtcggcaaataacttgtagcctttgctatgaaaccagcacaatgaaaaggaaacatgatgagattcaaagaagtttgcctgttaaaccttccaaaatgctaaagccatcagggacaccattttcaccagacaaagtaggagattggatggcgaaacaagcttcactggacttttttgtcaagaaaagacatgccttttctgaacacagtagtagtaataaaagaaatgttaacaatagaagttatcctgaagaagggaaaaccaaaagagttcatgctagtttcactcggaaatatgatccttcatatattgagtttggttttgtagctgtaattgatggtgaagtactaaaaccacagtgtattatttgtggagatgtactggctaatgaagcaatgaaaccatcaaaacttaagcgacatttatattcaaaacataaagaaataagttcacaaccaaaagaattctttgaaagaaagagtagtgaattgaaaagccaaccaaagcaggtgttcaacgtttctcatataaacattagtgctttgcgggcttcatataaagtagcacttccggttgccaagtctaaaacaccatacacaattgctgagacactagtgaaagactgcatcaaagaagtttgcttggaaatgttgggtgaatctgcagcaaagaaggtagctcaggtaccactttccaatgacaccatagctcgacgtattcaggaactggctaatgatatggaagatcaactcatagaacaaataaaactagcaaagtatttttcattgcaacttgatgaatgcagagatattgctaacatgataattcttttagtctatgtgaggtttgaacatgatgatgatataaaggaagagttctttttttcagcctctttgcctacaaacacaactagctcagaactgtatgaagctgtaaagaattatattgttaacaaatgtggtttggaatttaaattttgtgtaggagtatgttctgatggtgcagcttcaatgacaggaaaacattctgaagtggtaacccagattaaggaacttgcgccagaatgtaaaacaacacattgcttcattcatcgagaaagtcttgccatgaaaaaaatatcagctgaactaaatagtgtacttaatgatatagtaaaaattgtgaattatataaaatctaattcattgaattcaagattattctctttattatgtgataatatggaagctgatcataagcaactgttactgcatgctgagatacggtggttatcacggggaaaagttctgtcaagaatgtttgaaatacgaaatgaactcttagtgtttctgcaaggcaagaaacccatgtggtcccaactttttaaagatgtgaattggacagccagacttgcttatttgtctgatatcttcagtatttttaatgatcttaatgcttctatgcaagggaagaatgcaacttatttttcaatggcagataaagttgaaggacaaaaacagaagttagaagcttggaaaaacagaatttctacagattgttatgacatgtttcataatttaacaacaattatcaatgaagtaggtaatgatcttgatattgcacatctgcgaaaagttatcagtgaacatcttacaaatttgttagaatgttttgaattttattttccatcaaaagaagatccacgcataggaaatttgtggatcgcggggtccatttctttgatcgaaagataacttaaatttaactgtaactctacaggataagttgttgaagctggctaccgacgaaggattgaaaatcagttttgaaaatacagcatcacttccttcattttggataaaagctaaaaatgactatcctgagcttgctgagattgctttaaaattgctgcttcttttcccctcaacatacctctgtgagaccggattctctactttaagtgttattaaaacaaaacatagaaacagtttaaatatacattatcccctgagggtagcattgtcatcaaatccaacctagattagacaaattaaccaagcaagaagcaagctcacttatcacattaaaagctttaaatattgatatgtaaggtattggttcaaagtatgcatataagcattgagtgtgaggaatttgctatttcactttaaactttctgtctagttacagttatggaagtatgagaagttatgagtgaaacagcaattttctatataaattgcctatatgtatattttcaattaagaatgtgtacagtttttataattctatttttcctcatatttgtcgtatttattaaaatataattttaaatctgttgattctaatattaaaacatttgatctt

SEQ ID NO: 134236 - DNA, 1425 bp, Homo sapiens
atgaaactcatggaaacacttaaccagtgcataaacgctggtcatgaaatgacgaatgctatcgccattgcacagtttaatgatgacagcccggaagcgaggaaaataacccggcgctggagaataggtgaagcagcggatttagttggggtttcttctcaggctatcagagatgccgagaaagcagggcgactaccgcacccggatatggaaattcgaggacgggttgagcaacgtgttggttatccaattgaacaaattattcatatgcgtgatgtgtttggtacccgattgcgacgtgctggagacgtatttccaccggtgatccgggttgctgcccctgagggtggcgtgtacgcaacctcagttcctgttcatcttgcgtcggatctggctcttgaggggcctcctgaaatacgtcattttcgttcagaccttaatgtgtccggaattggtgggttcttggtcttgctgacttcaagaataaagccgcggaccctcgcggtgagtgttacagttcataaacgcacgcagacccaaagagtgagcagcaacaagatttattgcaaacagcaaaagaacaaaccttccacagagtgggaagaagaccccaatagagtgcccctgctagctcagctgcgagttttcaagttggcaaaatcttggccaacgttaaatatgctaataaagatcatcggcaattccgtgggggctctgggaaatttaaccctcgtcttggccatcatcgtcttcatttttgccgtggtcggcatgcagctctttggtaaaagctacaaagattgtgtctgcaagatcgccagtgattgtcaactcccacgctggcacatgaatgacttcttccactccttcctgattgtgttccgcgtgctgtgtggggagtggatagagaccatgtgggactgtatggaggttgctggtcaagccatgtgccttactgtcttcatgatggtcatggtgattggaaacctagtgagccttgctgagagccgcactgcgggaatccgcctccagacaaacgtgcagaaaatggtgtcttcctttacaaccagtgacaggaaacagacttccccttcttcatactccgtttcctttattcctgaattccatttcctcggcccgcccacccactgtcctcagacagccgtttcccagtgtgacctccttttccagctgcactctccggcggaggcccttttcccagcccggaccctcccgggcggccctcgcagccctcacctccgggtccccgccgcccctgctccattacagcacgatccccgccacacaggcccgcctctccctccgacagccaatcgcggcgcgaccccgcccctcccgctgggggcccggggcgctagagcgctccgggaggctaggggagctgaattctgcgtcttcctttag

SEQ ID NO: 134237 - DNA, 739 bp, Homo sapiens
gctacttgctgatatttacattcaatcagcaaaatatgacatggcagaagacctgttaaaacggtgcctgcgtcataatagatcttgctgcaaagcttatgaatatatgggatacattatggaaaaagagcaagcatatacagatgcttgccttgaactatgagatggcatggaaatatagcaatcggacaaatccggcagtaggatacaaactggcatttaattacttaaaagcaaaaagatatgtggattcaattgacatatgtcaccaaggttcttgaagcacatccaacttatccaaaaatcagaaaggatatacttgataaggcccgtgcgtctttaagaccttgaaaataattttaacttaggtgttggtttaacaggaaatgaaagaaatctaactttcagttcttcctgttcaaaacaggtttgagctcagtgctttgttattagaagtatacccttttttctccagcagaggttgctgctgtacatcaagagaagtactatgtgaaattggtgtttcctaatggagttgaatgagagctggtctatttgactctgttttgattgggtacagatttggtgactctgtggtaaagactataattatttctataaagaatattttgttaaaatctaggtaattaaataccctgtatcttttctaaggaatattatttcaggaaatatatttaaaatgcattgttctcttttaaaaaaaaaaaaaaaaaaaaaa

SEQ ID NO: 134238 - DNA, 4203 bp, Homo sapiens
atggtgatccttaaagacttcatgaaatttgaaatgaactcagaagaaggagattttctcagaacgtgtgattttttttttctgcgccaccttgtggccgtaaaacaacttgcccacgtgaaagttgaccgctttttcccgcgccggcagagccttgctgagagccgcactgcgggaatccgcctccagacaaacgtgcagaaaatggtgtcttcctttacaaccagtgacaggaaacagacttccccttcttcatactccgtttcctttattcctgaattccatttcctcggcccgcccacccactgtcctcagacagccgtttcccagtgtgacctccttttccagctgcactctccggcggaggcccttttcccagcccggaccctcccgggcggccctcgcagccctcacctccgggtccccgccgcccctgctccattacagcacgatccccgccacacaggcccgcctctccctccgacagccaatcgcggcgcgaccccgcccctcccgctggggcccggggcgctagagcgctccgggaggctaggggagctgaattctgcgtcttcctttaggctgcggcgagacaatccccagagccccgcggcccggcctcggggcagccatggactcgcaggaattgaaggtgagcggactttgattaattactattgtcaagagagatatttccatcatgtattactggttgccagtgaaggaattaagaggtatggaagtgatccagtcttcaggttttatcatgcctatggcacattaatggaaggtaaaactcaagaagctcttcgagaatttgaggctattaaaaataaacaagatgtatcactttgttctctacttgcactgatatatgcccataaaatgagtcctaatccagatagagaagctattctggaatcagatgccagagtgaaggaacaacgtaaaggagctggagagaaagccttataccatgcaggcttatttttatggcacattggtcgccatgataaagcaagggaatatattgacagaatgatcaaaatatcagatggtagtaaacagggacacgttttgaaagcatggcttgatattacaagaggaaaagagccttacactaaaaaagcactgaagtattttgaagagggactccaagatgggaatgatacttttgctctgctgggtaaggcacaatgccttgagatgcgccagaattattcaggtgccctggagactgtgaaccagataatcgtgaattttccgagcttccttcctgcttttgttaagaaaatgaaattacaactagccttgcaggattgggaccagacagttgagacagcacaaaggttgctgctccaagatagccaaaatgtggaagcactgagaatgcaggcactctactatgtgtgtagagagggggatatagagaaggcttccaccaagctggaaaacttgggaaatacattggatgccatggaaccacagaatgctcaacttttctataacattacactcgccttcagcagaacttgtggacgtagtcaacttattcttcaaaaaattcaaacgttacttgagagagcttttagtttaaaccctcagcaatcagaatttgctacagaacttggataccaaatgattttacaaggaagagttaaagaggcactgaagtggtataagaccgccatgacacttgatgagactagtgtgtctgccctagttggatttatccaatgtcagttgatagaagggcaattacaggatgcagatcagcagctagaatttttaaatgaaatccagcaatccattggaaaatctgcggaattaatctatttacatgcagttcttgccatgaagaaaaataaacgacaagaagaagttattaatttgttaaatgatgtcctggacactcacttttcacaattagaaggtttgcctcttggcatacagtattttgaaaagctaaatcctgatttcttgttagaaattgttatggagtatctgagcttctgtccaatgcagcctgcaagtcctgggcaacctctttgtccacttctcaggcgttgcatctcagtcctggagactgtagtaagaactgttccaggtcttctgcaaacagtcttcctaatagcaaaagtgaaatatttgtcaggtgatattgaagcagctttcaataaccttcagcactgcttagaacacaatccctcttatgctgatgctcatctgctgctagctcaggtttacttgtctcaagaaaaagtcaaattgtgttctcagtctcttgaactttgtctgagctatgattttaaggtgagagactatcctttatatcatttgataaaagctcagtcacaaaagaaaatgggagaaatagcagacgcaattaaaacaatgcatatggcaatgagtttaccaggaatgaaaagaattggagcttccacaaaatcaaaagacagaaaaactgaagttgatacaagccatcgtttatcgatctttcttgaattgatagacgttcaccgcttaaatggagagcagcatgaggcaaccaaagttttacaagatgccatccatgaattttctggaacatctgaagaagtgcgggttaccattgctaatgcagaccttgctctagcccaaggagatattgaacgggctttaagcatccttcagaatgttacagccgaacagccttattttatagaggccagagaaaaaatggcagatatttatctgaagcacagaaaagataaaatgttatatatcacttgttttagtaattcaactgagaagcaagaatctgtgcaactggcagtaagaacagcagaaaaacttcttaaggaactaaaacctcagactgttcagggtcacgtacagcttcgcataatggaaaactattgcttaatggctaccaaacagaaatctaatgttgaacaagcattaaataccttcactgaaatagcagcatctgagaaggagcatatcccagcgctcttgggaatggcaacggcttatatgatcttgaaacagactccacgagccagaaaccagctgaagcgtattgcgaaaatgaattggaatgctattgatgctgaagagtttgagaagagttggctgctacttgctgatatttacattcaatcagcaaaatatgacatggcagaagacctgttaaaacggtgcctgcgtcataatagatcttgctgcaaagcttatgaatatatgggatacattatggaaaaagagcaagcatatacagatgctgccttgaactatgagatggcatggaaatatagcaatcggacaaatccggcaattatgttggaactggcacgattatacctggcacaagatgaccctgattcctgcctgcggcagtgtgctctactgcttcagagtgaccaggataacgaagctgctaccatgatgatggctgatctcatgttcagaaaacaagactatgaacaagcagtgtttcatttacagcagcttttagaacgtaagccagataattatatgacattatctcgtttgattgatctcctaagaagatgtggaaaactcgaggatgtcccaagatttttctcaatggctgagaaacgtaactccagagcaaaattggaaccaggatttcagtattgtaaaggactgtatctttggtacactggagaaccaaatgatgcccttcgacattttaataaagctcggaaagatcgtgactggggccaaaatgccctttataatatgatagagatctgtttgaatccagataatgaaactgttggagtaaatgaactgtcagctctcatggaggatggacgttgtcaagttcttctagcaaaagtttatagtaaaatggaaaaacttggtgatgcgatcactgcattacaacaggctcgagaattacaagctcgggtactaaaacgtgttcagatggaacagccagatgcagttcctgcacagaaacatttagcagctgaaatttgtgcagagattgcaaaacattctgttgctcagcgagactatgaaaaagcaattaagttttatagagaggctctggttcactgcgaaacagataataaggtcgccatgggttgggcagatcctgaagagaaccaacttgagtctgacagtccttccagaacacggcacccacctccaccatataacacagccaagtacgtccttaaaatgaaaatataa

SEQ ID NO: 134239 - DNA, 1467 bp, Homo sapiens
atggggtttcgccatgttggccaggctggtcttgaactcctgacctcaggtctagggctggtaacagcttcaggttattgcactatttcttggggttccccatgcacctgtgcctttgggaatggtcccatagacggtcactcgctgagcatcatcttagaaatggggctgtgcactatgaagactaaacaagagttccaggactggaccaaaagaagtgtggaacttgagggtgggaatgcctcatcagaacttcaaagcttccaaggccatcacaacaaggagggtctgagaaactgtcgcagccaggaggagcccgaggagatgctcccgaccatcatgtggaatcctggacgggatccagtagaagactcagaaagtggtgtttacatgcgattcatgaggtcacacaagtgttatgacatcgttccaaccagttcaaagcttgttgtctttgatactacattacaagttaaaaaggccttctttgctttggtagccaacggtgtccgagcagcgccactgtgggagagtaaaaaacaaagttttgtagagctttatttacaagaaacatttaagcctttagtgaatatatctccagatgcaagcctcttcgatgctgtatactccttgatcaaaaataaaatccacagattgcccgttattgaccctatcagtgggaatgcactttatatacttacccacaaaagaatcctcaagttcctccagctttttatgtctgatatgccaaagcctgccttcatgaagcagaacctggatgagcttggaataggaacgtaccacaacattgccttcatacatccagacactcccatcatcaaagccttgaacatatttgtggaaagacgaatatcagctctgcctgttgtggatgagtcaggaaaagttgtagatatttattccaaatttgatgtaattaatcttgctgctgagaaaacatacaataacctagatatcacggtgacccaggcccttcagcaccgttcacagtattttgaaggtgttgtgaagtgcaataagctggaaatactggagaccatcgtggacagaatagtaagagctgaggtccatcggctggtggtggtaaatgaagcagatagtattgtgggtattatttccctgtcggacattctgcaagccctgatcctcacaccagcagccccagtcaaatatgaacaacccagcctttgtcagggccacatggacccgatgtgggagcaaacagcatgccctttgaactctcagaatccaatattaaacgaattcactggtatggaacaggtgatgtggcataaggtgagtgcacggtatgttcagatcacagtgccttatgtccgaatacagcaatatgtcaccgccgcagccggggcgcacgcgtgtgaaacaacaccgagcttgaatgtggaagtctttgaaccttttaccaaatcagtttgttttctttag

SEQ ID NO: 134240 - DNA, 858 bp, Homo sapiens
atggcgtcagggctgaggcgccggcaggcctgggcctgcagagacgacctggctctgctcctgagaagcgctcacttcctcacctgccccaggccaccagagcagatgctttgccacatccaccacaaggtcctgtggcgttgcgctgccccggagccccactggggaaccccatactctcctgatgctaccagttgccattggagctgggagctgcccaggcggctgcacgatggctcctccggcctctcctcctctccgtcaacacccacccaagtgaccaagcagcacacgtttcccctggaatcctataagcacgagcctgaacggttagagaatcgcatctatgcctcgtcttcccccccggacacagggcagaggttctgcccgtcttccttccagagcccgaccaggcctccactggcatcaccgacacactatgctccctccaaagccgcggcgctggcggcggccctgggacccgcggaagccggcatgctggagaagctggagttcgaggacgaaggtgagtgcgccccgcccgctgccggcccggcgctcccacggcccggccgcccgaggaccgggacccgcggggaccccgcgccccatctccggcgctgccccacggcgagctgcgtcctgcggaagcccaggggccggggcgggaaccggggcggggatgcgggcgccggcgagctcgggctgcgggggccatgtgacctcccatctcagaactttctctgcttcctggtggatgtgttgaagaatggcctcttggccctacagctgttcagctccaaccccacagccagctgtgctgagtccttacccatgcttcggacccctgtgatataa

SEQ ID NO: 134241 - DNA, 2303 bp, Homo sapiens
  misc_feature (1)...(2303): n = a,t,c or g
cagcgctcggccggccgcgagcccgccggcgggggaacgagcgtcgcagctcatgctgatcgctgtcctcctcctccccctcaggcggcgctggcggcgagccctgggacccgcggaagccggcatgctggagaagctggagttcgaggacgaagcagtagaagactcagaaagtggtgtttacatgcgattcatgaggtcacacaagtgttatgacatcgttccaaccagttcaaagcttgttgtctttgatactacattacaagttaaaaaggccttctttgctttggtagccaacggtgtccgagcagcgccactgtggggagagtaaaaaacaaagttttgtaggaatgctaacaattacagatttcataaatatactacatagatactataaatcacctatggtacagattttatggaattagaggaccataaaaatttggaaaccatggagggagctttatttacaaggaaacatttaagcctttagtgaatatatctccaggatggcaagcctcttcggatggctgtatacgtccttgatcaaaaataaaatccacagattgcccgttattgaccctatcagtgggaatgcactttatatacttacccacaaaagaatcctcaagttcctccagctttttatgtctgatatgccaaagcctgcctttcatgaagcagaacctggatgagcttggaataggaacgtaccacaacattgccttcatacatccagacactcccatcatcaaagccttgaacatatttgtgggaaagaccgaatatcagctctgcctggttgtgggatgagtcagggaaaagttggtagatatttaattccccaaatttgaatgtaaattaaatccttgcctgcctggaggaaaacataccaaataaccttagataatccacggtgaccccaggccccttcagcaccgttcacagtattttgaaggtgttgtgaagtgccaattaagctggaaattcctggagacccatcgttggaccagaatagtaagagctgagggtccatccggcttggtggtggtaaaatgaagcagatagtattgtgggtattatttccctgtcggacattcttgcaagccctgatcctccacaccagcaggtgccaaacaaaaggagacagaaacggagtgacccgccgtgaatgtagacgccctaggaggagaacttgaacaaagtctctgggtcacgttttgcctcatgaacactggctgcaagtggttaagaatgtattatcagggtttaacgatagggtatttcttccagttgatgttgaaattaagcttaaaaaaggaaaggttttatgtgcttgaaggtttcagggcttgcatttaaaagactgttttcaagaacctttgtgctgaagggattttaaaatgctggatgtgattaaagtgcactgtgtcctgaagttttcattatttttcatttcaaagaattcactggtatggaacaggtgatgtggcataaggtgagtgcacggtatgttcagatcacagtgccttatgttcgaaatacagcaatatgtcaccgccgcagccggggcgcacgcgtgtgaaacaacaccgagcttgaatggtggaagtctttgaaccttttacccaaatcagtttgttttctttagatttgtcaaaaagttgtaatttgaatattaaataattactttaaaaattttaatgacacttttacacgtaaggttttttgttctgggctaccgtgtcaacgagggctgctttacaacagctttatttatttttactttcatgcaatttttttacacatctttttggtgggagtaaacttcaccacatccatgaataaactctcagttattttgaaatggcaaatttctcattatttaagtttggatctggaaaggacatgacttctgaaatagccgctgctgggttttacacacctgaggtcccccaaaagtngtggaggaagacggttgcccgtcacggggaagccaaagttgccgggaagatgtctattttttyttccttgtgtattgaaatgtaaaatcaaggatgtttgttatgaactgctgatgccgattgtttttgtaaattttattgtggcatatacacgtattgtcatacagttgaagagaaacaatgtttccthaatgtaagtgctctgtaaaatgttgacactgtatatatatatatgaaggatagtttgtttttttttgttttgggtttttttttttttttttcagattgraaaaattaaaaataaaatcctactatctaccaaaaaaaaaaaaaaaaaac

SEQ ID NO: 134242 - DNA, 457 bp, Homo sapiens
ggttagtatggtcttctctacaccaccactggtttcaataaagttcttctttcgtaacacatatgccctgctgccagtttcaaattgaccaacgtttataagcaaggaaaaacgagggtccacggaagatctccaggaccgatcaaaaggccgcacattcactgtggggcctccgcttttccagagaaacccggcaggctgagctgagcgtctggcgaggcgtggggttttgcgggccctgaccgctgcggcgccgctggtgaggaacacgcccaggagcagaggaagggggcgactcacccgtcggcgtcagctccaagcaaggcacagggagtcccgggggccaggccccgtccttccctctctctccggccagcctccccacagtccgcagtccccgagacctggagccgggatttcggtcctcggtctcaagaagctcccgacacgaaatcgt

SEQ ID NO: 134243 - DNA, 1584 bp, Homo sapiens
gagaactgtcgggagcttcttgagaccgaggaccgaaatcccggctccaggcctctttggactgcggactgtggggaggctggccggagagagagggaaggacggggcctggcccccgggactccctgtgccttgcttggagctgacgccgacggtttattgcaggcatgcttacaagatcacattttgagaagaagttggaaagaatcccaagtggatgaactgaatatctggatgaggacaagatctgtggggagagactgtaagatagaatgagtccatttaagtcccaggacgggggaaactagctagtaaattgcagccatgttggggaagctgctgctgaaatcccagtccttgcgggctgtgttctttcagaaagatgcgatcacctccaaaatacagacctttcttagcatgcttcacctatacaactgataaacagtccgagcaaagaaaatacaagaacagtggaaaagctctataaatgttcagttgacattaggaaaattcgtagatttaaaaaggatggggtacttttaagaagatgaaaaccctatgttgaaagaaattgccgaatattttaccaagaactaggtgcccgatgagactgctgtagccagtatttttggaacgctgcccggaagcaattgtctggaagtccaaccgctgttaacacccagagaaaactctggcagttggtctgcaaaaatgaggaagagttaatcaagttaatagagcagtttccagaatctttctttactattaaagaccaagagaaccagaagctgaatgttcagttctttcaagacgttgggactaaaaaatgtggtcattagcagacttttgacagctgcacctaactgtttttcataatcctgttgagaagaataagcaaatggtaagaattcttccaagagagttatctagattataggtggctctgaggccaacatgaaaagttttggcttactaaaattgtttaagccaaaacccttttattttgtttaaatttctcccacagctataaaggaaacactagaatttctccaggagccaaggtttccaccagctttgaaatttctccagcttcctatcccaaactcaaaaggatttctttttcaactttgccccaagaagtatacagaatagtatttccttctctaaaaatgccttttaaatgcacagattttcatggaccctgaagcaattaagttttgaaatggccctgcccttttatattattcctgttcccagttttagaagagagaatgcaaggattattgagagaaggaatttccatagctcagataaggagagacgccaatggttcttgaattaacaccacagatagtacagtacaggataaggaaactgaattcctcaggctacagaataaaggatggacatctagcaaatctaaatggatcaaaaaaagagtttgaagctaattttggcaaaattcaggccaaaaaagccctgcagaaccttttattacggagtttaaattattatgatgaactcactgtgggagaatgtggaaaccggaaaggccggggaacaaatgtgaacacaaccctgtga

SEQ ID NO: 134244 - DNA, 455 bp, Homo sapiens
tttcgtggagtgagccacgcccgggctgtgggaataagatggcggggaagatgaatgttctgtcgtctctcgcagtttacgcggaagattcagagcccgagtctgatggcgaggctggaatcgaggcggtgggcagcgcggctgaggagaaaggcggattggtatctgatgcctatggggaggatgacttttctcgtctagggggtgatgaagatggttatgaagaagaagaagatgagaacagtagacagtcggataatacagaagcagaaaagcgagacccccaggaactcgtggcctccttttctgaaagagttcggaacatgtcgcctgatgaaatcaagatcccgccagaaccccctggcagatgttcaaatcacttgcaagacaagatccagaagctttatgaacgaaagataaaggagggaatggatatgaactacattatccaaagg

SEQ ID NO: 134245 - DNA, 443 bp, Homo sapiens
  misc_feature (1)...(443): n = a,t,c or g
ggnatggccanatttgaagcttagtacagtccgcantccctggtcgacccacgcgtccgcggggaagaagaatgttctgtcgnctctcgcagtttacgcggaagattcagagcccgagtctgatggcgaggctgggatcgaggcggtgggcagcgcggctgaagagaaaggcggattggtatctgatgcctatggggaggatgacttttctcgtctagggggtgatgaacatggttatgaagaagaataagatcagatcagtagacagtcggaagatgaccattcatagactgattatcctgatgctgaagacccaaatgtttatacagtagcagacaagcgagacccccaggaactattggcctacttttctgagagagttcggaacatgattcctgttgaagtaagatcccgccatatccccctggcagatgttcatatcg

SEQ ID NO: 134246 - DNA, 452 bp, Homo sapiens
gccttggaattctcctggtcgacgatttcgtgaatgttctgtcgtctctcgcagtttacgcggaagattcagagcccgagtctgatggcgaggctggaatcgaggcggtgggcagcgcggctgaggagaaaggcggattggtatctgatgcctatggggaggatgacttttctcgtctagggggtgatgaagatggttatgaagaagaagaagatgagaacagtagacagtcggaagatgacgattcagagactgaaaaacctgaggctgatgacccaaaggagaagctcggcacagtgacagaggcacccagggctcagcaagctcatggcccagcttgttggactcagagggcagaagaatcacattctaaacatgataagagacgtgactcaacaacctcagctgagcctggcagcacacacaccccacactcctttccatctccaggt

SEQ ID NO: 134247 - DNA, 334 bp, Homo sapiens
aatcacgtcaccctccgtgccagacaaccagacaacaagctccagcctctaacaggtccatctccctgggagagtggagggccatcaggaagcttgcttagagcagctgagctggatttaaaagttgtgaaggttttgtgtcagccccaggagctggatggttcaggtcccatgcagggacgtggacttgtgcctgctcagcgccggcactgttctttcagcatctacgagaagctgatccagttctgtgccattgacgagcttggcaccaactacccaaaggatatgtttgatccccatggctggtctgaggactcctactatgaggcattag

SEQ ID NO: 134248 - DNA, 690 bp, Homo sapiens
atggtcgcactctcctgtaaaggcgtcttaaaagagtcaaacccaaagaccttcttcagcgtactccggactcgccgctcagggtcaaaaggaaaggtggtatggtggctgctcatcttagccaagaacagtggccaaaggttaaggcaaagtgtggcgcgggggtctcctgggttccgaaagaacctgcctttccgcccggaagtcggcgtcttgagtcataggagtgagccacgcccgggctgtgggaataagatggcggggaagaagaatgttctgtcgtctctcgcagtttacgcggaagattcagagcccgagtctgatggcgaggctggaatcgaggcggtgggcagcgcggctgaggagaaaggcggattggtatctgatgcctatggggaggatgacttttctcgtctagggggtgatgaagatggttatgaagaagaagaagatgagaacagtagacagtcggcaggaggcaacaccctgtctgctaccattagcaccttccagagcccacctcccctgcccagccgtaccctgctctgccccatctgggatgctgtgctcaggcatgagctggcagggccgcacacagcctccctggaaaagagaggaaacaaagcatctgataaagccactatcatggcctttgatgccctggtgaccttctgtgaagaactggggtaa

SEQ ID NO: 134249 - DNA, 1280 bp, Homo sapiens
  misc_feature (1)...(1280): n = a,t,c or g
cgcccgggctgtgggaataagatggcggggaagaagaatgttctgtcgtctctcgcagcttacgcttatgatatcagagcccgagtctgatggcgaggctggaatcgaggcggtgggcagcgcggctgacgagaaaggcggattggtatctgatgcctatggggaggatgacttttctcgtctagggggtgatgaagatggttatgaagaagaagaagatgagaacagtagacagtcggaagatgacgattcagagactgaaaaacctgaggctgatgacccaaaggataatacagaagcagaaaagcgagacccccaggaactcgtggcctccttttctgaaagagttcggaacatgtcgcctgatgaaatcaagatcccgccagaaccccctgggcagatgttcaaatcacttgcaagacaagatccagaagctttatgaacgaaagataaaggagggaatggatatgaactacattatccaaaggaagaaaagaatttcggaaccctagcatctaccgagaagcttgatccagttctgttgccattgacgagcttggcaccaactacccaaaggatatgtttgatccccatggctggtctgaggactcctactatgaggcattagccaaggcccagaaaattgagatgggacaaattgggaaaaggccaaaaaaggagcggaaccaaaaatttgagttttgtgacggggcaccaaaaaagggcacccacggaccaacgccacgtccaccaccactaccacgtgccaagcacagctgtttgcagattgcttcagaagaggaaagaggcaagtggggattcgggctatccccagtgcaacgaagcccaaaagggnnnccccccccaaancccncccaaataccctcaccaccacagccaccctgcccagcttgttgtcacggtcacccacccaagcgccagcggctccaaagacccacccgtcatctcctgctgtggggcacccattgtgaaagaaaggccaaagcaagtgaccctgaggggcccacccctaggacttgaaagagaccgtgcagccccagtgacccactgcccagtgggaggcgcccactttgtatatttcaggactgggacctactccccaagatgccacctgagaggagcttctgtttggcattccagatggaaggacaggcagcacgggagccaggcgctgtggacagggtctgtccacgcaccacctggggtctgccgcctattaaaagtgccgtattcttacctcttggcatctcagaaaaaaa

SEQ ID NO: 134250 - DNA, 708 bp, Homo sapiens
atggcatattctgcccctgagaagtcctgcactgagggccatgaaagccctcatcccacacagctggccactcgggctggcatggtggataggccctgcgacagagaggccactcgtgcccgaaagagggaacacgaggacacccccagaccctggctccgctcaccagtgcccacaacacgctgctgggctcccaaggctaaccagctccttcatgattgtttcgtcatcatcaccatcgtcactgtcatcatcatcatcatcaccaccagtgatttcctgaatgccaaccaagcaccagtcatcaagcgaacccacatcacaggccagacctgcatgatcgccaggcacccgactcgggttatgaaggtgtctctcctaagagagtggcagaggcaaactttagccttggcagtgcgcctcaagctgctcaggggagaagtcacggccaaagccctggagtgcatgggttctttagccatggttctcctgcagcttcctctgatattatgaagcgcctgccgccaccaggcttgttttgactcccttccatgatccacccttttgagtggggtttggcttctgtacagctctcctgtgggcactgagcccactagtcagagcaagagggctccagtctctggacagtcacagtgcttggtggcaaaacataaattgtcattcattcataaaaaaaaaaaaaaaaaa

SEQ ID NO: 134251 - DNA, 522 bp, Homo sapiens
aggtcattgataggtgtgaccatgccaagactgagaggaggtgaagaaaaacccgagaaagaattggccatgatgtaatctgcaatctgctgtaatgctagtaatccagttgggttgtggcctttcttcatctgttcttgaataaggcattccaagtcttcccgaaaggcttagaatttctccattaagaaatgtactcatttggaaatagaataccactggccaggactttgcaggatctgagtaactcgtttcctctgctccatcatgttgaagtcttgtcgtagatcaggagacatgttcctctccctaatgtattctgggtcattttcattgatgcggtcaaaatatctctctttgtgaggcatgctgggaggaggaggagtggtaatcacgccttggctggcatctgagctcatgttttaagtctgtggattactcttgttatctcgcagcgcgtagccggctttgtgtttcccctccctccttctcggcagccgcccgggctgcagcagccgccgg

SEQ ID NO: 134252 - DNA, 467 bp, Homo sapiens
atttcctggaatcctcttgcacctcccaaatggctcacggttccagagcgcatgtcttccttcagggtgaggtggcaaatagagtgcaatggagatacctgctaccacccaggatgcccaaacggccactggaagatgtccttgggctggcccaggatgcccaaacggccaccagtatccaactgaagacagctctcccagctgaagacagctcccctccatgtgatgattcagaaacccaggctccttccgactcctggctgcactgttccttagggtcttgggcctcatgattatctgtattcaatactcagcattgagagaagctgctgctgctaatgctgctgctgctgctgccgccgccgccgctgctgctgctgctgttggtctgaggctgcagtaggtttctgtgcagcattgcagaatccacaccctctggggctttgcggcgcttaagaggcggccgc

SEQ ID NO: 134253 - DNA, 1083 bp, Homo sapiens
atgaggcccaagaccctaaggaacagtgcagccaggagtcggaaggagcctgggtttctgaatcatcacatggaggggagctgtcttcagctgggagagctgtcttcagttggatactggtggccgtttgggcatcctgggccagcccaaggacatcttccagtggccgtttgggcatcctgggtggtagcaggtatctccattgcactctatttgccacctcaccctgaaggaaggtacgagggccccttcaaacgccatacaaagaccttccggagtgcccagtgtgcagattgcctgagagaaaatcccaaagaaggtgtttctgcggcttggcaaagggaggagagagttcatgggttctcaggaatgctacagttaatgcctctaattaacaccccaggtgcttctgctacggctgcactgctgctttgtaatcatttctctgtactctgcctcagacatgcgctctggaaccgtgagccatttgggaggtgcaagaggattccaggaaatggcagcaaggccttagaggagtttaaaggtattggggcagaggtggtgtgtagaggggctcattttgaggatgtgcaatatcctcagactgtggaacaggatgtgcgacagtcccgaggcacaaaggaaggtgagaaagaggcccagagaagagtagctcctcctttgtttgaagctgctggaaggtctctttgtgccaaagagctgagggaagccatgggaacaggttgttttcacagctgtgctgaactccaacttagagctgtccatcccactgctcacacactcgggcaactctggcgaagagggaaaggatggccaccacctcattttgtggaggaggaaactgctttcctcaggccttgctgcatctgctgcttattttgtgaacttaggccaaaggcaggccccacagagtccccacagcttcctgctcaccctgctgcttccctcacaagccctgcaagcctgcaaagatctgagttgccaaccagtatctgtctgtctggtgtctatctctctccctctctctttaaccgggaccaggtatatactcaagataaatga

SEQ ID NO: 134254 - DNA, 776 bp, Homo sapiens
  misc_feature (1)...(776): n = a,t,c or g
ctccttacttattcttactgagatataggtatntgccaggtgtgcccatccaaacaagtctacaagtctgtacaggctggcaagtttacagcgagtaagtttttctcccttcacatatgaggatgtatctgcaccaggaaggtcattgataggtgtgaccatgccaagactgagaggaggtgaagaaaaacccgagaaagaattggccatgatgtaatctgcaatctgctgtaatgctagtaatccagttgggttgtggcctttcttcatctgttcttgaataaggcattccaagtcttcccgaaaggcntgaggtgggganttggagaccagcttgaccaacatggagaatcctcgtctttacttaaaantacaaaattagcccagcgtggtggtgcatgcctgtaatcccagctactcaggaggctgaggcaggagaatagcttgaactcgggaggaggaggatgtggtgagccgagatcatgccattgcactcccagcctgggcaacaagagcggaaactccatttagaatttctccattaagaaatgtactcatttggaaatagaataccactggccaggactttgcaggatctgagtaactcgtttcctctgctccatcatgttgaagtcttgtcgtagatcaggagacatgttcctctccctaatgtattctgggtcattttcattgatgcggtcaaaatatctctctttntgaggcatgctgggaggaggaggagtggtaatcacgcagctggctggcatctgagctca

SEQ ID NO: 134255 - DNA, 2404 bp, Homo sapiens
aataataaacttcatgagggcagagctaattaaaactagtaattgcttaaaattccaaagccatttctggacatataaaatgagagatgaatcttgaagtttttcttttgtaaaacctctttccagttcttaaagtccagtttgctacatcccccaatctgatctaccattgcatattaatgatcaacttaaatgtggtatttagatgtgcaatgtcacattgttataataataattataaaaagactttatttaggcctcaactttctccttttttttgttctttttcagaaaagaaggagtgcggaatttcttctttttcttggatggcgattttgaaggggagccttcaggtgacaggacttcttcgattttctctggagacttaatagtaatctcgatgttttctatggttgtacttgtgcttaacctactcactcgcttagcaagctcatcttcaacatcatgcatatcatccttgccatttactaccatgacaggcacttccatggagatgaagctcttggaaaacagctcatggttttcttctaggccttgttgtttacgttcgattgtcctcttatactcttcaagttctccttctgtgagatgactaaatgggttaggaggagctggtgggccatgatcatcatcttcaaattgcatagtagaaggtggcttatccacaacaattccagcaagcaactgagattgtggtcctgctgttttcaagtcatatcgattttgttcccgaatcttatttctcttttctagtacctcattcgggtttgtgtttaaaggaacaaactgatttggatcttcaatttggataggtgttccaccactaactttagatgagtcttctgctttcatccacgtgattttggttcggggactggtttctccgttccgagactcctcaggcacattcactttcatgtaagtatttggtgagttcagccatcttgttttttcacgcttgttgcctcttgtgccatgtatttggagaggagagagtggcattgtatcgtcttcaaaggaaaaagcagtcacagttgctgggatttccacatcactcttgtgcctaggcttctctcgaatgagaggatgcctgtaagcatagcctgttctataccccaagttgtccagagtcctcataagcccttcaaactcaatttcgccaaccttccattttggatgggaacccatattcacacctcctccaccagacgctgctacagtgtaagtgaaagctttatacttctgaaagtccagtacatggagattgtctactccacctgcacctgctagggcctgcacctgaatctcacaggctagttgcacattaaaaatataatgaaaagcctcctctaatgtttctccaagtgcaaccacaccatgattcctgagtaccagcaccttacaacttggtcccagaaccttctgcagttgaattctctcctcctgttcttcaagtgacccttggtagtcataataggcaacatctcccagaagaagagactcttgagaaattggaaggatcccacatttcatggaggatacagctgctgttgcaagggtatggatgtgtatcacacacttaacatcaggacgtgttgaatagattgcagcatggggactgaatcctgtatggtcaattttcaaattggtacttccctggtcaaccacttctcctattatattgactttcaccaaattggaggctgtagcttcagaaaaagataggcctctgggaattattataatgtggtcttgctccttacttattcttactgagatataggtatttgccaggtgtgcccatccaaacaagtctacaagtctgtacaggctggcaagtttacagcgagtaagtttttctcccttcacatatgaggatgtatctgcaccaggaaggtcattgataggtgtgaccatgccaagactgagaggaggtgaagaaaaacccgagaaagaattggccatgatgtaatctgcaatctgctgtaatgctagtaatccagttgggttgtggcctttcttcatctgttcttgaataaggcattccaagtcttcccgaaaggcaggactttgcaggatctgagtaactcgtttcctctgctccatcatgttgaagtcttgtcgtagatcaggagacatgttcctctccctaatgtattctgggtcattttcattgatgcggtcaaaatatctctcttacgtgaggcatgctgggaggaggaggagtggtaatcacgccttggctggcatctgagctcatgttttaagtctgtggattactcttgttatctcgcagcgcgtagccggctttgtgtttcccctccctccttctcgcgagccgcccgggctgcagcagccgcctggagtcgccgctgcggccgct

SEQ ID NO: 134256 - DNA, 1059 bp, Homo sapiens
aattgtccaaattttttatttactatagggaacatctgttggttttgcccactctgcttccattctcccattttctagtaacgcccctcagtcttcctttggggaatactcccatagcccctcttagtccatgtggttcaaatgaggccgatgccacctccatccccacttccatcctgagaatggtgaagtgacttgctcagccacagagcatgggaaactcaagtttgcttcctaaccagctccctttcttcctcccagtatccaactgaagacagctctcccagctgaagacagctcccctccatgtgatgattcagaaacccaggctccttccgactcctggctgcactgttccttagggtcttgggcctcatgattatctgtattcaatactcagcattgagagaagctgctgctgctaatgctgctgctgctgctgccgccgccgccgctgctgctgctgctgttggtctgaggctgcagtaggtttctgtgcagcattgcagaatccacaccctctggggctctgcggcgcttaagaggcggccgcagcggcggatccggcggctgctgcagcccgggcggctgccgagaaggagggaggggaaacacaaagccggctacgcgctgcgaggtaatctgcgggggagggtccgggggtggcggtgcacggcctgcggcgccgccgggtgggcccgacgcttcgcgcgtctgctggttttccttgaatacttcgattgtctttttctcctgccctttttgtctcattttgtaaggcaatgattcatacttgagtgaattcactgtttcaaagtagattttgttgttgttttggtgtatggtagtggtttcctgggttttggtggttttttctttccatattttccaaaaacttactgtggtagcagccatgggtagaacccaggagcttgtcaactcccagagtttgttgtcagctcttcggaagctagagcctttggcaaaggacagattctttccaaaatacgtgaaatgagcaaggatagcaacttttcctaaagcaaactgtagaaacat

SEQ ID NO: 134257 - DNA, 360 bp, Homo sapiens
gaatggatacagcaaaataatatcttatccatagtcttgcaagacagtcttcatcaaccacaatatgtagaaaagctagagaaaattcttcgttttgtgattaaagaaaaggctcttacattacaggaccttgataatatctgggcagcacaggcaagttggacaaatgcaagtaaaaagcaacgtgaaaagctccttgagttgatacgccgtcttgcagaagatgataaagatggtgtgatggcacacaaagtgttgaaccttctttggaacctggctcagagtgatgatgtgcctgtagacatcatggaccttgctcttagtgcccacataaaaatactagattatagttgttcccag

SEQ ID NO: 134258 - DNA, 3681 bp, Homo sapiens
atggtagtagtctatgccttgttaatgcctgctggtgcacctctggctgatgattcctctgattttcagtttcacttcttgaaaagtggtggcctaccccttgtactgagtatgctaaccagaaataacttcctaccgaatgcagatatggaaactcgaaggggtgcctacctcaatgctcttaaaatagccaagcttttgctaactgccattggctatggtcatgttcgagctgtggcagaagcttgtcagccaggtgtagaaggtgtgaatcccatgacacagatcaaccaagttacccatgatcaagcagtggtgctacaaagtgcccttcagagcattcctaatccatcatccgagtgcatgcttagaaatgtgtcagttcgtcttgctcagcagatatctgatgagaccaatgcaggcaatgagccagacttggaagacgaacaggtttgctgtgaagcattggaagtgatgaccttatgttttgccttgattccaacagccttagatgctcttagtaaagaaaaggcttggcagacattcatcattgacttactattgcactgtcacagcaatatttctgattcaggaggtctgcattggagcctgagagttggcatttctaacaagttcccagataatgctgatgttgctgctctggggaccgtgcttttggaactgccagtacggtatacggcagcagtccccaacccttttggcaccagggcccagtttcatggaagacaatttttccgtggatcagggagacaccttcttaattacgcttacaatagtaatattaatgtacccaatgctgaagttcttctcaataatgaaattgattggcttaaaagaattagggatgatgttaaaagaacaggagaaacgggtattgaagagacgatcttagagggccaccttggagtgacaaaggagttactggcctttcaaacttctgagaaaaaatttcatattggttgtgaaaaaggaggtgctaatctcattaaagaattaattgatgatttcatatttcctgcatccaatgtttacctacagtatatgagaaatggagagcttccagctgaacaggctattccggtctgtggttcaccacctacaattaatgctggttttgaattacttgtagcattagctgttggctgtgtgaggaatctcaaacaaatagtagattctttgactgaaatgtattacattggcacagcaataactacttgtgaagcacttactgagtgggaatatctgccacctgttggaccccgcccacccaaaggattcgtggggctgaaaaatgccggtgctacttgttacatgaattctgtgattcagcaactctacatgattccttccattaggaacggtattcttgccattgaaggcacaggtagtgatgtagatgatgatatgtctggggatgagaagcaggacaatgagagcaatgttgatcccagggatgatgtatttggatatcctcaacaatttgaagataaaccagcattaagtaaaactgaagatagaaaagagtacaacattggtgtcctaagacaccttcaggtcatctttggtcatttagctgcttctcgactgcaatactatgtgcccagaggattttggaaacagttcaggtacgaatgtgaagaatcttttacgaccctaaacgtagacattagaaatcaccaaaatcttcttgattctttggaacagtatgtcaaaggagatttactagaaggtgcaaatgcatatcattgtgaaaaatgcaataaaaaggaaaccaccttcgtgggaacaacagtaaacatcaaacaggttgataccgtaaagcgcttgctgattaaaaaattacctcctgttcttgctatacaactaaagcgatttgactatgactgggaaagagaatgtgcaatcaagttcaatgattattttgaatttcctcgagagctggacatggaaccttacacagttgcaggtgtcgcaaagctggaaggggataatgtaaacccagagagtcagttgatacaacagagtgagcagtctgaaagtgagacagcaggaagcacaaaatacagacttgtgggtgtgctcgtacacagtggtcaagcgagtggggggcattattattcttacatcatccaaaggaatggtggagatggtgagagaaatcgctggtataaatttgatgatggtgatgtaacagaatgtaaaatggatgatgacgaagaaatgaaaaaccagtgttttggtggagagtacatgggagaagtgtttgatcacatgatgaagcgtatgtcatacaggcgccagaaaaggtggtggaatgcttatatacttttttatgaacgaatggacacaatagaccaagatgatgagttgataagatatatatcagagcttgctatcaccaccagacctcatcagattattatgccatcagccattgagagaagtgtacggaaacagaacgtacaattcatgcataaccgaatgcagtacagtatggagtattttcagtttatgaaaaaactgcttacatgtaatggcgtttacttaaaccctcctcccggtgtggcagagaagacacagcttctgaaattgagtgtacctgctacttttatgcttgtgtctttagatgaaggtccaggtcctccaatcaaataccagtatgctgaattaggcaaattatactcagtagtgtcacagctgatccgctgttgcaatgtctcttcaagaatgcagtcttcaatcaatggtaatcctcctcttcccaatccttttggtgatcctaatttatcacaacctataatgccaattcagcagaatgtggcagacattttatttgtgagaacaagttatgtgaagaaaatcattgaagactgcagtaattcagaggaaaccgtcaaattgcttcgtttttgctgctgggagaatcctcagttctcatctactgtcctcagtgaacttctctggcaggttgcatattcctatacctatgaactgcggccctatttggatctgcttttgcaaatcttactgattgaggactcctggcaaactcacagaattcataatgcactgaaaggaattccagatgaccgagatgggctgtttgacacaatccagcgctctaagaatcactatcaaaaaagagcataccagtgtataaaatgtatggtagctctatttagtaactgtcctgttgcttaccaaatcctgcagggcaatggagatcttaaaagaaagtggacctgggcagtggaatggcttggagatgaacttgaaagaagaccatatactggcaatcctcagtacacttacaacaattggtctcccccagtgcaaagcaatgaaacgtccaatggttatttcttggagagatcacatagtgctaggatgacacttgcaaaagcttgtgaactctgtccagaggaggagccagatgaccaagatgctccagatgaacatgagtcgcctccacctgaagatgccccattgtacccccattcacctggatctcagtatcaacagaataaccatgtgcatggacagccatatacaggcccagcagcacatcacatgaacaaccctcagagaactggccaacgagcacaagaaaattatgaaggcagtgaagaagtatccccacctcaaaccaaggatcaatga

SEQ ID NO: 134259 - DNA, 293 bp, Homo sapiens
atcaaccaagttacccatgatcaagcagtggtgctacaaagtgcccttcagagcattcctaatccatcatccgagtgcatgcttagaaatgtgtcagttcgtcttgctcagcagatatctgatgagaccaatgcaggcaatgagccagacttggaagacgaacaggtttgctgtgaagcattggaagtgatgaccttatgttttgccttgattccaacagccttagatgctcttagtaaagaaaaggcttggcagacattcatcattgacttactattgcactgtcacagcaa

SEQ ID NO: 134260 - DNA, 658 bp, Homo sapiens
tttttttttttttacacattagcatcaggccatttattacaaaacactatacactttccactgcaggcgggttatatattgacagcaaatttctgcagataagacagtgaataaactctccactccatgttgattaggaatagtttttctagttttaaatattagccagacacagaaaaaggttggactgtaaggcctgggtgcacagtcttgatggaaccagttaattatgtgcatttcattgatccttggtttgaggtggggatacttcttcactgccttcataattttcttgtgcttcctgctgtctcactttcagactgctcactctgttgtatcaactgactctctgggtttacattatccccttccagctttgcgacacctgcaactgtgtaaggttccatgtccagctctcgaggaaattcaaaataatcattgaacttgattgcacattctctttcccagtcatagtcaaatcgctttagttgtttagcaagaacaggaggtaattttttaatcagcaagcgctttacggtatcaacctttttattgcatttttcacaatgatatgcatttgcaccttctagtaaactcctttgacatactggtccaaagaatcaagaagattttggggatttctaatggctacgtttag

SEQ ID NO: 134261 - DNA, 1126 bp, Homo sapiens
gttgataccgtaaagcgcttgctgattaaaaaattacctcctgttcttgctatacaactaaagcgatttgactatgactgggaaagagaatgtgcaatcaagttcaatgattattttgaatttcctcgagagctggacatggaaccttacacagttgcaggtgtcgcaaagctggaaggggataatgtaaacccagagagtcagttgatacaacagagtgagcagtctgaaagtgagacagcaggaagcacaaaatacagacttgtgggtgtgctcgtacacagtggtcaagcgagtggggggcattattattcttacatcatccaaaggaatggtggagatggtgagagaaatcgctggtataaatttgatgatggtgatgtaacagaatgtaaaatggatgatgacgaagaaatgaaaaaccagtgttttggtggagagtacatgggagaagtgttttgatcacatgatgaagcgtatgtcatacaggcgccagaaaaggtggtggaatgcttatatacttttttatgaacgaatggacacaatagaccaagatgatgagttgataagatatatatcagagcttgctatcaccaccagacctcatcagattattatgccatcagccattgagagaagtgtacggaaacagaacgtacaattcatgcataaccgaatgcagtacagtatggagtattttcagtttatgaaaaaactgcttacatgtaatggcgtttacttaaaccctcctcccggtgtggcagagaagacacagcttctgaaattgagtgtacctgctacttttatgcttgtgtctttagatgaaggtccaggtcctccaatcaaataccagtatgctgaattaggcaaattatactcagtagtgtcacagctgatccgctgttgcaatgtctcttcaagaatgcagtcttctatcaatgatgcagaaacggctttcaataaaattcagcatcgtttcatgttaaaaatcctcaacaagcaaggcattgaagaaacatacatcaaaataacaagagccatctatgacaaacccacagccaacatcatactgaatgggcaaatgctggaagcattgcccttgagaaacagaacaagacaagggtga

SEQ ID NO: 134262 - DNA, 1542 bp, Homo sapiens
ggcaaattatactcagtagtgtcacagctgatccgctgttgcaatgtctcttcaagaatgcagtcttcaatcaatggtaatcctcctcttcccaatccttttggtgatcctaatttatcacaacctataatgccaattcagcagaatgtggcagacattttatttgtgagaacaagttatgtgaagaaaatcattgaagactgcagtaattcagaggaaaccgtcaaattgcttcgtttttgctgctgggagaatcctcagttctcatctactgtcctcagtgaacttctctggcaggttgcatattcctatacctatgaactgcggccctatttggatctgcttttgcaaatcttactgattgaggactcctggcaaactcacagaattcataatgcactgaaaggaattccagatgaccgagatgggctgtttgacacaatccagcgctctaagaatcactatcaaaaaagagcataccagtgtataaaatgtatggtagctctatttagtaactgtcctgttgcttaccaaatcctgcagggcaatggagatcttaaaagaaagtggacctgggcagtggaatggcttggagatgaacttgaaagaagaccatatactggcaatcctcagtacacttacaacaattggtctcccccagtgcaaagcaatgaaacgtccaatggttatttcttggagagatcacatagtgctaggatgacacttgcaaaagcttgtgaactctgtccagaggaggtaaaaaaagccaccagtgtgcagcagatagaaatggaagagagcaaagagccagatgaccaagatgctccagatgaacatgagtcgcctccacctgaagatgccccattgtacccccattcacctggatctcagtatcaacagaataaccatgtgcatggacagccatatacaggcccagcagcacatcacatgaacaaccctcagagaactggccaacgagcacaagaaaattatgaaggcagtgaagaagtatccccacctcaaaccagggatccaatgaaaatgcacataaattaactggttcccatccaaggactgtgccacccccgggccctaacagtcccaacccttttcctgtgtcctggcctaatatttaaaacctagaaaaacctatcccctaatccaaacatggaagtggagagtttaattccactgtccttatcctgcagaaatttgcctgtcaatatataacccgcctgcagtggaaagtgtatagtgttttgtaataaatggcctgatgcctaatgtgtaaatggcaaaggtgtatattagtatattaatgttgactgttaattcttaagcaagaaactttttttcttgatgagactcacagatctacacaaactacaaaagttaattttcttgttacacccactgcactctgcaaccagtgttgcctgcctgcctcatgggcagttgggatcagactcctttacaaaaatgacaatgtaaaaaccatcagtaccataacagagcccatccatgtcatccacaccaatattt

SEQ ID NO: 134263 - DNA, 7788 bp, Homo sapiens
atgacagccacgactcgtggctctccggtcggagggaatgacaaccagggccaggctcctgatggacagtctcagccccccctccaacagaatcagacttcatcgcctgattcttccaatgaaaattccccggcaactcccccagatgagcaaggtcaaggtgatgccccaccacagcttgaagatgaggaacctgcatttccacatactgacttggccaagttggatgacatgatcaacaggcctcgatgggtggttccagttttgccgaaaggggaattagaagtgcttttagaagctgctattgatcttagtaaaaagggccttgatgttaaaagtgaagcatgtcagcgatttttccgtgatgggctaacaatatcattcactaaaattcttacagatgaagcagtgagtggctggaagtttgaaattcatgtgagtcttgcatttgactttaaaggatcagatttacatagtgatgcctgtgagtgggaagagaggtgtattattaacaatactcatcgtctggtggagctatggtgtggcccaagttgtccccaagactggtttcgcacttttagaacttcttgccatggccttaaatcctcattgcaaattccatatctacaatggtacacgtccatgtgaatcagtttcctcaagtgttcagttgcctgaagatgaactctttgctcgttctccagatcctcgatcaccaaagggttggctagtggatcttctcaacaaatttggcactttaaatgggttccagattttgcatgatcgttttattaatggatcagcattaaacgttcaaataattgcagcccttattaaaccatttgggcaatgctatgagtttctcactcttcatacagtgaaagaagtactttcttccaataatagaaatggttccacagtttttagaaaacttaactgatgaagagctgaaaaaagaagcaaagaatgaagccaaaaatgatgctctttcaatgattattaaatctctgaagaatttagcttcaagggttccaggacaagaagaacctgttaaaagcttagaaatatttaggttaaaaatgatacttagattatcgcaagtttcttctctcaatggaaagatgaatgcagtgaatgaagttaataaggtgatatctagtgtatcatgctatcctcatcgacatggtaatcctgaggaggaagagtggctcacagctgaacgaatggcagaatggatacagcagaacaatatcttatccatagtgttgcgagatagtcttcatcagccacagtatgtagaaaagttagagaagattcttcgttttgtcatcaaagaaaaagctctgaccttacaggatcttgataatatctgggcagcacaggcagggaaacatgaagccattgtgaagaatgtacatgatctcctggcaaaattggcatgggcttttttctcctgaacaacttgatcatctttttgattgttttaaggccagttggacaaatgcgagtaaaaagcaacgtgaaaagctacttgagctgatacgtcgtcttgcagaagatgataaagatggtgtgatggcacacaaagtgttgaaccttctgtggaatctggctcacagtgatgatgtgcctgtagatatcatggacctggctctcagtgcccacataaaaatactagattacagttgctcccaggaccgtgatacacaaaagatccaatggatagatcgctttatagaagaacttcgcacaaatgacaaatgggttattcccgcactgaaacaaattagagaaatttgtagtttgtttggtgaagcgcctcaaaatttgagtcaaactcagcgaagtccccatgtgttttatcgccatgacttaatcaatcaacttcaacacaatcatgccctagttactttggtagcagaaaaccttgcaacttacatggaaagcatgagactatatgctagagaccatgaagattatgacccacaaactgtgaggctgggaagtagatatagtcatgttcaagaagttcaagaacggcttaacttccttagatttttattgaaggatggtcagctgtggctatgtgctcctcaggcaaaacaaatatggaaatgcttagctgagaatgcagtttacctttgtgatcgtgaagcctgttttaagtggtattccaagttgatgggggatgaaccagacttagatcctgatattaataaggacttctttgaaagtaatgtgcttcagcttgatccttctctgttaactgaaaatggaatgaagtgttttgagcgattcttcaaagctgtgaattgtcgagaaggaaaactagtagcaaaaaggagagcctatatgatggatgacttggagttaataggattagattacctttggagggtcgtgattcagagtaatgatgatattgccagcagagctatagatctcctcaaagagatatacacgaaccttggtccaagactacaagtcaatcaggtggtgatccatgaagacttcattcagtcttgttttgatcgtctgaaggcttcctatgacacattgtgtgttttggatggtgacaaagacagtgttaattgtgcaagacaggaagctgttcgaatggttcgagtattaactgttttaagggaatatataaatgaatgtgacagtgattatcatgaggaaagaacaattctccctatgtcgagagcattccgcggtaaacacctctcttttgtagttcgatttccaaaccagggcagacaggttgatgacttggaggtatggtctcatacaaatgatacaattggttcagtacgacgatgtattctcaatcgtattaaagccaacgtagcccatacaaaaattgagctctttgtgggcggtgagctgatagatcctgcagatgatagaaagttgattggacaattaaacttaaaagataaatcgcttattacagccaaacttacacagataagttccaatatgccttcaagccctgatagctcttctgattcctccactggatctcctggaaaccatggtaatcattacagtgatggtcccaatccagaagtggaaagctgtttgcctggagtgataatgtcactgcatcccagatacatctcttttctttggcaagttgcagacttaggtagcagcctaaatatgccaccccttagagatggagcaagagtacttatgaaacttatgccgccagatagcacaacgatagaaaaattaagagctatttgtttagaccatgccaaacttggagaaagcagccttagtccatctcttgactcacttttctttggtccttcagcctcacaagtgctatatctaacagaggtagtctatgccttgttaatgcctgctggtgcacctctggctgatgattcctctgattttcagtttcacttcttgaaaagtggtggcctaccccttgtactgagtatgctaaccagaaataacttcctaccgaatgcagatatggaaactcgaaggggtgcctacctcaatgctcttaaaatagccaagcttttgctaactgccattggctatggtcatgttcgagctgtggcagaagcttgtcagccaggtgtagaaggtgtgaatcccatgacacagatcaaccaagttacccatgatcaagcagtggtgctacaaagtgcccttcagagcattcctaatccatcatccgagtgcatgcttagaaatgtgtcagttcgtcttgctcagcagatatctgatgaggcttcaagatatatgcctgatatttgtgtaattagagctatacaaaaaattatctgggcatcaggatgtgggtcgttacagctagtatttagcccaaatgaagaaatcactaaaatttatgagaagaccaatgcaggcaatgagccagacttggaagacgaacaggtttgctgtgaagcattggaagtgatgaccttatgttttgccttgattccaacagccttagatgctcttagtaaagaaaaggcttggcagacattcatcattgacttactattgcactgtcacagcaatatttctgattcaggaggtctgcattggagcctgagagttggcatttctaacaagttcccagataatgctgatgttgctgctctggggaccgtgcttttggaactgccagtacggtatacggcagcagtccccaacccttttggcaccagggcccagtttcatggaagacaatttttccgtggatcagggagacaccttcttaattacgcttacaatagtaatattaatgtacccaatgctgaagttcttctcaataatgaaattgattggcttaaaagaattagggatgatgttaaaagaacaggagaaacgggtattgaagagacgatcttagagggccaccttggagtgacaaaggagttactggcctttcaaacttctgagaaaaaatttcatattggttgtgaaaaaggaggtgctaatctcattaaagaattaattgatgatttcatatttcctgcatccaatgtttacctacagtatatgagaaatggagagcttccagctgaacaggctattccggtctgtggttcaccacctacaattaatgctggttttgaattacttgtagcattagctgttggctgtgtgaggaatctcaaacaaatagtagattctttgactgaaatgtattacattggcacagcaataactacttgtgaagcacttactgagtgggaatatctgccacctgttggaccccgcccacccaaaggattcgtggggctgaaaaatgccggtgctacttgttacatgaattctgtgattcagcaactctacatgattccttccattaggaacggtattcttgccattgaaggcacaggtagtgatgtagatgatgatatgtctggggatgagaagcaggacaatgagagcaatgttgatcccagggatgatgtatttggatatcctcaacaatttgaagataaaccagcattaagtaaaactgaagatagaaaagagtacaacattggtgtcctaagacaccttcaggtcatctttggtcatttagctgcttctcgactgcaatactatgtgcccagaggattttggaaacagttcaggctttggggtgagcctgttaatctgcgtgaacaacacgatgctttagaattttttaattcattggtggatagtttagatgaagctttaaaagctttaggacatccagctatgctaagtaaagtcttaggaggttcctttgctgatcagaagatctgccaaggctgcccacataggtacgaatgtgaagaatcttttacgaccctaaacgtagacattagaaatcaccaaaatcttcttgattctttggaacagtatgtcaaaggagatttactagaaggtgcaaatgcatatcattgtgaaaaatgcaataaaaaggttgataccgtaaagcgcttgctgattaaaaaattacctcctgttcttgctatacaactaaagcgatttgactatgactgggaaagagaatgtgcaatcaagttcaatgattattttgaatttcctcgagagctggacatggaaccttacacagttgcaggtgtcgcaaagctggaaggggataatgtaaacccagagagtcagttgatacaacagagtgagcagtctgaaagtcgagacagcaggaagcacaaaatacagacttgtggggtgtgctccgtacacagtggtcaagcgagtggggggcattattattcttacatcatccaaaggaatggtggagatggtgagagaaatcgctggtataaatttgatgatggtgatgtaacagaatgtaaaatggatgatgacgaagaaatgaaaaaccagtgttttggtggagagtacatgggagaagtgtttgatcacatgatgaagcgtatgtcatacaggcgccagaaaaggtggtggaatgcttatatacttttttatgaacgaatggacacaatagaccaagatgatgagttgataagatatatatcagagcttgctatcaccaccagacctcatcagattattatgccatcagccattgagagaagtgtacggaaacagaacgtacaattcatgcataaccgaatgcagtacagtatggagtattttcagtttatgaaaaaaactgttaccttgtaagggcgtttacttaaaccctcctcccgggcaagatcacctgttgcctgaagcagaagaaatcactatgatcagtattcaacttgctgctaggttcctctttactacaggatttcacacaaagaaagtagtccgtggctctgccagtgattgcaagaatgtacgtttttggtttgctcataacgtcctttttaatgtttcaaatcgcttctccgaataccttctggagtgccctagtgcagaagtgaggggtgcgtttgcaaaacttatagtctttattgcacatttttccttgcaagatgggccatgtccttcaccttttgcctctcctgggaccttctagtcaggcttatgacaacttaagcttgagtgatcacttactaagagcagtactaaatctcttgagaagggaagtttcagagcatgggcgttcatttacagcagtatttcaacctgtttgtaatgtatgccaatttaggtgtgggcagaggaagacacagcttctgaaattgagtgtacctggctacttttatggcttgtgtctttaggatgaaggtccagggtccctccaattcaaatacccagtatggctggaattagggcaaattattactcagtaggtgttcacaggctggatcccgctgttgcaatgtctccttcaaggaatgcagtcttcaatcaatggtaatcctcctcttcccaatccttttgggtgatcctaatttatccacaacctattaatgccaattcaggcagaatgtgggcagacattttatttgtgagaacaagtttatgtgaaggaaatcattggagactgcagtaattccagagggaaccggtccaaattggcttcggtttttggctgctggggagaatcctcagttctcatctactgtcctcagtggaacttatctgggcaggttgcatattcctatacctatggaactgcggccctatttgggatctgcttttgcaaatctttactggattgagggactcctgggccaaacttcacaggaatttcataatggcactgaaagggatttccaggtggaccgagatggggctgttttgacacaatccagcgctctaagaatcactatcaaaaaagagcataccagtgtataaaatgtatggtagctctatttagtaactgtcctgttgcttaccaaatcctgcagggcaatggagatcttaaaagaaagtggacctgggcagtggaatggcttggagatgaacttgaaagaagaccatatactggcaatcctcagtacacttacaacaattggtctcccccagtgcaaagcaattgaaacgtccaatggttatttcttggagagatcacatagtgctaggatgacacttgcaaaagcttgtgaactctgtccagaggaggagccagatgaccaagatgctccagatgaacatgagtcgcctccacctgaagatgccccattgtacccccattcacctggatctcagtatcaacagaataaccatgtgcatggacagccatatacaggcccagcagcacatcacatgaacaaccctcagagaactggccaacgagcacaagaaaattatgaaggcagtgaagaagtatccccacctcaaaccaaggatcaatga

SEQ ID NO: 134264 - DNA, 9332 bp, Homo sapiens
ttaaccctgtcgtggccacacaccccgccagtccctgccgcccagcccctcccgagtggtgtgccagatcttttcgggcctcccttccccaacttcggtcctagagccacctctgccctcgtcccgctcctgagccgaggggcatggaacaggatttctggccgtagcacgaccctgaaggggccagccggaagaaacagtactgcgcgaacaatctttaccgcattgtcttcccctcccccaccctagctctccgggttcccggcggctcgcgccgaagcccggccccctcagcggctcgcgctgctctcccagccttgacggcccggggtggagggagagaagagggggcagctgagcgggagggggctgggcaggagcagggggagggccgaaaggaggggcctgaaaggggcgggccctgacgggggcggagaacttcgggtcttgggcggctctggggctagtgggagtctgcgccgccgccgccgccgccaccgctgctgccgccgtcgccgctaccgccgccgccaacagctcccgggcctcgcgggagcccgccgccgccgcctctctctcacgggaggcggccgccttagcgcccggtgcttgggtcggcgccgggagctgaggagcgagcatacttcaaaagcacaaccaggacatggagcggggacagaggcggcgactaggggaaggtgaagccgtcgctgcaggaggaggagcaggaggaggtgacgcaggagaaacgcaccgcccggagcccgtctgagctcagcgagacgcccagcctgaggggaggaaggggaagagggccgtcgccggcacagcgaggaggaggaggcgggcgcggcgaggagcgagttccggcgccggtgtgcagccttttggttgagacgcccgcagccccgaagcccggccgccgcagcactttcgatacacttttgtttgccggtcacccccgggcctgggattgcacccaaggttaggtctcgtcccggggaccgaagccccaccgtcgcctggtgcctcccgcctccgtgtgccctggttgtgagaagacgtctgtgtcgtgcggttatgcaatggtctctgcaagatggtttattcttgaattggacctttttaagactgacaaatgctggtacttcatcgttctataagtggactataatttcttttctcaagacaactacataagcagacaaaattgcaaagatctgccctgtgtcgagtatgacagccacgactcgtggctctccggtcggagggaatgacaaccagggccaggctcctgatggacagtctcagccccccctccaacagaatcagacttcatcgcctgattcttccaatgaaaattccccggcaactcccccagatgagcaaggtcaaggtgatgccccaccacagcttgaagatgaggaacctgcatttccacatactgacttggccaagttggatgacatgatcaacaggcctcgatgggtggttccagttttgccgaaaggggaattagaagtgaaattagaagctaatattgatcttagtaaaaagggccttgatgttaaaagtgaagcatgtcagcgatttttccgtgatgggctaacaatatcattcactaaaattcttacagatgaagcagtgagtggctggaagtttgaaattcataggtgtctggtggagctatgtgtggccaagttgtcccaagactggtttccacttttagaacttcttgccatggccttaaatcctcattgcaaattccatatctacaatggtacacgtccatgtgaatcagtttcctcaagtgttcagttgcctgaagatgaactctttgctcgttctccagatcctcgatcaccaaagggttggctagtggatcttctcaacaaatttggcactttaaatgggttccagattttgcatgatcgttttattaatggatcagcattaaacgttcaaataattgcagcccttattaaaccatttgggcaatgctatgagtttctcactcttcatacagtgaaaaagtactttcttccaataatagaaatggttccacagtttttagaaaacttaactgatgaagaactgaaaaaagaagcaaagaatgaagccaaaaatgatgctctttcaatgattattaaatctttgaagaatttagcttcaagggttccaggacaagaagaaactgttaaaaacttagaaatatttaggttaaaaatgatacttagattattgcaaatttcttctttcaatggaaagatgaatgcactgaatgaagttaataaggtgatatctagtgtatcatactatactcatcgacatggtaatcctgaggaggaagagtggctcacagctgaacgaatggcagaatggatacagcagaacaatatcttatccatagtgttgcgagatagtcttcatcagccacagtatgtagaaaagttagagaagattcttcgttttgtcatcaaagaaaaagctctgaccttacaggatcttgataatatctgggcagcacaggcagggaaacatgaagccattgtgaagaatgtacatgatctcctggcaaaattggcatgggatttttctcctgaacaacttgatcatccttttgattgttttaaggccagtcggacaaatgcgagtaaaaagcaacgtgaaaagctacttgagctgatacgtcgtcttgcagaagatgataaagatggtgtgatggcacacagagtgttgaaccttctgtggaatctggctcacagtgatgatgtgcctgtagatatcatggacctggctctcagtgcccacataaaaatactagattacagttgctcccaggaccgtgatacacaaaagatccaatggatagatcgctttatagaagaacttcgcacaaatgacaaatgggttattcccgcactgaaacaaattagagaaatttgtagtttgtttggtgaagcgcctcaaaatttgagtcaaactcagcgaagtccccatgtgttttatcgccatgacttaatcaatcaacttcaacacaatcatgccctagttactttggtagcagaaaaccttgtaacttacatggaaagcatgagactatatgctagagaccatgaagattatgacccacaaactgtgaggctgggaagtagatatagtcatgttcaagaagttcaagaacggcttaacttccttagatttttattgaaggatggtcagctgtggctatgtgctcctcaggcaaaacaaatatggaaatgcttagctgagaatgcagtttacctttgtgatcgtgaagcctgttttaagtggtattccaagttgatgggggatgaaccagacttagatcctgatattaataaggacttctttgaaagtaatgtgcttcagcttgatccttctctgttaactgaaaatggaatgaagtgttttgagcgattcttcaaagctgtgaattgtcgagaaggaaaactagtagcaaaaaggagagcctatatgatggatgacttggagttaataggattagattacctttggagggtcgtgattcagagtaatgatgatattgccagcagagctatagatctcctcaaagagatatacacgaaccttggtccaagactacaagtcaatcaggtggtgatccatgaagacttcattcagtcttgttttgatcgtctgaaggcttcctatgacacattgtgtgttttggatggtgacaaagacagtgttaattgtgcaagacaggaagctgttcgaatggttcgagtattaactgttttaagggaatatataaatgaatgtgacagtgattatcatgaggaaagaacaattctccctatgtcgagagcattccgcggtaaacacctctcttttgtagttcgatttccaaaccagggcagacaggttgatgacttggaggtatggtctcatacaaatgatacaattggttcagtacgacgatgtattctcaatcgtattaaagccaacgtagcccatacaaaaattgagctctttgtgggcggtgagctgatagatcctgcagatgatagaaagttgattggacaattaaacttaaaagataaatcgcttattacagccaaacttacacagataagttccaatatgccttcaagccctgatagctcttctgattcctccactggatctcctggaaaccatggtaatcattacagtgatggtcccaatccagaagtggaaagctgtttgcctggagtgataatgtcactgcatcccagatacatctcttttctttggcaagttgcagacttaggtagcagcctaaatatgccaccccttagagatggagcaagagtacttatgaaacttatgccgccagatagcacaacgatagaaaaattaagagctatttgtttagaccatgccaaacttggagaaagcagccttagtccatctcttgactcacttttctttggtccttcagcctcacaagtgctatatctaacagaggtagtctatgccttgttaatgcctgctggtgcacctctggctgatgattcctctgattttcagtttcacttcttgaaaagtggtggcctaccccttgtactgagtatgctaaccagaaataacttcctaccgaatgcagatatggaaactcgaaggggtgcctacctcaatgctcttaaaatagccaagcttttgctaactgccattggctatggtcatgttcgagctgtggcagaagcttgtcagccaggtgtagaaggtgtgaatcccatgacacagatcaaccaagttacccatgatcaagcagtggtgctacaaagtgcccttcagagcattcctaatccatcatccgagtgcatgcttagaaatgtgtcagttcgtcttgctcagcagatatctgatgaggcttcaagatatatgcctgatatttgtgtaattagagctatacaaaaaattatctgggcatcaggatgtgggtcgttacagctagtatttagcccaaatgaagaaatcactaaaatttatgagaagaccaatgcaggcaatgagccagacttggaagacgaacaggtttgctgtgaagcattggaagtgatgaccttatgttttgccttgattccaacagccttagatgctcttagtaaagaaaaggcttggcagacattcatcattgacttactattgcactgtcacagcaaaactgttcgtcaggtggcacaggagcagttctttttaatgtgcaccagatgttgcatgggacaccggcctctacttttcttcattactctactctttactgttttggggagcacagcaagagagagagctaaacactcaggcgactactttactcttttaagacaccttcttaattacgcttacaatagtaatattaatgtacccaatgctgaagttcttttcaataatgaaattgattggcttaaaagaattagggatgatgttaaaagaacaggagaaacgggtattgaagagaccgatcttagagggccaccttggagtgacaaaggagttactggcctttcaaacttctgagaaaaaatttcatattggttgtgaaaaaggaggtgctaatctcattaaagaattaattgatgatttcatatttcctgcatccaatggtttacctacagtatatgagaaatggagagcctccagctgaacaggctattccggtctgtggttcaccacctacaattaatgctggttttgaattacttgtagcattagctgttggctgtgtgaggaatctcaaacaaatagtagattctttgactgaaatgtattacattggcacagcaataactacttgtgaagcacttactgagtgggaatatctgccacctgttggaccccgcccacccaaaggattcgtggggctgaaaaatgccggtgctacttgttacatgaattctgtgattcagcaactctacatgattccttccattaggaacggtattcttgccattgaaggcacaggtagtgatgtagatgatgatatgtctggggatgagaagcaggacaatgagagcaatgttgatcccagggatgatgtatttggatatcctcaacaatttgaagataaaccagcattaagtaaaactgaagatagaaaagagtacaacattggtgtcctaagacaccttcaggtcatctttggtcatttagctgcttctcgactgcaatactatgtgcccagaggattttggaaacagttcaggctttggggtgagcctgttaatctgcgtgaacaacacgatgctttagaattttttaattcattggtggatagtttagatgaagctttaaaagctttaggacatccagctatgctaagtaaagtcttaggaggttcctttgctgatcagaagatctgccaaggctgcccacataggtacgaatgtgaagaatcttttacgaccctaaacgtagacattagaaatcaccaaaatcttcttgattctttggaacagtatgtcaaaggagatttactagaaggtgcaaatgcatatcattgtgaaaaatgcaataaaaaggttgataccgtaaagcgcttgctgattaaaaaattacctcctgttcttgctatacaactaaagcgatttgactatgactgggaaagagaatgtgcaatcaagttcaatgattattttgaatttcctcgagagctggacatggaaccttacacagttgcaggtgtcgcaaagctggaaggggataatgtaaacccagagagtcagttgatacaacagagtgagcagtctgaaagtgagacagcaggaagcacaaaatacagacttgtgggtgtgctcgtacacagtggtcaagcgagtggggggcattattattcttacatcatccaaaggaatggtggagatggtgagagaaatcgctggtataaatttgatgatggtgatgtaacagaatgtaaaatggatgatgacgaagaaatgaaaaaccagtgttttggtggagagtacatgggagaagtgtttgatcacatgatgaagcgtatgtcatacaggcgccagaaaaggtggtggaatgcttatatacctttttatgaacgaatggacacaatagaccaagatgatgagttgataagatatatatcagagcttgctatcaccaccagacctcatcagattattatgccatcagccattgagagaagtgtacggaaacagaacgtacaattcatgcataaccgaatgcagtacagtatggagtattttcagtttatgaaaaaactgcttacatgtaatggcgtttacttaaaccctcctcccgggcaagatcacctgttgcctgaagcagaagaaatcactatgatcagtattcaacttgctgctaggttcctctttactacaggatttcacacaaagaaagtagtccgtggctctgccagtgattggtatgatgcattgtgtattctccttcgtcacagcaagaatgtacgtttttggtttgctcataacgtcctttttaatgtttcaaatcgcttctccgaataccttctgggagtgccctaagtgcaagaagtgaggggtgcgtttgcaaaacttatagtctttattgcacatttttccttgcaagatgggccatggtccttcaccttttgcctctcctggaccttctagtcaggcttatgacaacttaagcttgagtgatcacttactaagagcagtactaaatctcttgagaagggaagtttcagagcatgggcgtcatttacagcagtatttcaacctgtttgtaatgtatgccaatttaggtgtggcagagaagacacagcttctgaaattgagtgtacctgctacttttatgcttgtgtctttagatgaaggtccaggtcctccaatcaaataccagtatgctgaattaggcaaattatactcagtagtgtcacagctgatccgctgttgcaatgtctcttcaagaatgcagtcttcaatcaatggtaatcctcctcttcccaatccttttggtgatcctaatttatcacaacctataatgccaattcagcagaatgtggcagacattttatttgtgagaacaagttatgtgaagaaaatcattgaagactgcagtaattcagaggataccatcaaattacttcgctttttgctcttgggagaatcctcagttctcatctactgtcctcagcgaacttctctggcaggttgcatattcatatacctatgaacttcggccatatttagatctacttttccaaattttactgattgaggactcctggcagactcacagaattcataatgcaccttaaagggaattccagatgaccagagatgggctgttcgatacaatacaggcgctccgaagaatcactatcaaaaaacggagcatatcagtgcataaaatgtatggtagctctatttagcagttgtcctgttgcttaccagatcttacagggtaacggagatcttaaaagaaaatggacctggggcagtggaatggcttggagatgaacttgaaagaagaccatatactggcaatcctcagtacacttacaacaattggtctccccccagtgcaaagcaattgaaacgtcgaatgattattccttggagagatcacatagtgctagggatgacacttgcaaaggcttgtgaactctgtccagaggaggagccagatgaccaagatgctcccagatgaacatggtgtccgcctccacctgatagatgcccccattgtacccccccattccacctgggatcttcagtatcaaacagaataacccatgtgccatggacagcccatatacaggccccagcacgcacatcacatgaacaaccctcaagaggaactggcccaacgagcaccaagaaaattatgaaggcagttgaagaagtatccccaccttcaaaccaaggatcaatggaaatggcacataattaactggttccatcaagactgtgcaccccaggccttacagttccaaccttttttctgtgtctggctaatatttaaaactagaaaaactattcctaatcaacatggagtggagagtttattcactgtcttatctgcagaaatttgctgtcaatataataaccgccttgcagtggaaaagtgtatagtgttttgtaataaatggccctaatgctaatgtgtaaatggcaaaggtgtatatagtatattaatgttgactgttaattcttaagcaagaaacttttttcttgatgagactcacagatctacacaaactacaaaagttaattttcttgttacacccactgcactctgcaaccagtgttgcctgcctcatggcagttggatcagctcctttacaa

SEQ ID NO: 134265 - DNA, 710 bp, Homo sapiens
gagtgtcacagaagagaaagtcaatgaaattaaagaagacagtcattgtggagaaacttttaccccagttccagatgacaggctgaacttccagaagaagaaagcttctcctgaagtaaaatcatgtgacagctttgtgtgtgaagttggcctagcgaaacctcaaaatggtcgccgccgctttctgcgcgatgtcgttcgcacagcaggcgggctggctgccgtgggtgtggcgctggggttacaacagcaaaccggacgcgcatctggcgtgcggttgcgcccgcccggagccataaacgagaacgcctttgccagtgcctgtgtgcgttgcggtcagtgtgttcaggcttgcccttacgacaccttaaaactggcgacgctggcctctggtctgtcggcgggcacgccatattttgtcgcacgggatattccttgcgaaatgtgtgaggacattccgtgcgccaaagtgtgcccaagcggtgcgctggatcgtgagattgaatcgatcgacgacgcgcggatggggctggcggtactggtggaccatgaaaactgtctcaactttcaagggctgcgctgcgatgtttgttatcgcgaatgcccgaaaattgatgaagccatcaccctggagctggagcgcaacacgcgtaccggtaagcacgcccgctttctgccgacagttcacagcgacgcctgtaccgggtgcg

SEQ ID NO: 134266 - DNA, 1705 bp, Homo sapiens
cggccgctggatgtgggtgggccggcagccgggactccgggcgtcctgtcccgtccctgcccgtcgactgcggccttggccccgaagcccttttgtgcagctccgcgcccgcagcccgacgccccagcttgtgcgggggccacgggagggtcatgcgcggatttcgactcgggtgtggatttcgtccgtaggaggagcagcggtctgtggggcccacagcctccactttttcctgttaaaaattatactgaggacccagtggcttttaaggatgtggctgtgaacttcacccaggaggagtgggctttgctggatatttcccagaagaatctctacagggaagtgatgctggaaactttctggaacctgacctctataggaaaaaagtggaaagaccagaacattgaatatgagtaccaaaaccccaggagaaacttcaggagtgtcacagaagagaaagtcaatgaaattaaagaagacagtcattgtggagaaacttttaccccagttccagatgacaggctgaacttccagaagaagaaagcttctcctgaagtaaaatcatgtgacagctttgtgtgtgaagttggcctaggtaactcatcttctaatatgaacatcagaggtgacactggacacaaggcatgtgaatgtcaggaatatggaccaaagccatggaagagtcaacaacctaaaaaagccttcagatatcacccctccttgagaacacaagaaagggatcacactggaaagaaaccctatgcttgtaaagaatgtggaaaaaacattatttaccattcaagcattcaaagacacatggtagtgcacagtggggatggaccttataaatgtaagttttgtgggaaagcattccattgtctcagtttatatcttatccatgaaagaactcacactggagagaaaccgtatgaatgtaaacaatgtggtaaatcttttagttattctgctacccatcgaatacatgaaagaactcacattggagaaaagccttatgaatgtcaggaatgtgggaaagcattccatagtcccagatcctgtcacagacatgaaaggagtcacatgggagagaaggcttatcaatgtaaggaatgtggaaaagcattcatgtgtccccgttatgttcgtagacatgaaaggacccactctaggaaaaaactttatgaatgtaagcagtgtgggaaagcattatcctctcttacaagttttcaaacacacataaggaatgcactctggagaaagaccttatgaatgtaagacatgtgggaaaggcttttattctgccaagtcatttcaaagacatgaaaaaactcacagtggagagaaaccgtataaatgcaagcaatgtggtaaagccttcactcgttccggttcctttcgatatcatgaaaggactcacactggagagaaaccctatgagtgtaagcaatgtgggaaagccttcagatctgccccaaatcttcaattgcatggtaggactcacactggagagaaaccgtatcaatgtaaggaatgtgggaaagctttcagatctgcctcacaacttcgaatccatcgtaggattcacactggagagaaaccctatgaatgtaagaaatgtgggaaagccttcagatatgtccagaactttcgatttcatgaaaggacacaaacacataagaatgcactctggagaaagaccttataa

SEQ ID NO: 134267 - DNA, 2414 bp, Homo sapiens
gctgcggctgggatccggtctttccagccccgagagggacctggttcctctgcccaggcttctgtcactctgtcacctacgctatgccctgctgtagtcacaggaggtgtagagaggaccccgggacatctgaaagccaggaaatggaggagtgggctttgctggatatttcccagaggaaactctacaaggaagtgatgctggaaactttcaggaacctgacctctgtaggaaaaagttggaaagaccagaacattgaatatgagtaccaaaaccccaggagaaacttcaggagtctcatagaaaagaaagtcaatgaaattaaagatgacagtcattgtggagaaacttttacccaggttccagatgacaggctgaacttccaggagaagaaagcttctcctgaaataaaatcatgtgacagctttgtgtgtggagaagttggcctaggtaactcatcttttaatatgaacatcagaggtgacattggacacaaggcctatgagtatcaggaatatggaccgaagccatgtaagtgtcaacaacctaaaaataagaaagccttcaggtatcgcccatccattagaacacaagaaagggatcacactggagagaaaccctatgcttgtaaagtctgtggaaaaacctttattttccattcaagcattcaaagacacgtggtaatgcacagtggggatggaccttataaatgtaaattttgtgggaaagccttccattgtctcagtttatatcttatccatgaaagaattcacactggagagaaaccatatgaatgtaaacaatgtggtaaatcctttagttattctgctacccttcgaatacacgaaagaactcacactggagaaaagccttatgaatgtcagcaatgtgggaaagcatttcatagtcccagatgctatcgtagacatgaaaggattcacacgggagagaaggcttatcaatgtaaggaatgtggaaaagcattcacgtgtccccagtatgttcgtatacatgaaaggacccactctaggaaaaaaccctatgaatgtacgcagtgtgggaaagcattatcctctcttacaagttttcaaacacacataagaatgcactctggagaaagaccttatgaatgtaagatatgtgggaaaggcttttgttctgccaattcatttcaaagacatgaaaaaactcacagtggagagaaaccctataaatgcaagcaatgtggtaaagccttcattcattccagttcccttcgttatcatgaaaggattcacactggagagaaaccctatgagtgtaagcaatgtgggaaggccttcagatcttcctcacaccttcaattgcatggtaggactcacactggagagaagccctatgaatgtcaggaatgtgggaaagccttcagatctatgaagaaccttcaaagtcatgaaaggacacaaacacacgtaagaatacactctggagaaagaccttataaatgtaagctatgtgggaaaggcttttattgtcccaaatcattgcaaagacatgaaaaaactcacactggagagaaactctatgaatgcaagcaatgtggtgaagccttcagtagttccagttcctttcgataccatgaaaggactcacactggagagaaaccctataaatgcaagcaatgtgggaaagccttcagagctgcctcagtccttcgaatgcatggtaggactcaccctgaagataaaccctatgagttgttggaagttctggccagggcaatcaggaaggacaaagaactaaagggtattcaagtaggaaaagaggaagtcaaattgtccctgtttgcagatgacatgattgtatatttagaaaaccctatcatctcagcccaaaatctccttaagctgataagcaacttcagcaaagtctcaggatacaaaatcaatgtgcaaaaatcacaagcattcctatacaccaacaacagacaaacagagagccaaatcatgagtgaactcccattcacaattgcttcaaagagaataaaatacctaggaatccaacttacaagggatgtgaaggacctcttcaaagagaactacaaaccactgctcaacgaaatcaaagaggacacaaacaaatggaagaacattccatgctcgtggataggaagaatcaatatcatgaaaatggccatactgcccaaggtaatttgtagattccatgccatccccatcaagctaccgatgactttcttcacagaattggaaaaaactactttaaagttcatatggaaccaaagaagagcccacattgccaagacaatcctaagccaaaagaacaaagctcaaggcattaggctacctgacttcaaactatactacaaggctacagtaaccaaaacagcatggtactggtaccaaacagagatatag

SEQ ID NO: 134268 - DNA, 2321 bp, Homo sapiens
atggggaaaaacacccccatgattcaattatctccaccaggtcccttccacaacagtgagtacagattcccagtgctgtcagtttcagctttcctcctctacacatgtgagatgtttcaggacccagtggcttttgaggatgtggctgtgatcttcacccaggaggagtgggctttgctggatatttcccagaggaaactctacagggaagtgatgctggaaactttcaggaacctgacctctttaggaaaaaggtggaaagaccagaacattgaatatgagcaccaaaaccccaggagaaacttcaggagtctcatagaagaaaaagtcaatgaaattaaagatgacagtcattgtggagaaacttttaccccagttccagatgacagactgaacttccaggagaagaaagcttctcctgaagtaaaatcatgtgaaagctttgtgtgtggagaagttggcctaggtaactcatcttttaatatgaacatcagaggtgacattggacacaaggcatatgagtatcaggaatatggaccaaagccatgtaagtgtcaacaacctaaaaaagccttcagataccgcccctcctttagaacacaagaaagggatcacactggagagaaacccaatgcttgtaaagtatgtggaaaaacctttatttcccattcaagtgttcgaagacacatggtaatgcacagtggggatggaccttataaatgtaagttttgtgggaaagcattccattgtctcagattatatcttatccatgaaagaattcacactggagagaaaccatgtgaatgtaaacagtgtggtaaatcctttagttattctgctacccatcgaatacataaaagaactcacactggagaaaagccttatgaatatcaggagtgtgggaaagcatttcatagtcccagatcctatcgtagacatgaaaggattcacatgggagaaaaggcttatcaatgtaaggaatgtggaaaagcattcacgtgtccccgttatgttcgtatacatgaaaggacccactctaggaaaaatctctatgaatgtaagcagtgtgggaaagcattatcctctcttacaagttttcaaacacacgtaagattgcactctggagaaagaccttatgaatgtaagatatgtggaaaagacttttgttctgtgaattcatttcaaagacatgaaaaaattcacagtggagagaaaccctataaatgtaagcagtgtggtaaagccttacctcattccagttcccttcgatatcatgtaaggactcacactggagagaaaccctatgagtgtaagcaatgtgggaaagcgacacacaatggagagaagccctatgcatgtaaggaatgtgggaaacccttcggatctgcccagaaccttcgaattcatgaaaggacacaaacacacataatgcactctgtagagagaccttataaatgtaagatatgtgggaggggcttttattctgccaagtcatttcaaatacatgaaaaatcttacactggagagaaaccctatgagtgtaagcaatgtgggaaagcctttgtttccttcacttcctttcgatatcatgaaaggactcacactggagagaacccctatgagtgtaagcaatttgggaaagccttcagatctgtcaaaaatcttcgatttcataaaaggacacacactggagagaaaccctgtgaatacatgaaaagactcacactggaaggaaacactatgaatgcaagcaatgtggcaaagctttcacttcttccagttcttttcaatatcatgaaagaacacactagggagaaaccctatcaatgtaagcaatgtgcaaaagcctttatttcttccacttcttttcaatatcatgaaaggactcacatgggagagaaaccctatgagtgtatgccaagtgggaaagccttcatttcctctaagttcccttcaatatcatgaaaggactcacactggagagaagccctatgaatataagcaatgtgggaaagccttcagatcagcctcgcaccttcaaatgcatggaaggactcacactggagaaaaaccctatgaatgtaagcagtatgggaaagcgttcagacctgacaagattctttgaatacagataatgaatgtaaacaattaactgtttataataactgtatactaacaaatgatattctttttaaataagaagctataatatcccattggtgtcatgtattagatcagccttatactgttaaattgttattatttggacattgtgagtcagtataaccatgtggataaaatgccagacatctttttattcg

SEQ ID NO: 134269 - DNA, 420 bp, Homo sapiens
  misc_feature (1)...(420): n = a,t,c or g
ggtaccggtccggaattnnngttttgacgatttcgtcaccgatgtctgggattactgcacggggttgcgccgtggcggagcagatgccagaaaaatccacactgcccctgcccgaaccatgttcctgctgcgtcccctgcccattctgttggtgacaggcggcgggtatgcagggtaccggcagtatgagaagtacagggagcgagagctggagaagctgggattggagattccacccaaacttgctggtcactgggagccctgaccctctattctgcaccctgtgagccaccgagactgaaccaaacccaggaagcggcgccaccaaccagcctcgcagaggcagaggccctggagcagtgacagcacaggagatctgctggctcgggggaaggggaggaaagaggaaaacaaagggag

SEQ ID NO: 134270 - DNA, 470 bp, Homo sapiens
  misc_feature (1)...(470): n = a,t,c or g
cgcctgtaggcggcacgagaagatggcgacgnnnnnnnacaccgatgtctgggattactgcacggggtcgcgccgtggcggagcagcctccatccctgtgagatcactgccctgagccaatccctacagcccttacggaagctgccttttagagcctttcgcacagatgccagaaaaatccacactgcccctgcccgaaccatgttcctgctgcgtcccctgcccattctgttggtgacaggcggcgggtatgcagggtaccggcagtatgagaagtacagggagcgagagctggagaagctgggattggagattccacccaaacttgctggtcactgggagattagcccatcggatggaaggatcctcaactttgggcaggtgaagaactgtgaggtggagcaggtaaagggggtcacctactccctggagtcggtcctgggcccgcgtatgtgcacagaggacctgcc

SEQ ID NO: 134271 - DNA, 482 bp, Homo sapiens
tcttctgaggacactgatgacactgattaatgatacagacctgcagcaggcaagaccaatcaatcactgaacctgcctcatggcaccagagtgaacagggcaggcaggtagtaggcccagctggggaaatgggagagttcctgtccccctccacatatccctacatgaaatatgggaaagttgctgctattgattcagggtctgtcttggaggcagaggacccttggtggatagttggtcagtgcctggaaaacctgtcccagtttatcaggaacgcaggcctggggagcccccagtggcggggacagggccagatttcatgttgaccctggggatgctgtgaatttctcctgcaggagagacatcattgaattttttcaactgtatcagtagcacagtatttttgtatgaaaagtgggagacttctgaacagtaattcatttaattgcaaagcattttgaaataaaaaaaatcaaacttaa

SEQ ID NO: 134272 - DNA, 2679 bp, Homo sapiens
  misc_feature (1)...(2679): n = a,t,c or g
cgctgagaaggagcagacaagatggcgacgtccgtggggcaccgatgtctgggattactgcacggggtcgcgccgtggcggagcagcctccatccctgtgagatgactgccctgagccaatccctacagcccttacggaagctgccttttagagcctttcgcacagatgccagaaaaatccacactgcccctgcccgaaccatgttcctgctgcgtcccctgcccattctgttggtgacaggcggcgggtatgcagggtaccggcagtatgagaagtacagggagcgagagctggagaagctgggattggagattccacccaaacttgcttggtcactggggagtgtggctttgtacaagtcagtgccaacgcgcttgcttgtcacgggcctggggtcgcctcaatcaggttggagctgcccacactggcttgcgcaggccccgttttacaagcctgttacatctggacgtttggggtgaacatgaaagaggcccgtgtggaggacctgcatcactaccgcaacctcagcgagttcttccggcgcaagctgaagccgcaggcccggcctgtctgtggcctgcacagcgtggtgaggcctgaccctttcctcctgcaggaaacaggactttttcctgcctccccagcacagcccccctggtctccagcgtatctggaaggggcaggatgacaaggggaggtgggggctgtctcctggggggaggagaccctgctctccctggcagcaagcctctcctgcccttccagattagcccatcggatggaaggatcctcaactttgggcaggtgaagaactgtgaggtggagcaggtaaagggggtcacctactccctggagtcgttcctgggcccgcgtatgtgcacagaggacctgcccttcccaccagccgcgtcgtgtgactccttcaagaaccagctggtcacccgggaagggaatgagctctatcactgtgtcatctacctggcccctggggactaccactgcttccactcccccaccgactggactgtgtcccaccggcgccacttcccaggctccctgatgtcagtgaaccctggcatggctcgctggatcaaagagctcttctgccataacgagcgggtggtcctgacgggggactggaaacatggcttcttctcactgacagctgtgggggccacccaactggggctccactcgcatctattttgaccgggaccgcaacacaaacaacccaaggcacagcaagggctcctacaatgacttcagcttcgtgacgcacaccaatagagagggcgtccccatgcgtaagggcgagcacctgggcgagttcaacctgggctccaccatcgtgctcatcttcgaggcccccaaggacttcaatttccagctgaaaacaggacagaaaatccgctttggggaagccctgggctcgctctagagtctctttcctgattatggctgctaagggatcttttccaaacagagtgaggggtcttttcaagagggaggcccatgagcgcattccagggtaagggccctgcctcagcgtaggttgggagtctgaccaggtaaggacttgaattgattcggctacccacctgtttccagaagttgccagacaagaggttggcgagagcccccattcattgcccctcaaccttttcccgtttcctttttggccttacaattaaaaagttgcagggtgggattgatcttcagttcacatttgggatctttttaaaacactgtattggacgggaaggagccttgcatttcctgaccgaaccttcagttgggtctcggttgttcgttttttcttgctgctcctccccccatcacctgagctgttttctgttgggccccttttgttttttggccttaacgctcctgctgcacagggtgaggtacctccttgggcacagactgtgggatggcctctcccccaggcagagccacacagccttcgtgacaactgctttccgttcccacattcacctcatcctgctctttaggaaaaagcagtctttgtgcttgtgggtggaacggcatcacccgggactttgctaggtgtctttctgaggaccactgatggacactggatttaatgataacagacctttggcagggacctggatggagttgaccctttttgggagctgggccagggtcctctggcaggcagggcaaggaccaatcaaaccactgaaacctgcnctccatggccacccagagtgaaacagggccaggccaggtagtagggccccagctggggaaaatgggaaaagttccctgtccccccctcccacatatccccctacatgaaatatgggaaaagttgcctgcctattgaattccagggtcctgtccttggaggcagaggacccttggtggatagttggtcagtgccctggaaaaccctgtcccagtctattcaggaaccgcagggcctagggtagcccccagttggcggggacagggccagatttcatgttgaccctggggaatgctgtgaatttctcctgcaggagagacatcatttgaattttttcaactgtatcagtagcatagtatttttgtatgaaaagtgggagacttctgaacagtaattcatttaatgtgcaaagcattttgaaataaaaaaaatccaccttaaaaagaaaaaataaaaaacaaaaaaa

SEQ ID NO: 134273 - DNA, 1438 bp, Homo sapiens
ggtcgacccacgcgtccggcgagtcgccggtcgccggtcgcggcggagcctgggcgctgaagtaccggggcctggacgagggggccgcggtctggctagggagccgcgcgggctcatggcgaagggacttggagggaagcgggcctggagctgctgccgccgcccctgagctcggacgcgaaggctggccccgtccccgggctgccgccgtggtcctgcagtgaagaaaatgaggcacgaggaattgttaaccaagaccttccaaggcccagctgttgtgtgtgggactccgaccagccacgtatacatgtttaagaatggcagtggggactcgggggactcttctgaagaagagtctcaccgtgtggttttgcggccccgggtcaaggagcgccacaagagcggtgtccaccagcctccccaggcgggagcaggtgacgtggtgctgctgcagcgggagctggcccaggaggacagcctcaacaagctggcgctgcagtatggctgcaaacattcagagtgattaacaatggcaaagttgcagatatcaagaaagtcaacaacttcatcagagaacaagacttatatgctttgaaatctgttaagattccagtgagaaaccatgggatcctgatggagacccacaaagaactgaaaccccttctgagcccgtcttccgagaccacagtgaccgtggaactgccagaggcagacagagcaggcgcgggcaccggtgcccaggccggccaactgatgggcttctttaaggggattgaccaggatattgagcgtgcagtgcagtcagaaatctttctacatgaaagttactgcatggacacctcccatcagccactgctcccggcacctccgaagacgcctatggatggtgcagattgtggcattcagtggtggaatgctgttttcatcatgctgctgattggtattgtcttgcctgtcttttatttggtctactttaaaatacaagctagtggtgagacccctaatagcttgaacacaactgtcatccccaatggctcgatggcaatgggtacagttccagggcaagcccccagactagcagttgcagtgccagccgtcacttctgcagacagccagttcagtcagaccacccaagcggggagctaagctttgtttttaaagactcggcccagctttagcaattggctgttgatgtgcctcagctgtcactggcgatgtcctaggggtgctgcattttgcttccggggaaggatggacacttttcagaagtcactgcagtattcccaattgcactggccctgggcatggccttacccagtctaagctggcaggatctaaaacagcagcgacctcggcccctatccagagaggtgcagcaagagagccatttccctgtgacatatagtggactggccagttcatagcagcacaatgtatt

SEQ ID NO: 134274 - DNA, 626 bp, Homo sapiens
agatattccagtacactcaccagaccctggactcagactccgaggacgagagccagtcctcacagtcgctgttgcaggcgcactcactgccagaccctcgcctcccagacctacaaagccttcaagggcaggggtccatgccagcaggaggccaccacaggacctggggcccataggcaagggatctgctaagaccaagggcccccgacatcaaaggaagcatcatgaaagcatcacacccccaagcaggtcgcccaccaaggaggcacctccaggcctcaatgatgacgcccagatcccagcctctcaagaatccgtggcacctctgtggatcccagtgacagctccttgagctcacagagttctttcctcctgtgagtttggagcggcatttgagtctgcaggtgaagaggagggcgagggggaggtcagtgcctcgcaggcagccgtgcaggcggcggacacagacgaggcgctgaggtgctacatccgctccttgcggccctgtaccagaaggtgcttctgtaccagccctttgagctgcgggagctgcaggcagagctgaggcagaacggcctccgtgtgtccccgcgcaggctgttggactttctggacaaccactgtca

SEQ ID NO: 134275 - DNA, 5770 bp, Homo sapiens
ggcccagcaatgcctgtggaggcataacccacgctgggtgtcccaggtcctccctgcaaatggcgggggtggggactcctgatggcaggttggggtggggtcgggatggccccatcagttccgctccaccttcttcttgccccgaggctgccgcctcctgccctggagcttctccctgcgggtggcggcagtggtgaaggtgatacagtgggtgtccaggaagtccaacagcctgcgcgaggacacacggaggccgttctgcctcagctctgcctgcagctcccgcagctcaaagggctggtacagcagcaccttctggtacagggccggcttggagcggatgtagcacctcagagcctcgtactgtgtccgccgcctgcacggctgcctgcgaggcactgacctccccctcgccctcctcttcacctgcagactcaaatgccgctccaaactcacaggaggaagaactgaaaagagccagaccaggacgttgtgcaacccctttctctccagcccctgagaccatgagcctctttaaaggaaggaaggtgtctacgggtcccatggagcctggcctctgtgagctcaaggagctgtcactgccatccacagaggtggccacggattcttgagaggctgggatctgggcgtcatcattgaggcctggaggtgcctccttggtgggcgacctgcttgggggtgtgatgctttcatgatgcttcctttgatgtcgggggcccttggtcttagcaggtcccttgggcctatgggccccaggtcctgtggtggcctcctgctgggcatggacccctgcccttgaaggcttgtaggtctgggaggcgagggtctggcagtgaggcgcctgcaacagcggctgtgaggactggctctcgtcctcggagtctgagtccagggtctggtgagtgtactggaatatctccttcagcttcagaaccatctggcgtttaggcagagggcggactccaaacctatccagttccttcttcagcaccggcgtctccataatggaatactgtggcatcggcgttatgggcactttggggggcaagttcttcttccgattagcacctttgggtgtctctaacccttcgggcttctgagctccaccagcgcttggcatctgggccggaggaggggtctctggaggcctctgctcttccccgtcccaaacgtcccacagagccgaattcagaaagctcggcctgctattccccagggagcccgcgcccgaggacttctcttgcaatttcctctgggtagtgcagcttcctcggatgggggtggtgtccaggagtcccggggagcgacagtcacggctgtcggcggcctcgttcatcctgcggctggggctgctggtgctcagggggccggtccgctccaggttccagtggtcaatgggaattggcgagaggggctccatgtgccagcagcagtcgtcaattggaattggggggtcactgtccagtggggggcttctgttggcctgatgggaggccacctcctgctcatcgtcactgtctccgacttccaccacttcacccgctggggtctggttcaggaagcttggcccaggcggcgagtgtttcaggaaccgcctgctgaagtgggcgcggtcccctgagatgggatgtggagccagcggagaggagtgcgggtggcccccggggtggggacgggaagggcttctgtggccttgccttctgccgtcagaagttcctggagagacgggagtgaggcatgaggacggtgtctggggcggtggtgtctggggcctgatgacagaaaacttctgtgcgacttcgttcccttccctgtttcctactgaggccctgggcgtgtgctgagtcaccgcctgcacggccagcccgctcctgaggctgctgatttgggtctgggaagaacagtcacggcttctgctggccagcggggtggcgggcaccagccacgaggtgtctgtggtgctggcctcgctggggctgctctcacggtcacagaacagccagggagcccctctcctgcccaaagagccccgattctccggcagcgccccctcatcctcctgctgcagcacagcttcgcttcttggtgggctctgggaaggttcctgatctgcatcaacatcaatgatggaaaacagctcacaggacctagggctaatttctagagctttcttttcttccagaggatcactagaaatggacttcattttggtttgttctagctccagctcctcatccgagtccagtaagaggatgacctcatcttcttcgttcagtttggatgaagatttctgagatctggagctcgaatggtcaggatttgactgggttaggtcaatagacggagatttttctgggaacatcaggacccccttatttctgcactccagcacggaccgacgctctttgcctttctggtgccctggctctttagacagcgtgaggatgctcctgtcccttttctgctttgatggcacagctggagacagcaaggttggggagcccacctgggaagttccgccacgggaccggggtgttgacagggacgacccacttgtgtgatgagacccgcggggactcccgccctggggaggccccaataggaagcggcacgggtgcggtggagatgcctgccagggagccaggcgatgagaaacctccagccccctttccctgacagcgccactttgttcctcgggctcacttgttatttgggacggctctgagatctctccctgagttgatgagaagagctgttcgtaatccccggcatcatctgagtgcggaagagagccttcttttctctctgcctggcagtccctggaagggctggagcagctggaatggccaagcgcctcctctggcgcctcctgctcaggggcctctgctccccgtgcccctgagtgctggccctggggtggcgggagagcgcactgtcccatcttctcccaggtggtggcggcctcatctcttcctggctccaacggctccatctcctccaccttgtcccactgtttctgcacctggacacctgctaggagttgcccagaaaccggactgccaccctccagccagtcagcgtcctcgccggcacccgctgccctttcttcctggagaagctttcgctgagtagctgcaaattcataaatttcttccatttctgcttcattcacgttttcttgatcttcttcgtggtccttggatttcaacaaagtcttcgcttcctcctcttcatctgcccacattgacctcaagagttcctgggaaattctcggccctgctttcgcaattctctgcttccttctcctcccatggtttgccctctgagtcagtggcaataggcacctgttcgacacaggtgaacgagctcactcacgccaaacctgtgggccagggagctcagctcagagctaaggccaggaggaaggccagtgtccgcagtgtagagatagtgcaggaacgtgcgggcggcctcggtgctcacgtcacccagcaggacacgctgggtcagaaccccgtcctctacagcggagaagccttcattgttcacatactggatgaggagcgggcatcgggcataaagcacgaacttgtgggcgtaaagcacctccccgctgtccgtctgaaactggacatcactcaggtgtgggttattgaccatggcgccaaagtcagcaaccagcagcccgagggagagcaaggtgcggccgcccctgtccgggtgcttgtcctgcgatggcaccacaaacccagtcagaggaaggccgccgggcaccacgtccaaccctgcagtcccttccgagccagccaggcccccactgccgggccacgggctggcgcatcagtccctccctcgccaggtccacgaggtcctgcagggcctggtgctccctctggctggccgaaggcgacgggcccctggagccacagcctgcagtgggggtgccgtggagagcgggtgaccttcgctcgctcagctctgagtgctcaggtggcaccagaggcggcacgggctcctgcataaggccctgggcaggccgctggggcacgagaggagggaccagcctggccgtgtagaagtcctccatggcccaggccccagtcagtgcgctgccctcccacagaaagctctgcgttgcgttcaggtgggaggaggacacttggcccgcttctttcccacccttcctttaaaatcctgctggcaggaagtggtggcgtgctagacaattccacttcctcagagaggagcagggccacacggtcctctatctgtcggcctgtggtttcagagtcctggactaacaacaatgggggggataccgggggtttcttcttgcgacttttattctccgggacctgctgatggcctctcccagggtcactcttctgatcacacaaacctgcttctggtcttatcctctcagaaaaggcactttccagcctgagcgctggtacagccgcacccggctccatctccgaccgggacagagccatggccaccagcaggtcctcggacggtgcctcgtccaccttccgcctcttccgtggctccttcttgctggtgggtcctctccgtttcagacctctactgtgatcactgaagctgaacatgggtgggctgctgctaccctcaggctgtgctgtctgcagccgcacagcctgaagcaggagctgggggccaacctccatcttcacagcacactgcttcaagtgactggttctgctctttaaggtaagaaacggtttcccacaaatcgggcactcagggatctgaggcacagaaggtcttagtgtcttttcagcttcatccaagcacctgttcacatgctgttcccttcgggtcacgttcatggctgagaggttcttttgacaaatctggcagaagaacaaacccttttcctccaggctatcatcatgtgccgatgctcctacccgtgcaaactcctgctgcagggtcaaggccaccgcagcgtcgctctctggggcagggggcccaagcccatacacattccccgccatcatctcctcttgaggatcctttgggacattttcttcccgcgcagcctcgagggagcactcttctgaagcgtgtctcaaacgctcggggtctgctctcttgaactgctgcattcgctgtaggaccaattgtgctgtgcggggtttggagggacttggcactgctctggttttctctctggaaaggtttggcgatggttcttgctggttacccgtctgggtgttttgtgctgtttcccggagcacaggtggatctggagcagaggcaagcacacccccctccccattcacagagtgggccggttcacttgcttgccatttggttaccctttgctttttagtcctaggggcctggctgccagacggaggtttcttctctgcagggccttgaagggttttggtcttggtagcagtttgtttggtccttttcaatttgcttcttatctgagtgccgtttgaggcagccttttgtgtcttcctttctcctgacacttccttgattccatgttttttcaccctttggaaaaagctagcgcagagttctttaaagtcctcatcagactcatccatcatctgaccagttttaaggctttcaggctggtcttcagaggagcgagggtcaatcccaggacaggcagacagatgagaaagtgaacccaagtagaagcctagctgagcctcattcacactcagtttcattagggttcttctctacttctccattagatacttgg

SEQ ID NO: 134276 - DNA, 538 bp, Homo sapiens
  misc_feature (1)...(538): n = a,t,c or g
ctcgctcgctccccctcggaaagctgcgaaagtgctttggcggtttgtccatccgcagcttcggcttttccagtctggtggcccttccggccacccctttaaccccagctttccctcccccttctttcgatcagagatcggcggagaccctcgaagtgcgcaaacttgacactcaccctgaccgttgcagctcgacatggattacagagtcttggaaaagtcggtatttcacggcgtatgcctccacctgctaacctcccaagtcttaaagcagaaaacaaaggcaatgatcctaatgtaaacattgtacctaaagatggcacagggtgggcatcaaaacaagagcaacatgaagaagaaaaaacaccagaagtgccaccagcacagccaaaacctggggttgcagctcccccagaagtagcacctgctcccaaatcatgggccagtaacaagcaaggtgggcaaggagatggaatccaagtgaaatagcagtttcagcaagaatttcccagcctgcaggcagctggggatcagaaan

SEQ ID NO: 134277 - DNA, 569 bp, Homo sapiens
atgactggggcagctggggaagaggctgctggggctggcgttggagctgaagttgatgctagggctgaagcaagaatgggaattgaggctgaggcaagaatggtgacagaagctggggttgaaactgaggcaaggatgggggttggagctggggctgaggctggagctgaagaagaggttatagctgcagctgaagtagaggctggaactgaagctgagactgaggctgaggctgaaactggagctaagggtgaggctggaactggagctgaggttgaggccagaactggagctaaagttgaggctggaaccggagctgaggttgaggctggaactggagttaaggttgccggaagtggagctgaggttgaggctggaactgaagctgaggttgaaggtggaagtggagccgaagctagagcctctgctggtgatacccaggcagtggacctccagcaaattccaacagacctgcagctgagggacctggctgttagaaggaaaactaacaaacagaaaggaatagcatcaacatcaacaaaaaggacatccacaccaaaaccccatct

SEQ ID NO: 134278 - DNA, 1098 bp, Homo sapiens
atgcccggacccaaggccctctccacgcggccccctagcctccgggcgccagggtctgggtgcgctcccacgccccaggccgcactctggccgttcccgatggggccctctttgatcgcggcccccacaccctcgctttccttaccgggtgagtgtcaagtttgcgcacttcgagggtctccgccgatctctgatcgaaagaagggggagggaaagctggggttaaaggggtggccggaagggccaccagactggaaaagccgaagctgcggatggacaaaccgccaaagcactttcgcagctttccgagggggagcgagcgagcgagaaaaagaagcaagatggcggctagccagcccctacgtactacgtcatgacgctaagtacaatcaatttgtcacattcccctcaaaatccagctggagtcctggagagtgggctgtcccgcttccgagtgggaacgttcatagtgtcgttgatgagagattaaatatgggtgatgttgagaaaggcagaagacttttgttcagagtgtgctcagtgccacatggacccaatcttcatggcctctttggaaaacagatgagttcactggattctctctcacagacattaggtgtccgctgttcttctgatccagtgaggtgcccattgccactcctgatcaggctagaggcttgccattattcctgcatggctaagtgccgaggatctataggaactactaaaacaggctcattgtctggggtaaataccaaggttcttgatctcatggccaaggaaatcaaggatgcagatgcatacagactgagattggagcaggagtttaaaagccaggatgggagagacagcaatcttgaggcagctcagacgctttcctccgctgctcaggatgctctcaatgcggtagtttctggtgctgagccagctgggcagctccaggtcaggcacagtgaactcactcatggacatagtagagatatttgtgtggctcaggaaggacaaagattggacctgtcagacatgtacagtgtcctgtggggagaaaatctagtgatgaccctaaattttggaacttggacttttgtggatgactaa

SEQ ID NO: 134279 - DNA, 2415 bp, Homo sapiens
atgtggaaaggatttaccattctagactcctttaagaacattagtgattcatgggaggatgtcagaatatcaacattaacaggggtttggaagaagttgattgtaaccctcatggatgacttggaggaattcaagacatcagtggaggaaataactctgacgcaaagaaagttgttttttgtgatggaatctcctgtaggtcccattagtccaccacagccaccttcagtcagtgcatggaataagcccttaacatcgtttggatcagctccttcatcagagggagcgaagaatggtcaagaaagtggactcgaaattggaactgacacaattcagtttggtgctccagcctcaaatggaaatgaaaatgaagttgttcctgtgctttcggaaaaatctgctgacaaaatacctgaacctaaagaacagcggcagaagcagccacgagcaggacctatcaaagcccagaagcttccagatttgagtccagtagacaacaaaagaacacaaacctggtcccattggaaaggaacgttcattaaaaaatagaaaagtaaaagatgcccaacaggtggagccagaaggacaagagaaaccaagcccagctacagtcagaagcacagatcctgtcacgacaaaggagactaaagcagtctcagaaatgtctactgaaataggaacaatgatctcggtatcatctgcagaatatggtactaatgcaaaggagtctgtaacagactatactacaccctcttcttctttgcctaacaccgtggctactaataatacaaagatggaggatactttggttaataatatggagtctgcacgcaaagcatgggagaattctccaaatgtaagggaaaaggggtctccagtaacttccacagcacctccaattgcaactggagtcagcagtagtgccagtggaccaagcactgctaattacaattcgttctcaagtgcatccatgccccagattcctgttgcttcagtcactcctacagcatcactatcaggagctggtacatacactacctcttctttgagcacaaaatctacaaccacatcggaccctccaaatatttgtaaagtgaaacctcagcagttacagacaagcagcctgccttctgcaagtcatttttcacagttaagctgtatgccttcccttattgcccagcagcaacagaatccgcaagtttatgtgtctcagtctgcagcaggacacttactactgcttgtttatcctgatggtctacagctcaaatcccagccttctatatggacacaagtcatttattcaatacccaacatgcacgattggctccgccatccttggctcaacaacagggtttccaaccaggtctctctcagatctcagccagcttttatgcaaagcagtttatcccagccatctgtggtcctttctggtactgctattcacaactttccaactgtccaacaccaagaacttgccaaggcacaatccggtcttgcctttcagcaaacatcaaatactcagcccattcctatattgtatgaacatcaactggggcaggcatcaggactaggaggttcccagctgattgacacacatcttctccaggttacagtacctttaccagcatcgcagctttccttgcctaattttggatctacagggcaacctctaattgctttgcctcagactcttcagcccccattacagcataccactccccaagcacaggctcagagtctgagtcgtcctgcacaagtaagccagcctttcagaggattaattcctgctggaacacagcatagcatgattgcaaccacaggaaaaatgtctgaaatggaactaaaagcctttggaagtggcattgatataaaaccaggcacacctccaatcgctggtagaagcaccacaccaacatctagtcccttccgggctacttctacaagtccgaacagccagtccagcaaaatgaacagcattgtctaccagaagcagttccagtcagcccctgccactgtgagaatgacacaaccatttcctacacagtttgcaccccagaagagagctgtgggaagaggactcagccacaagacatttggtcctaggtgttggtaatgccacaatataagtgcttccttttcattttattgtagaccacatattgataactagaagttttaagtgttacatgtatgtttttagatttgcaagcaggttcccgcctgctgttctccaggtgccctcagttcaaggtaatcagcccgccaaagcatcttgttttgggctggcatttcctgaactccttcagtggttaagctcagggatctggagttggcaattctggtgtgctttaaccttggacaagtaactcagccactttttacgttgagtaggtgtcctgacctccttgcctaatt

SEQ ID NO: 134280 - DNA, 10578 bp, Homo sapiens
tagccgccatcttgcttctttttctcgctcgctcgctccccctcggaaagctgcgaaagtgctttggcggtttgtccatccgcagcttcggcttttccagtctggtggcccttccggccacccctttaaccccagctttccctcccccttctttcgatcagagatcggccggagacccctcgaagtgcgcaaacttgacactcaccctgaccggacctggggttttaaggggtgtggcaggaggttttggactcgatgagtttccaccgaaatgtcggagaagtcaggccagagcacaaaagcaaaggatgggaaaaagtatgcaacactcagttttatttaatacttcaaaggggaaatcattagaaacacagaaaaccacagttgcagctcgacatggattacagagtcttggaaaagtcggtatttcacggcagtatgcctccaccatgctaacctcccaagttcttaaagccagaataacaaagagcaaatgatcctaatgtaaacattgtacctaaagatggcacagggtgggcatcaaaacaagagcaacatgaagaagaaaaaaacaccagaagtgccaccagcaacagccaaaacctggggttgcagctcccccagaagtagcacctgctcccaaatcatgggccagtaacaagcaaggtgggcaaggagatggaatccaagtgaatagtcagtttcagcaagaatttcccagcctgcaggcagctgtggatcaggaaaaaaaaagaaaaggaaacaaatgatgacaactatggaccttgacccagtttacgtccaccaaatgttgcttgttggagagatggtggtaaggctgctggctcaccttcgtcatctgatcaagatgaaaagctccctggccaggatgaaagcacagctggaacatcagagcaaaatgatatcctcaaagtggtggaaaagaggatagcttgtggtcctccacaggctaaactgaatggacagcaggctgctctcgcttcccagtatagagctatgatgcctccttatatgttccaacagtatccgaggatgacatatcctcctctacatggtcccatgagattcccaccttctttatctgaaacaaacaaaggccttcgaggaagaggcccacctccttcatgggcctctgagcctgaacgcccatccattcttagtgcatcagaacttgaaggagcttgataaatttgataacctagatgctgaagcctgatgaaggttggggcaggtgctcagatgggaagtagattattacagaggcaactggaattttcagtgatgatgatgacaaaggaagtaaccagtcctaaagagaataacagtgaggatcaaggttcaaaagcctctgaaaacaacgaaaacaaaaaagaaacagatgaagtttccaacactaaatcattcttcccaaatacctgcccaaccatcagtagcaaaagttccctatgggaaaaggaccttcatttaatcaggaacgtggaacatcttcacatctgccaccacctccaaagttgcttgcacagcagcatccacctccagatcgaccaggcagtacctgggaagaccaggcccctttccctccaagcagcaagtagctgatggaagatggaaatatgggaagcaaagacgaagacaacaatcagaaatttctgcagcagtagaacgtgctcgtaaaacggcgtgaagaggaagagcgaagaatgggaggaacaaagggaaggcagcttgtgcggagaaactgaaacgattggatgagaagcttggcatcctggaaaaacaacccatctccagaggaaattagggaaagggagcgagaaaaagaacgggagcgtgagaaagaacttgaaaaaagaacaagaacaggagcgagagaaggagagggaaaaagacagagagagacagcaggaaaaggagaaagagctggagaaggagcaggaaaaacaaagagaaatggagaaagaaagaaagcaagaaaaagaaaaagaactagaacggcagaaagaaaaggaaaaagaactacaaaagatgaaagaacaagaaaaggaatgtgagctggagaaggaaagggaaaaattagaggagaaaattgaacccagagaacctaatttagagcccatggtagaaaaacaagaaagtgaaaacagctgtaataaagaggaggaacccgttttcactagacaagacagcaatcgcagtgaaaaggaagccacaccagtggtgcatgaaacagaaccaagaatccagggtctcaacctcggccggctgtattatctggctatttcaaacagtttcagaagtctttacctccacgattccagcggcagcaggaacagatgaaacagcagcagtggcagcagcagcaacagcaaggtgtacttccacagactgttccttcacaaccgtccagtagtactgtccctcctccaccacacagacctctttatcagcctatgcagcctcatcctcaagcatttggcttctatgggttttgatccaaggtggctcatgatgcaagtcctacaatggatcctcgaatgatgtcaggaagaccctgctatgggatattccacccattcatcctgggaatgattcctccctaaaccattaatgaggaagaggacagatggaagggtcaccgaacagttctggagtcatttgagcatatagctcgatctgcaagagatcacgcaatttccctttctgagcctcgtatgctgtgggggttcagatccctatcctcatgctgagcctcaacaagcaactactcccaaagcaacagaagagcctgaggatgtaaggtctgaagctgcgttggaccaggaacagattactgctgcttattctgtagaacataatcaattagaggctcacccaaaggcagactttatcagagaatcaagtgaggcacaagtacaaaagttttttaagcagatctgtggaagatgttagacctcaccatactgatgcaaataatcagtctgcttgttttgaagcacctgatcaaaagaccttatccactcctcaagaggagcggatttcagctgtagaaagtcagccttcccggaaaagaagtgtttcccatggatctaaccatacgcaaaaaccagacgagcagagaagtgaaccatctgcaggcattcctaaagtaaccagcagatgcattgattcaaaagaaccaatagaaaggccagaggagaaaccaaaaaaggaaggctttatacgatcttctgaaggaccaaaacctgaaaaagtatataaatctaaatcagaaactcgttggggcccacgaccaagctctaacagaagggaagaagttaatgatagaccctgtgagaagatcaggtcccattaaaaaacctgtacttagagatatgaaagaggaacgggaacagaggaaggagaaagaaggagaaaaggccgaaaaggtcactgaaaaagtagttgtaaagcctgaaaagacggaaaagaaggatcttcctcctcccccaccaccacctcagccaccagcaccaattcagccacagtcagttccaccaccaattcaaccagaagcagagaaatttccttcaacagaaactgcaactttggctcaaaaaccatctcaggatactgagaagcctctggaacctgtgagtactgttcaggtagagcctgcagttaagactgtaaaccaacagactatggcagcaccagtagtcaaagaagaaaaacaacctgagaaagtcatcagcaaagaccttgttatagagaggcctcgaccagattcaagaccagcagttaaaaaagaatcaactttgcctcccaggacctattggaaagaagctagagagagagattggtttccagatcaaggatacagaggtcgaggccgaggtgaatattactccagagggtcgaagctatagaggttctttatgggaggggcgtggcaggggttggtagggggacacacttcgagattatcctcagtatagagacaataagccaagagcagagcatataccctcagggcctctcagacagcgagaagaaagtgaaacacggagtgagagctctgattttgaagttgtccccaaaagaagacgacagcggggttcagagactgacacagacagtgaaattcatgaaagtgcaagtgacaaggacagtttaagtaaaggcaaacttcccaaaagagaggaacggcctgaaaacaaaaaacctgtaaagcctcattcttctttcaagcctgataatcatgttcgaatagataatagactgctagaaaagccttatgtaagggatgacgataaagctaaaccaggctttcttcctaaaggagagcctacaaggagaggcagagggggaacattcaggcgtggtggaagggatcctggaggccgtccatcacgcccttccactttacgaagaccagcttatcgggacaatcagtggaacccaaggcagtcagaagttcctaaaccagaagatggagagccgccaagaagacatgagcagtttattcctatagcagcagataaacgacctccaaaatttgagcgaaaatttgacccagctagagaaaggcctcgaaggcagcgtcctactcgaccaccaaggcaagacaagccacctcgatttagacggctaagagagagggaggctgcttcaaaatcaaatgaggtggtagcagtgcccacaaatggcacagttaataatgtggctcaagaaccagttaatactcttggggatatttccgggaataagacaccagatttatctaatcagaactcttcagatcaggcaaatgaagaatgggaaacagcttctgaaagcagtgatttcaatgagaggcgagagagggatgaaaaaaaaaaatgctgacttgaatgcacaaacagttgtaaaggttggagagaatgttctacctccaaagagggaaattgcaaagagaagtttttctagtcagagaccagtagatcgtcagaatcgacgtggcaacaatggtccacccaaatcaggaaggaatttctcaggtcctagaaatgaaaggagaagtggcccaccatcaaaaagtgggaagagagggccatttgatgacacatcctgcaggcacaactggggttgacctcatcaatggcagctctgcacaccatcaggaaggagtacctaatggtgcaggacaaaagaactccaaagattgtactgggaaaaaaagagaagaccccaaaccaggccctaaaaaaccaaaagagaaagtggatgctctatctcaggttgatctccacaattatgcaagtgttgttataattgatgatcatcctgaagtaacagtaattgaagatccccagtcaaatttgaatgatgatgggttttactgaagtggtatccaaaaaacaacaaaaacgtttacaggatgaagaacgccgaaagaaggaagaacaagtcatacaggtctggaacaaaaagaatgcaaatgaaaaagggagaagccagacttctaagcttcctccaagatttgccaaaaaacagggctacagggatccagcaagcacagtcttcagcctcagttccacctctagcttcggctccacttccaccttcaacctcagcttcagttccagcctcaacctcagctccacttccagcaaccttaactccagttccagcctcaacctcaggttcggtttcaaccttaaccttaagttccagtttgggcttcaccttcagctccagttccagcctcccccttagctccagtttcagcctcagcctcagtctcagcttcagttccagcctctacttcagctgcagctataacctcttcttcagctccagcctcagccccagctccaacccccatccttgcttcagtttcaaccccagcttctgtcaccaatcctgcctcagcctcaattcccattcgtgcttcagccctagcatctacttcagctccaacgccagccccagcagcctcttccccagctgccccagtcatcacagctccaactatcccagcctcagcccctactgcctcagtcccacatgcaactgcctcagcttcagccccagccccagcccctaccccagtctcagccccaaatcctgccccacctgccccagcccagactcaggcacagacccacaaaccagtccagaatccactacagactacatctcagtcttcaaaacaaccacccaccatcaattaggctgccttcagctcaaacaccctaatggcacagattatgtagcctcaggaaaatccatccagaccccacagtcacatggcactctgacagctgaatttatggggataacaaggtggccccccaccaagctgtgctgaatgatatcctcctaagaaaattagggtccccattagtcccacccacagcccaccttcagtcagtgcatggaataagccccttaacatcgtttggatcagctccttcatcagagggagcgaagaatggtcaagaaagtggactcgaaattggaactgacacaattcagtttggtgctccagcctcaaatggaaatgaaaatgaagttgttcctgtgctttcggaaaaatctgctgacaaaatacctgaacctaaagaacagcggcagaagcagccacgagcaggacctatcaaagcccagaagcttccagatttgagtccagtagaaaacaaagaacacaaacctggtcccattggaaaggaacgttcattaaaaaatagaaaagtaaaagatgcccaacaggtggagccagaaggacaagagaaaccaagcccagctacagtcagaagcacagatcctgtcacgacaaaggagactaaagcagtctcagaaatgtctactgaaataggaacaatgatctcggtatcatctgcagaatatggtactaatgcaaaggagtctgtaacagactatactacaccctcttcttctttgcctaacaccgtggctactaataatacaaagatggaggatactttggttaataatgtgcccctgcccaacacccttcccctccctaagagggagactatacaacagagctccagcctaacttcagttcctcccactactttcagcctcaccttcaagatggagtctgcacgcaaagcatgggagaattctccaaatgtaagggaaaaggggtctccagtaacttccacagcacctccaattgcaactggagtcagcagtagtgccagtggaccaagcactgctaattacaattcgttctcaagtgcatccatgccccagattcctgttgcttcagtcactcctacagcatcactatcaggagctggtacatacactacctcttctttgagcacaaaatctacaaccacatcggaccctccaaatatttgtaaagtgaaacctcagcagttacagacaagcagcctgccttctgcaagtcatttttcacagttaagctgtatgccttcccttattgcccagcagcaacagaatccgcaagtttatgtgtctcagtctgcagcagctcaaatcccagccttctatatggacacaagtcatttattcaatacccaacatgcacgattggctccgccatccttggctcaacaacagggtttccaaccaggtctctctcagccaacttcagttcagcagattccaatccctatttatgcaccactgcaagggcagcatcaagcccaactgagtttgggggctggccctgctgtttcccaggctcaggaattgttcagctcctcacttcaaccatatagatctcagccagcttttatgcaaagcagtttatcccagccatctgtggtcctttctgggtactgctattcacaactttccaactgtccaacaccaagaacttgccaaggcacaatccgggtcttgcctttcagcaaacatcaaatactcagcccattcctatattgtatgaacatcaactggggcaggcatcaggactaggaggttcccagctgattgacacacatcttctccaggccagagcaaatcttacccaggcctcaaatctttattctggacaagtacaacagcctggtcagacaaatttttataacactgcccagtcaccaagtgctctccagcaggtaaactatggcatggttacagtacctttaccagcatcccagctttccttgcctaattttggatctacagggcaacctcttaattgctttgcctcagactcttcagcccccattacagcataccactccccaagcacagcatgcagagtgtaggtcgtcctgctcaagtaagccagcctttcagagggattaattcctggctggaacacagcataggcatggattggcaaccacaggaaaaatgttttggaaatgggaactaaaagcctttggaagtggcattgatataaaaccaggcacacctccaatcgctggtagaagcaccacaccaacatctagtcccttccgggctacttctacaagtccgaacagccagtccagcaaaatgaacagcattgtctaccagaagcagttccagtcagcccctgccactgtgagaatgacacaaccatttcctacacagtttgcaccccaggcaaagcagagagcagaggttcttcagtccacgcaacggttctttctctgaacagcaacagagcaaacagataggaggaggcaaagcccagaaagtggacagtgattcaagtaaacctcctgaaacactgaccgaccctcctggggtctgtcagggaaaaagtagaagaaaagccaccccctgcaccctccatagccaccaaacctgttagaactggaccaatcaaacctcaggcgatcaaaaccgaagaaacaaaatcttaaaggctatggtttattgcaggggattgggaggggggcgggaaaacatggagaattaagtcagataatgctggcagccaaaggggcaaaatggcctgtgacattatcctgttcagagcttggagatgtacaagggacataggagcaatttacactgacacacagctgctgtaccagtgaaaacgaggctttgcaagcttgtacctactatataacatgtgcttggttgatggccatgcatcttcagtcagaatttataatataaatgtatgcacccatttttttggagtgcatataatttaggacctaaaaatccttatggattagggtgaaacacccaaaaatataagggaaaataacacaggcagagggaataggctcagcctggaacagtgtggatgggtccccagctactacatcaggtggcgggttttttttgctcccttatgttcttcggatatggttatggcatttgtaggcttgggaggtaaagaactgaagataactggtgctggatagaggagccttattttttattatggcagcttgctatttttataacatggtgattgagttgaacacaattcaaagtacagtagtaactgatgtccccttcttcctgggtgaatgagcagataaatattggatgtcagcatccttgaaccatatcaaagtgagcagtgtttggctactgcttctatttgaaatggtgctgtgttttggttgtggtctgaagctttgaagcgctacttagcatctcctttcttccatggagctctcacgattcaaacatgacagatttggtaaaatgctggttagggtttgagtcttcctttgcccccacttcagtcatcctttgtatgaatcccatgatttgggggtttttttcttttttttttttataccagtttttagctggtgtttatgaagaacagtgagtacctagaactgtgccactaattaaaggaaatcctaaagaaggtgcatttctttacaagagctgtgtcatgccatcctttgggccctctgctggaaaagtagaatcaagtctcaaataatgcctttttaattgtatcctctagtattatagatatagggacagtactgtatcatacctctgtgaatgtaaaatatcttgtacctgctttatgatacgtagtagttgaccgtgctttatcagagctgtttttaatgatgttattctagaatgttttctttccagatgatgattcagaagctaattttaaaaaacggtgccagggtaccacaacagtaacagaactttgccaattttctgggggttttgttttttacctttttccccccccttttttttaaatgggagtgtgctgggatgtctctataaattttatttcagatggactgcagaacctggaaaacgcggttgctgctattgatgcataacatactgctattkggtctttttatataaatatatatatatatatacatatatatatatataatttgaatttttggaaactttatgctgtgctgtcaactttggaaaaagtatcccgttttactgtgttgagttggcattgtacagaaaattaacagcccaattggtctagaaacgttaaacttaattttttttccatttgtacaggggtaacgcaactgtattaaatatgtaagcttcttatccacatgggtttgatcacaggaactaataaagtattctctgaataatgaaaaaaaaaaaaaaaaaaaaagggcggccgct

SEQ ID NO: 134281 - DNA, 561 bp, Homo sapiens
  misc_feature (1)...(561): n = a,t,c or g
gagtgttcgacttggaattacttctggcaacaagtcctggatcctgcctggcaccttctgtttgatgggtgcaacctgaccagagagagctggaaggccctggagcgggcagcttctctaagctgaagctgcagcacatccaggccccactgtcctgggagttggtgcgccctcatatctatggatatgctgtgaaatagtgtgagctggcagttaagagctgaatggctcaaagaatttaaagcttcagttttacatttaaaatgctaagtgggtgacaagagcaagactccgtctcaaaaaaaaaaaaaaaaaaaaaaaagaagtagagacagggagacagggtctcactgtgttgcctaggccggtcttgaactcctgggctcaagtgattctcccaccttgacctcctaaattgttgggattacaggtgtgagacagtgcacctggccgaaatagctcaagtttctgaaaaacaaatctgaatcnaatttgttaatccttagngtcactgggtctgggctttcaggaattaacctacaagggtttgccaacctaggt

SEQ ID NO: 134282 - DNA, 2391 bp, Homo sapiens
  misc_feature (1)...(2391): n = a,t,c or g
tttcgtctggagagcccggtggggtgtaagtacactgcgcttataaaactctagcaggaagctagcagctgtctccaaacccagagaaggggaaacaggaatcgattaggaataaaggattataatccactttccttctgaggaaaagctgggaacgcttctcattttgccttatgaaagactaagctgaatcgactgctgccaaacatctattaagcaaaattggcctcttgcccatgatttgactttccagcacagccagttctttttctcctctgcagctgattggctctggagtgaggccagaagcctctctcctgcaattaaaggagtcgggtctctaactgttgatctgtttttttcccttctgagcaatggagcctaccatttttattcctgagactggccatttacatcctgacttttcccttgtacctgctgaactttctgggcttgtggagctggatatgcaaaaaatggttcccctacttcttggtgaggttcactgtgatatacaacgaacagatggcaagcaagaagcgggagctcttcagtaacctgcaggagtttgcgggcccctccgggaaactctccctgctggaagtgggctgtggcacgggggccaacttcaagttctacccacctgggtgcagggtgacctgtattgaccccaaccccaactttgagaagttgttgatcaagagcattgcagagaaccgacacctgcagtttgaggcgctttgtgggtaggttgccggggagaacatgcaccaggtggcttgatggctctgtgggatgtggtggtctgcaccctggtgctgtgctctgtgaaaaaccaggagcgggattctccgcgaggtgtgcaagaatgcctgaagaccgggaggggctttcctatttcatggaagcatgtggcaagctgaagtgttcgacttggaattacttctggcaacaagtccctggatcctgccctggcaccttctgtttgatgggtgcaacctgaccagagagagctggaaagccctggagcgggccagcttctctaagctgaagctgcagcacatccaggccccactgtcctgggagttggtgcgccctcatatctatggatatgctgtgaaatagtgtgagctggcagttaagagctgaatggctcaaagaatttaaagcttcagttttacatttaaaatgctaagtgggagaagagaaaccttttttttggggggcggtttttttggtttgttgttggttttttttttttttttggcgggaagaaagagttttgctcttgttgcccaggctggagtgcaatggcgtgatctccgctcactgcaacctccacctcgcgggtttaggcgattcttctgcctcagcctccctggtgcctgtggtcccaggtacttggggggctgaggcaggagaatctcttgaacccagaaggcgaaggttgcagtgaaccgagatcgtgccgttgtactctggcctgggtgacaagagcaagactccgtctcaaaaaaaaaaaaaagaaaaaaaaagaagtagagacagggaggcggggtctcactgtgttgcctaggccggtcttgaactcctggggctcaagtgattctcccaccttgacctcctaaattgttgggattacaggtgtgagacaagtgcacctggccgaaatagctcaagtttctgaaaaacaaatctgaatctatttgtgattcttagcgtcactggtctagctttcagaattaacatacaaggttgccacacgcgtagttctggcccagctttatggtcttttatttccagtattccaccaaagttttgtttttcctgcaattccagttctcaaagtcttaaggattaaaggattgtactttgacagtttaggtattatccataaaaactatttgagggtggttaaggttccttgggttcaattttccttaatactttgcctgaatattggagattgggggttgnaagagngggnccccaaccaaatagaaaaagtcctactaaattagggaaaacccttgaataattagggtaccccccagggaagagccccccctaaacatcaaggcaatcctgtgagtcctgtaaaagaaataaatattttttgggattattccttatcctaattccccaccccctgttggaagatgatttcctttgttcctttgcaacctatggaagctgtgaaaatcgatcacaagtgcctctgaaagcgagtgttaggttggttagagggtttaatattttctgcaatggtttgtaggaattttaataaatggtagtatattttttttwkatgattttgtaaaagtactattttaaatatgcaaatcaaccaataaattcaccctctgtgttaggaacagaaaaaaaaaaaaa

SEQ ID NO: 134283 - DNA, 732 bp, Homo sapiens
atgcccttctctctagctgactgtgatagccaacactgcctactttttgctgtggtagatcttgggactgccaaagccacttcctgtatgtcagacacatttgacttttacagcagttcaggcaattcggcaaatttgaaggaaggtgggaagagcccgccggccggccccgggaaggggcctcgaggagcccagaaaagaaagtattctggcccctggaaccgaaaggagtcttgcaaaaagcacgaaggggtcaagggggccgaagggagagggggaaccgtcgcctccgtccgagagtcagcgaacctcgctttaaaatggcggcattcagtatgcacccctgctaaaggctctcccggcaccggggccacctcgcgcagcgctgcttttgcttctgccgctaacagatggcatgtgccgctgtcgctgccgctgcccctgctgctgccgctgagagcagggccccttagcctctgggtttgcgctagcagcgtaaggttgccaaatcgggcctttgatgggagggcatttcctataggtcgatggtccaatagagactggccaaataaagttgagggccctgaatttgccattaacgtctgccagataattcttaactcagaggaatttgattcttccaatactcaaattgaaaattgtgcccttaacatgtgtagagcagttggcacaaaggggaagggcgctaatttatctgactctagtcaataa

SEQ ID NO: 134284 - DNA, 412 bp, Homo sapiens
cacatggacctggcccaaccctcacagccagtagacgagctggagctctcggtgctcgagcggcagccagaagagaacacgcctctcaatggtgccgacgaggtcttcccttctttggacgaggaggtccccccggccgaggctaacaaggaaagcccctggagctcctgtaataagaatgtggttggaagatgcaaactgtggatgatcatcacctccattttcctaggtgtcattacagtgatcatcataggcttatgtcttgctgcagtaacttatgttgatgaagatgaaaatgaaatacttgaattatcatcaaacaaaacattcttcatcatgctgaagattccagaggagtgtgttgctgaagaggaattgcctcacctgctcaccgaaaggctcacagatgtgt

SEQ ID NO: 134285 - DNA, 413 bp, Homo sapiens
  misc_feature (1)...(413): n = a,t,c or g
aattcagatttctgcctgtgtccttcactcatctgttggtgattataacctctgagcatcctccgagattntgagtctttggccatggctgccagtgagggagggagcacacttccacagctgttactctgtcctaggggcagatgggcctttggggtgatgcttctccccatagtagcactgctgaaatgtggggagatggaagatgtggttttctttcgaggcaaagtatcactcagatagaggccttctttatgctgttttttcctttcttccagacttctaaagtgctctttactctgtggctggctcgccagcacagctgtggcaggctcagtggcaacagcatcagcatcagcaggaaactgagtggaaggggatagattcgtggaattgccacacggctcattaat

SEQ ID NO: 134286 - DNA, 530 bp, Homo sapiens
gccaaagactcagaatctcggaggatgctcagaggttataatccccaacagatgagtgaaggacacaggcagaaatctgaattttataaccgcacagcatctgaatcaaatgtctacttgaatagtttccattatccagatcacagctacaaggaccaggcctttgatactctgagcctcgatagctctgatagcatggagaccagcatctctgcttgctcaccagacaacatctcttagtgccagcacttcaaatattgctagaatagaagaaatggagagacttttgaagcaggctcatgcagaaaagacgcggctgctcgaatccagggaacgggaaatggaagccaaaaaacgagccctggaagaagaaaaacgacgccgggaaatcctggaaaaacgattacaggaagaaactagccagaggcagaagttaatagaaaaggaagtaaaaataagggagagacaaagggcacaggctcgtcctttgacacgctacctgcctgtccggaaggaagactttgatttgc

SEQ ID NO: 134287 - DNA, 595 bp, Homo sapiens
gagttggatatggaatgtgctcttttggatggagaacagaaatctgaaacaactgaacttatgaaggagaaggagattttggatcatctaaaccggaaaatagctgaactggaaaagaacattgttggtgaaaagaccaaggagaaggtaaagcttgatgctgaaagggaaaaactagagaggcttcaggagctttactccgagcagaagacccagctggacaattgtcctgagtccatgagggaacagttacaacaacaactgaagagggatgctgacctgttggatgttgaaagcaaacactttgaagacctggagttccagcagcttgaacatgagagccgtctagatgaagaaaaggagaacttgactcaacagctcctgcgtgaagttgctgaatatcaacggaacatcgtttctagaaagggaaaaattttctgcattgaaaaagcaagccaatcacattgttcagcaggctcagagagagcaagatcattttgtgaaagaaaagaataatttaataatgatgttgcagagaagaaaggagaatctttgtaatttggaaaggaatactccagcctctctgggaggaaag

SEQ ID NO: 134288 - DNA, 1027 bp, Homo sapiens
tttttttttttttttttgacacatgtatcaattactttattaggtgcattctataggttgaagaggagaatttttggcaaataaataaataaataaataaataaataaataatcaaacagagactctggggcccgaggagctcaggaaaacggaagcggagtctttgcatagttctaaatgaacaggaggtggcagcagtaggcaacgcggagttctcggcggaaatgcagcacttgcaaaaaccagggacagaaaggcttggagaaagaggagaaggtcagaaggtgactaactatttctttttcgtaaaagaccatggtgtggaaacattcgtcctctctaaccaggggcaggatgccgcgtcctaacatgaatctgcctgggcatcccgtaccctgtcatgcacgcctgggaggctcccttgttgctgcccatctgcaggcctattacgttctgtccctggcgaagctgctcctcggaaaagcctctccgattctgctgggctttcctgtgaaaccaggatggctctccccgatagcagccatcatccttggtgactgcaacgctgcctaaagccatcagggtcctctgcacaagctgccatgtccttcccttcccataagaaccaccgtctggaaaagatgtcgggggttctgacaccataggtctccgcagcttttagggaactgggagatttgctccatctgcctaaaaagccatcttttgactctgagaaccttgggtatgggcttctggtcctggtggggataaactatttatcagcttggcacaggacccgcccgtcccattaaccctttcctgaaatgggccctgccggggggcgggtgctctatgtcctcggcgcactgcaggatgatccagtccaccagcttgttctccaggtccgcatcatacttctgctcgatcttctcctgcacctctcggcttaagccatagctcgggcccctgttagccatctctggaaagaagagaagacacgcgcggcatccacacaatagcagcaca

SEQ ID NO: 134289 - DNA, 4553 bp, Homo sapiens
agactgagctgcagcagctgggccaaaaaactgcagacggttcaccaggtctaaagagagccttaatatttgcccttaactttcacagttccccgccagggaaggacatggcagctgtgcagaggaccctgatggctttaggcagcgttgcagtcaccaaggatgatggctgctatcggggagagccatcctggtttcacaggaaagcccagcagaatcggagaggcttttccgaggagcagcttcgccagggacagaacgtaataggcctgcagatgggcagcaacaagggagcctcccaggcgggcatgacagggctgtcagatcccacaccatggactgcacacctcgggatgtatgttcaggggaatgccaagtttgtctccccggtgagaagaattgtggtccacgagtactataacagtcagacttttgattatgatattgctttgctacagctcagtattgcctggcctgagaccctgaaacagctcattcagccaatatgcattcctcccactggtcagagagttcgcagtggggagaagtgctgggtaactggctgggggcgaagacacgaagcagataataaaggctccctcgttctgcagcaagcggaggtagagctcattgatcaaacgctctgtgtttccacctacgggatcatcacttctcggatgctctgtgcaggcataatgtcaggcaagagagatgcctgcaaaaagaggaaactgggcacagagaggcccggcacccaggcagcccctaaacggagatggtctgcatctgcaggcgcggggaaaggcatagcaggcagcgccctgaacaaatcagaaaaacagccttcggctctggagcccactccggcacggcctcaggtgctctaccccgcgggatccagggagtggccgccactcacagttgcccctcctgtccgctccggtccgctcccgccgcccgaggtccgcgacgccccgcccagtgggtggagtgtgaggcggggaggtcgctcgactcgccggcgctgtggcctcccgcggagccgctcagactttccctgccggcacatggacctggcccaaccctcacagccagtagacgagctggagctctcggtgctcgagcggcagccagaagagaacacgcctctcaatggtgccgacaaggtcttcccttctttggacgaggaggtccccccggccgaggatgctgacctgttggatgttgaaagcaaacactttgaagacctggagttccagcagcttgaacatgagagccgtctagatgaaggaaaaggagaacttgacctcaacagctcctgcgtgaagttgctgaatatcaacggaacatcgtttctagaaaggaaaaaatttctgcattgaaaaagcaagccaatcacattgttcagcaggctcagagagagcaagatcattttgtgaaagaaaagaataatttaataatgatgttgcaaagagaaaaggagaatctttgtaatttggaaaagaaatactccagcctctctggggggaaagggtttcccgttaaccccaatactttaaaagagggctatatcagtgtaaatgagattaatgagccgtgtggcaattccacggaatctatccccttccactcagtttcctgctggatgctggatgctgttgccacttgagcctgccacagctgtgctggcgagccagccacagagtaaagagcaaagatcacctgtctattctggatttgtgtttccttccgctctttctcctcatcctatcactcaacatacatcagccccatggcctgaattcatggctacatctgtcgatcctttacctttaaatgacacacctcctcctttaccagctaagaaacacagaaggcagcagcagcagcaggagcaacagcactttagaagtctggaagaaaggaaaaaacagcataaagaaggcctctatctgagtgatactttgcctcgaaagaaaaccacatcttccatctccccacatttcagcagtgctactatggggagaagcatcaccccaaaggcccatctgcccctaggacagagtaacagctgtggaagtgtgctccctccctcactggcagccatggccaaagactcagaatctcggaggatgctcagaggttataatcaccaacagatgagtgaaggacacaggcagaaatctgaattttataaccgcacagcatctgaatcaaatgtctacttgaatagtttccattatccagatcacagctacaaggaccaggcctttgatactctgagcctcgatagctctgatagcatggagaccagcatctctgcttgctcaccagacaacatctctaggttctatgctacagggatacaggcacgaaagtctgtctgtatgtcctcaagagagtctagtaaagaaggcagagagacttctcagtctaaaccaatattctcaaaaggctttggtgtttcattcagtgccagcacttcaaatattgctagaatagaagaaatggagagacttttgaagcaggctcatgcagaaaagacgcggctgctcgaatccagggaacgggaaatggaagccaaaaaacgagccctggaagaagaaaaacgacgccgggaaatcctggaaaaacgattacaggaagaaactagccagaggcagaagttaatagaaaaggaagtaaaaataagggagagacaaaagggcacaggctcgtcctttgacacgctacctgcctgtccggaagagagactttgatttgcggagccatgtagagactgctggccacaatattgacacctgttaccatgtatcaatcacagagaagacctgccgaggattcctcatcaaaatgggtgggaaaattaaaacgtgaaaaaaacgttggtttggttttgatcggaacgagcgaacattctcttaatatgcagacaagcatgaaacttaaattgaaaaggagtaatatactttcaagccattgaagaagtctattatgatcacctcaagaatgctaataagagtcctaatccgttactcacctttagcgtcaagactcatgacagaatctattatatggtagccccatcgccagaagccatgcggatctggatggatgttatagttacgggggcagaaggttacactcacttcttgttgtagtgaactgaggcaacagtccacttcagggcagacggcaataatctcttacaagaatgaagccatattcaaccccagatgagaaaacccaacagatccatcccttgagctgtaaacactcagaactcctttcatatcaagacaagttatttgtaaaaaataaagaaggggttttaatacaaaccttcataataaatagcaaaataattgaagcttccatgagaaagaaaacactattttgataaattggatcacttataggaacatttctaataaactgtttttaatcagttgtcggatttggtgaaataaactaaacaggttacagaatatctgtatgtacttggaaatacagaataactttatcaccccacatcattggcattgacattattggtaatcaactggcttttttttaaaaaggtagcattttgttgacagttattttgtaaacataagcaaataagggcttggagggaaatacattttaggaggagttttgccttaattttttaagtactgcaccaaaaccaaagagctgacctgacttctgtggaacagtagtaactgcaagtgatgaactgcatttcgtattgttctgtatatttcaaaatggtattttgatgccatcaaatgcccaggaaattgactttgcagtgtcaccactggtgtaagctactatatatgtatatatatatatgtagtaaaccactttttgtaaaagaagaaagagcaaaaagctgtgtgttttagaaaaaaaagccaggttacgcaacaggcattctgtcatgttgaacaattttaaataaagagaatatctggtgttaggagcttgttttgctgaagatttctccattcctggtgctgagaataaaggcaaccagtagccaatgtcctttagattgtctgatttctttttgttgtggagcacacctgctaactgctccctcaacataactatgaaatcatagctctgttttcaccaaaggaacagaccaattaacatacttatttgcagaagtgggtgtagttctacaaaacgggcaaatgaagttcaacttaatattctctataatgtattattttattttatttttttacaattaggccttttttttaggttaatttttgtccaaatggaaacggacttcaggggcaagtctcttttataatggtttttcaagtgccatttattctagtttatcatgttttgcatgtttgaaagtatgaatgtgctctttcctaaaacatggcaaatgaatagatgtagagaataacaatattacttacaagatgaaatgattagattagaagtgtccctttattagactttgtcagcctgactgggtacaattcttttgttaatttgcagtgtggtttgtatacacgtatacg

SEQ ID NO: 134290 - DNA, 2218 bp, Homo sapiens
ccgggtcgacgatttcgtcgcgccgccgcgtcagctcagcgctgggtctctcggtcccgcagccgtgaggaggacggtctgcatactcgctgcccgccggctccctcccccgcgtccctgcgaccgccgcggcgaagatgattttcagttcacccactagaggcaaagacgtaagagagctaccagcgtattgagaggagatacacaggcactacgagaatggagtttagaagaagttcagagccctgggcagtgttgggccaggctttagggcctcaggagtgcaagtagctgatgaagtatggtcgcatttttgtatgacatgaaagttcggtaaatgctccagcaccagaagaagatcaagacaaagaaagaagtgctgtcatttttttgtctcagtgcagacaaaaagtgcatcattgtagaaggaaggccaaggagatcttggttggagatgttgggtggaacccataaactgatcccttccagccattttgtggggaatgcttccctgaaaaaagattgttcgctatgcttttgttatggatggcaagcttttggaaacaaaaggattccagaaaaggaagagtttgatgtttttttttgtggggcaccagaactaggcacctctgaaaaagtaaaaatgatcttattgcaagctccaagggatggcatttaaaaagaattttcaaggcataaaacatgaatgtcaagcaaaatggaccagaagatctcaatcgggccttgtattgctgaaaaattaaggtggatccttaattgtagcctttgaaggatgcccctgtgtagatcatcattcagtgccacaaattgaaaagcttccaatgtttaattgttatcctcttgctatataaataaagcaaatatatttagggcaggggtctcactgagggggagcttgtcttgtgcatcttttaggagtaaactatttctataaaacattatggcaaacagccctaaataaatctaaagtctaaaagttttaattgatgtgacattaaaatcttactggcccaaatgcctgttttgatgagttgatatataaaagatttttgttaagctcagggattttaaattacacaggtcacaaacagttaagggcatgtgaagagaattattacatcttattttaaccctcagcaatttactttgtttcttttgcttaggaaattgctcataatctggttataatttgggtccaaattctttattcttccttggagctaagcagaataatgggaatataatatgtcttccataatataaccaacacctaatacacctaatagtaagatttaagttaggcaagtcttcctacccaaatgtgtaatggatgattgccctcaaaattggtgtccacataaatccacgctccatcttgcaaagcggtaattccagccccatcattggaatacaggaaagtagccctgcacttgcccagtgagctcgccattcactggattggaagagtggacctgggcatcttgggaaatcattggtgtgtcctcagggagaatgtgcaagtgtcttgtaacaactttaattataatgcgaaattagggctaacattgtaaatctgctttgttaaatgaaaaatgaataaaacagaatattgccaagctaggacacctgtggtatctttaattgtatctcctatcagaagtttgcttcttatggtataataaaagtatggaagaataattgagtatatgtttactctgggcctgggagaacttaaaactttctagagcagtttgttgacttgtgtgcaatggggagaggtaccatgatgacactcacaagggagccactgttcactgacacttggaagcggtcattgttaatatcacgggcgtaacactttgaacgatatagagatgcacaaacagttgaacttagaagtagcagtattggctttatgtaataaaggaagcatttttgacttacctctcgtgtaattttcatgtgtgaattgggaatacaggattttgccttccatatggggtaaggcattgaggtttgggtatttccaataattaagagttaaggttggcctcctaaagtgctgtgattacaggtgtgagccactgtgtcctgctagtgattgtgattaacaggcctccaaggaagtgccataagccccagactgccgtactccaaaagtcagccatgtaggtaagccaagatatttggccaggag

SEQ ID NO: 134291 - DNA, 1510 bp, Homo sapiens
ggagagttgaaacagatgggggattcgcccaggagctgaaaccgagggaggtaagcgagccagagccttgtgtgcacgtgtgtgtgcgtaacacacaaaccagggggcatcgctaataaatcaaatatcgtgataaattcaggagggccatcgatcaggtccacttggctggaaacgacgtgaatctgcctcttttccgctttcttcttctcctctctcggagctggagggagccaaatgttccgcggggagtgcgacagccccggccgggcgctcccctcgtaatgacacgttaataaatgttttcttttatctgctttcacaggactcgccccggtctgcaaacactcccctgcctttcccgaaagcctcgcgctcgcctacagccacacacatttgccattggagaggccggcgccggccgcgacccgcagctcaatcgcagggcaaaccgagctgcctgtgcgcgcccgagaactccccgagaaattaacttcggctcaacctggtcctctgccaggacttgatggaatcgctgcccacttggcacccaggtctgtcctcaccctgcgatggctcttgggtgactcatcaatttgtgcttatatccggtcgtctgtggctctggcaggtcctggtacccacaagggctgggctgccaaccaggcttgcagcagaggcctctggggtatgtaccccgaagaactgaaaaacagggacttgaagagagatttgtctcccatgctcatagcagcgttattcacaatagccaaaagggcgatggtcactgttgttcttgcctctcctctgagttccggtctcatttatccaacagacatcttgacatctccacctggatgttttgaaggcaactcaagccagtgtgcctgggtgtgggtagagtggactgctgaggtcatggacaaaagcctgcaggcaaaaagaagaagatattggcagttagaagtggctctgagcctgctggagggttccagggctatgtggagggcacggaacagcatctgctcccctggggatgatgacagccccggtgctttgtgggaacagagtcctggccctctctgagcctggcctggtgctgtctcagaagagcccatggtctgtgctgagccagtgcaagagcagagtggaccgcagcttcctcctccacggcactcccgaagcccctcgggtgactccggccaaccaggtgttccagcagagagaaggaggattatggggatggcagatgcttaagtacatgcaggctgtgaagaactatcattatcctcagtttatagaggaggagactcaggcacagagaggtttaaataacctgcccaaggtcacacagctaagccttggtcctgcccagaccctagtgctgtcctcctgtgaggatgacctggccaggccatgtgatgaaggtgccctgtcagggaccctcggccagctcaggggtaagaatgcagtgacagtcagcggtgatgtcccctgtgaagagccctga

SEQ ID NO: 134292 - DNA, 539 bp, Homo sapiens
atttgctgatggatactttcttcaaattgtcatttatcttgtgagaccatagcccagtggcgtaaagctggctaccaggacatgcccgagtatgaaaacttcaagcaccttctgcaggcaccactggatgatgctcaagaaattctgcaagcacgcttcccgatgcctgttaagctgaggatacaaccaggaaatgcaacggtgtcagattgtgttcaaaatgtctagaaaggcttgataacattcctgttacttttctagcagattttaacaaataatcaaggacattttatatgtaactctttagattataatttatttgtattcctgtctttgtcctttttcttgcactataaaattataaggtcataaatgttttggtacttgtagatgtttatgtgctttttgtatcctaacttttagaatctaaataaaatcagaggtaatgtattttggcagcttgtttaggtgagaatcttaatgatcataaaggaaataaatctagatgcagaaagtactggctaaaatattgctaataa

SEQ ID NO: 134293 - DNA, 798 bp, Homo sapiens
  misc_feature (1)...(798): n = a,t,c or g
cggcgtgacaccatcgcccgaaattgggcaaatgtacagagtcaggtcaggcacatagagcaagcatttgaccaggaggctgcggcaagtgttgatggcacggcttgggggtgttcgaaccgaagtcaaaggaggggcccgatgtgctccggtggctggaccgacaactcatccgactgtgtcaaaagtttggacagtatancaaagaagaccccacttcttttaggttatcagattccttttctctatatcctcagtntatgttccatctgagaagatctccatttcttcaagtgtttaacaacagtcctgatgagtcgtcatattacagacatcattttgcccggcaggacctgacccagtccctcatcatgatccagcccattctctactcttactcctttcatgggccaccagagccagtactcttggatagcagcacgcttcccgatgccacgttacatcaacacggagcatggaggcagtcaggctcgattccttttgtccaaagtgaacccatctcagacacacaataacctgtatgcttggggacaggaaactggagcacccatcctaactgatgatgttagcctgcaggtgttcatggaccatttgaagaagctggctgtctccagtgcctgttaagctgaggatacaaccaggaaatgcaacggtgtcagattgtgttcaaaatgtctagaaaggcttgataacaatcctgttacttttctagcagattttaacaaataatcaaggacattttatatgtaactctttagattataatttatttgtaaa

SEQ ID NO: 134294 - DNA, 566 bp, Homo sapiens
  misc_feature (1)...(566): n = a,t,c or g
acattatttttgattttatttagattctaaaagttaggatacaaaaagcacataaacatctacaagtaccaaaacatttatgaccttataattttatagtgcaagaaaaaggacaaagacaggaatacaaataaattataatctaaagagttacatataaaatgtccttgattatttgttaaaatctgctagaaaagtaacaggaatgttatcaagcctttctagacattttgaacacaatctgacaccgttgcatttcctggttgtatcctcagcttaacaggcactggagacagccagcttcttcaaatggtccatgaacacctgcaggctaacatcatcagttaggatgggtgctccagtttcctgtccccaagcatacaggttattgtgtgtctgagatgggttcactttggacaaaaggaatcgagcctgactgcctccatgctccgtgttgatgtaacgtggcatcggggagcgtgcttgcagaaattcttgagcatgtnctggtagccagctttacgccactgggctatggtctcaccaagataaatgacaatntgaaa

SEQ ID NO: 134295 - DNA, 3033 bp, Homo sapiens; identical to SEQ ID NO: 129057

SEQ ID NO: 134296 - DNA, 2678 bp, Homo sapiens
atggcggaggtgaaggtgaaggtgcagccgcctgacgcggatccggtcgaaatagaaaacaggattatagaattatgtcaccagttccctcatggaatcacagaccaagtaattcagaatgaaatgcctcatatagaagcccagcagcgggcagtagccatcaataggttgttgtctatgggtcagttggatctcttaaggagcaatacgggccttttatatagaataaaggactctcagaatgctggtaaaatgaagggatccgataaccaagaaaaactagtatatcaaatcatagaggatgcaggaaataaaggaatatggagcagagatatccgctataaaagtaatttgccattaacagaaatcaacaaaattctgaagaatctggaaagtaaaaagcttatcaaagctgttaagtctgtagcactcggcattcctgctggctgttctgtttgccctaaatgtggggccagcaatcacctgtctgcccgattctgtggctcctgtggtatttgtgtgaagtccctagtgaaacttagcttggacagaagcctggctctagctgctgaggaacctcgccctttttctgagtccctgaatattcctttgcccagatctgatgttgggactaagagggacataggaacacagactgttggcctcttctacccatctggcaagctgctagcaaaaaaggaacaggaactagcctctcaaaagcagaggcaggagaaaatgagtgaccataaacccctcctgacagccatcagcccaggaagagaaaacattggggaaaatcttcaggtcattggtctggtcaaaaatttcttgagcaatattccacaagcaccggccacccaagccaaaatgggcaaatgggatccacgccagcgaggtgctcagtcccctctgatctttctctatgtggttgacacatgcctggaggaagatgaccttcaagcactcaaagagtccctgcagatgtccctgagtcttcttcctccagaatgctctggtgggtctgatcacatttggaaggatggtgcaggttcatgagctaagctgtgaaggaatctccaaaagttatgtcttccgagggaccaaggatttaactgcaaagcaaatacaggatatgttgggcctgaccaagccagccatgcccatgcagcaagcacgaccatgcacaaccacaggagcacccttttgcttcaagcagatttctgcagccctgttcacaagattgatatgaacctcactgatcttcttggggagctacagagggacccatggccagtaactcaggggaagagacctttgcgatccactggtgtggctttgtccatttgctgttggcttgctggagggcacttttccaaacacagggagccaggatcatgctgtttactggaggtccccctacccaagggcctggcatggtggttggagatgaattaaagattcctattccgttcttggcatgatattggagaaagataatgcacgattccatgaaaaaggcaaccaagcactatgagatgcttgctaatcgaacagctgcaaatggtcactgcattgatatttatgcttgtgcccttgatcaaactggacttttggagatgaagtgttgtgcaaatcttactggaggctacatggtaatgggagattctttcaacacttctctcttcaagcagacattccaaagaatctttactaaagattttaatggagatttccgaatggcatttggtgctactttggacgtaaagagggttcaagttggggagaggggaagggaagccaaaaacaagctgtggactgtccatgcccacagttcctggagagccttgaacactggactgagaagctttgactttatcccagggacagtaagagagcctgtaaagattttaggcagaaggttgacatcggatttgcagattaggaacagccctttagaggctgctgtacaaggcggtgtgtcaaaaactgtatcgacggtttctctggcgcatgcaatgcgtgctcaccctcatcttcttatggaggatttaaggattctggttattgaccttgatccgcaatcttcagcaacgatgtttttaagccataaacactctattggtatcgtaaacgcaacatctgcacaggctatgttgcagaatgtaagccgtgaagagctgttagaggagtttattgttccttctgttgtacctggggttgacgttatgcctgcgtcgattgacgatgcctttattgcatccgattggagagagctgtgcaatgagcatctaccgggtcagaacatccatgctgtcctgaaagaaaatgtgattgataagctgaagagcgattatgactttatactcgttgatagtggacctcaccttgacgccttcctgaaaaatgctttggcctcggccaatatactgcttacacctctgccgccagcaactgtcgatttccactcatcgcttaaatacgttgcccgccttcctgagttggtgaaactcatttcggatgaaggctgcgagtgccagcttgcgactaacattggtgttatgtccaagttgagtaacaaggcagaccataagtattgccatagactggctaaagaagtgttcagtggggatatgcttgatgtcttcctgcctcgccttgacggctgtgaacgctga

SEQ ID NO: 134297 - DNA, 3837 bp, Homo sapiens
  misc_feature (1)...(3837): n = a,t,c or g
tcatcgttctcgctttccggtagctaaggcgatcagcgggacttcccactgagacgagcggatgtcatattgtatcagggcgaacctctgaggagcgctggctgcgcttaggcaacggtgcggcaggcgccggggttttctgaaacagaaacgtttaggggtggggaaacgtgttccgaggaactctcgttttgaagtgcgacatacacctgtcttgccctgttccaagatggtggcagagcttctctgagtctctcgcttcctccagtccgtcggagaagcgctctttgattggccagtggacagcgccgtggcatgacgcgctggggcgctggccaatcggttgagagctgagctggacttggcggtgggagccggagcctgcttgttgcagctgtgggtgaggacggctctagctaggtgagcggctccggccaggtgagcggggcgcatatgtgacggagggccgagggcacgggtatgagtttctgccgggggcgaggtgagcggcttctgggaggaggccttttcttgacagtttagggtagcgggggaatggatgatccgggagtcccctgcggatgtcgtcccgcaccaggccgggaccgatttctggctccagtttccccagaattgcggagtgcgcacacctggaaggacccaagtcccgttttatagttgagaaactcaagactcagacaagtgaaacgacttttgcttcatgacagctggaactggaacccagttcccttttagactatggacgacatacctgaatgtcatccagcagaatgaagaacgggatggtgtgcgttttagttggaacgtgtggccttccagccggctggaggctacaagaatggttgtacccctggcttgtctccttactcctttgaaagaacgtccagacctacctcctgtacaatatgaacctgtgctttgcagcaggccaacttgtaaagctgttctcaacccactttgtcaggtttgattatcgagcaaaacttttgggcctgtaatttctgttttcaaagaaatcagtttcctccagcttatggaggcatatctgaggtgaatcaacctgccgaattgatgccccagttttctacaattgagtacgtgataccagcgaggtgctcagtcccctctgatctttctctatgtggttgacacatgcctggaggaagatgaccttcaagcactcaaagagtccctgcagatgtccctgagtcttcttcctccagatgctctggtgggtctgatcacatttggaaggatggtgcaggttcatgagctaagctgtgaaggaatctccaaaagttatgtcttccgagggaccaaggatttaactgcaaagcaaatacaggatatgttgggcctgaccaagccagccatgcccatgcagcaagcacgacctgcacaaccacaggagcacccttttgcttcaagcagatttctgcagcctgttcacaagattgatatgaacctcactgatcttcttggggagctacagagggacccatggccagtaactcaggggaagagacctttgcgatccactggtgtggctttgtccattgctgttggcttgctggagggcacttttccaaacacaggagccaggatcatgctgtttactggaggtccccctacccaagggcctggcatggtggttggagatgaattaaagattcctattcgttcttggcatgatattgagaaagataatgcacgattcatgaaaaaggcaaccaagccactatgagatgccttgctaatcgaaccagctgcaaatggtcactgcattgatatttatgcttgtgcccttgatcaaaactggacttttggagatgaagtgttgtgcaaatcttactggaggctacatggtaatgggagattctttcaacacttctctcttcaagcagacattcccaaagaatctttactaaagattttaatggagatttccgaatggcatttggtgctactttggacgtaaagacctctcctagggaactgaagattcgaggagccattggtccatgcgtatctctgaatgtgaaaggaccgtgtgtgtcagaaaatgagcttggtgttggtggcacgagtcagtggaaaatctgtggcctagatcctacatctacacttggcatctattttgaagttgtcaatcagcacaacaccccgatcccccaaggaggcagaggagccatccagtttgtcacgcattatcagcagtccagcacccagagacgcatccgcgtgaccaccatcgcccgaaattggggcagatgtacagagtcagctcaggcacataggaagcagcattttgaccaggagggttgcggcagtgttgatgggcacggcttggggtgttccgagcggagtcagagggaggggcccgatgtgctccggtggctggaccgacaactcatccgactgtgtcaaaagtttggacagtataacaaagaagaccccacttcttttaggttatcagattccttttctctatatcctcaggttttggttccatctgagaagatctccatttcttcaagtgtttaacaacagtcctgatgagtcgtcatattacagacatcattttgcccggcaggacctgacccagttccctcatcatgatccagcccattctctactgttactcctttcatggggccaccagagccagtcattttgggatagcagcagcacttctagctgacacgaattttgctgatgggatactttctttcaaattgtcatttatcttggtgagaccatagcccagtggcgtaaaagctggcctaccaggcacatgcccggagtatgaaaaacttcaagcacccttctgcaggccaccactggatgatgctcaaagaaattctggcaagcacggttccccgatgcccacgttacatcaacacgggagccatgaagccaatcgaggctggattccttttgtccaaaagtgaacccccatctcagaccccaccaataaccctgtatgcttgggggacagggaaactgggagcaccccatccttaactgatggatgttagccctgccaggtgttccatggacccatttggaaggaagctggctgtctcccagtgccctggttaagctgaggataccaaccagggaaatgccaacggtgtccagattgtgttcaaaatgtctagaaaggcttgataacattccctgttacttttctagcagatttttaacaaataatcaaggacattttatatgtaactctttagattataattgtatttggtattccctgtctttgtcctttttctttgcactaataaaattataaggttcataaatagttttgggtacttgtagatggtttaatgtgctttttggtatcctacacttttagaanttctaaataaaatcaagaggtaaatngtattttggcacggcttgtttaggtgagaatcttaatgatcataaaaggaaataaatctagatgcagaaagtactggctaaaatattgctaatacaaatgtgatttcctgaggtctctgtgtgagtgtgtatgtgttttaagtgacttccttaagaggtgtttcctgaacctaattctcataattaaagtaatgtatatgcaggatcaaaatgaaacaaatataccttatcctaaagagctcataacaaataagttacctccactctataaactcagacctactttttgaagataactgcttttaacctctccttacaagatttttgttgttgatgtatttaattttagcccatgtctcaattctcattttcaaagaaatcaatatattaatatacctttggtcaaaaaaaaaaaaa

SEQ ID NO: 134298 - DNA, 1369 bp, Homo sapiens
ggctgcattccagtatggtatcaaaatgtctgaagggcggaaaaccaggcgcttcaaggaaaccaatgacaaagcagagcttgatcgccagtggaagaagattagtgcaatcattgagaagaggaagaagatggaagctgatggtgtgggtggttccgaggctgactaccctgcggcggcgcggctcgcagtccttctcagcatggaccgcacttgtgaggagaggcccgctgaggatgggagcgacgaggaggacccagactccatggaagccccaacccggatccgggacactccggaagacatcgtgctggaagctccggctagtgggctggcgttccatccggcccgtgacctactggctgcaggggacgtggacggggacgtgttcgtcttttcctactcttgccaagagggagaaaccaaggagctctggtcatcaggtcaccatctcaaggcctgccgagctgtggccttctctgaagatgggcagaagctcattactgtctccaaggacaaagccatccatgttctagatgtggagcagggccaactggaaagacgtgtttccaaggctcatggtgcccccatcaacagtcttctgctggtggatgagaatgttctggccactggggatgacacaggtggtatccgtctctgggaccagcggaaggagggccccttaatggatatgaggcaacatgaagagtacatcgcagacatggctctggatccagccaaaaagctgctgctgacagccagcggggatggctgccttggcatcttcaacattaagaggcgtcggtttgagctgctctcagaacctcagtctggggacctgacctctgtcactctcatgaaagtacagctggttatgtgggggaagaaggtagcctgtggctccagtgaaggtaccatctacctcttcaattggaatggctttggggccacaagtgaccgctttgccctgagagctgaatctatcgactgcatggttccagtcaccgagagtctgctgtgtactggctccactgatggagtcatcagggctgtgaacatcctaccgaaccgagtggtgggcagtgtgggccagcacactggggagcctgtggaggagctggccctctcccactgtggccgcttcctggccagtagtggccatgaccagcgcctcaagttttgggacatggcccagctgcgagctgtggtggtggatgactaccgtcggcgcaaaaaaaagggaggaccactgcgggctctgagcagcaagacttggagcaccgatgacttcttcgcaggactgagggaagagggagaagactccatggctcaggaagaaaaggaggagactggggatgacagtgactga

SEQ ID NO: 134299 - DNA, 1593 bp, Homo sapiens
atgttagaaggaaaatatggtccacccccgggaagcttccagacccggcgcaccgccctagcccgctctcacacgaacacgtcaccgtccacgtctcctgcagctaacaggcttaatgcccttgggataggagagagggacgctagtccttcgtggcttggtgaaacccaagatcaagtcaagcgacagcctgggctgtcaggaagccgcaaaatcccacgctgcgcgatgacatacgggagtctgggacagcaggcagctcaagcagctggtgtccacgcccctaacgtctttgtggccagtttgctgtgccagttcctacaatttgtctacagaaactcaatgggctggacaggcggtgcggacttttcctactcttgccaagagggagaaaccaaggagctctggtcatcaggtcaccatctcaaggcctgccgagctgtggccttctctgaagatgggcagagtgagtactggggaagacaaccagcaatgtggtggaagggagcagtgagcagcaccatgactctgggcaccttttccccagagctcattactgtctccaaggacaaagccatccatgttctagatgtggagcagggccaactggaaagacgtgtttccaaggctcatggtgcccccatcaatagtcttctgctggtggatgagaatgttctggccactggggatgacacaggtggtatctgtctctgggaccagcggaaggagggccccttaatggatatgaggcaacatgaagagtacatcgcagacatggctctggatccagccaaaaagctgctgctgacagccagcctactgctctactctctacagcggggatggctgccttggcatcttcaacattaagaggcgtcggtttgagctgctctcagaacctcagtctggggacctgacctctgtcactctcatgaaagtacagctggttatgtgggggaagaaggtagcctgtggctccagtgaaggtaccatctacctcttcaattggaatggctttggggccacaagtgaccgctttgccctgagagctgaatctatcgactgcatggttccagtcaccgagagtctgctgtgtactggctccactgatggagtcatcagggctgtgaacatcctaccgaaccgagtggtgggcagtgtgggccagcacattggggagcctgtggaggagctggccctctcccactgtggccgcttcctggccagtagtggccatgaccagcgcctcaagttttgggacatggcccagcttgcgagctgtggtggtggatgactaccgtcggcgcaaaaaaaagggaggaccactgcgggctctgagcagcaagacttggagcaccgatgacttcttcgcaggactgaggcaagagggagaagcctccatggctcacagaagaaaaggaggagactggggatgacagtgactgaaggaatgaattgaatcttgagacgggtcctcaccaggcaagagtcttgcttattgggctgcatccccagagaggatatgaattattttttaaaagacagggtctgtttgcgccgctctgaggatcaagcttcggcgcgtgcatagag

SEQ ID NO: 134300 - DNA, 886 bp, Homo sapiens
tttttttacaattttttttttttaattagccaagcatggtggcacacacccgcaatcccacctactcaaggaagtgaagatgggaggatcacatgagcccaggccgcgaaggcgccagtgagccaagacagcgccactgcattccagcctgagtgacagagtgagaccctgtctcaaaaaataataatctgctataaatatttttgtacacatttgttgaagacatatattttcatttttttctgggcatgtacttgccgtatcattaggtaagtttatatttgaatctacgctctttccctcggagcgggcggcgcggcggcgtcggcggcctgtgcagcaatggccaagattcaaggctcgagatcttcgcgggaagaagaaggaggagcttctgaaacagctggacgavcctgaaggtggaagctgtccacagctgcgcgtcgccaaagttaccggccgttgcggcctccaagctttctaagatccgaggtcgtccggaaatccattgcccgtgttctcacagttatttaaccagactcagaaagaaaacctcaggaaattctacaagggcaagaagtacaagcccctgggacctgcgggccttaaggaagacaccgtgccatgcggccgccggcttcaaaccaagcacggagggagaaccttgaaggacccaaggaagcaggcagcggaaagggagcggcttttacccgttgcgggaagtaacgcgggtcaagggccctgagggggcgcctttgtcaataaaagcacaaggagaacctgaagaccaagaagcagcagcggaaggagcggctgtacccgctgcggaagtacgcggtcaaggcctgaggggcgcattgtcaataaagcacagctggctgagaaa

SEQ ID NO: 134301 - DNA, 533 bp, Homo sapiens
tttttttttttttttgagtgtggttaatcctttaccaatagcttttctgttacaattcacaggagaatacataatggagagaaatcctatgagtgcagtgattgtggaaaatcctttaatgttctctcatccgttaagaaacacatgagaactcacactggaaaaaaaccctatgaatgtaattattgcgggaaatccttcacaagtaactcctacctttctgtgcatacgagaatgcataataggcaaatgtgaattcaataactgtgggaaaagcattcattgatctttcatgcctcagataacatgagcaaactctaacaagatgtatgaatcacctgctactgtgtaacaaattaccccccaaaattttgtggcttcaaacaaaaacacttgttatctcaaaatttttgtaggtcaggaattcagaaacaacatagctctatagttcttcaggatatctcaagaggttacagtccagatgtcagcagaactgtaatcatccagaattgttactggtgaagggaccactt

SEQ ID NO: 134302 - DNA, 1769 bp, Homo sapiens
ggcacgagggagaagagccgcgcttgcagcgtctgggagaatctttcggtctccgcgagaggtgcttcattccacgaaaaaagtataattcaagctcagatttgtgttgaaaccagcctcaagtttcacctatcctcactgatccgtggacttctgtatgatcagggtgctgtcctgagagcgctgcggggataaaggaggagcgtcctgcttcccggctgccctgttgctgtcggagtcacaggatggcggctgtcgtcctgcccccaactgccgctctgtcttccctgttcccagcctctcagcgagaaggacacacagagggcggagagctggttaatgagctcctgaaaagctggctaaagggcttggtgacctttgaggatgtggccgtggagttcacccaggaggagtgggcattgctggaccctgcccaaaggacactgtacagggacgtgatgctggagaactgcaggaacctggcctcactggggaaccaagttgataaacctaggctgatctcccagctggagcaagaagataaagtgatgacagaagagagaggaattctctcaggtacctgtccagatgtggagaatccatttaaagccaaagggttaactcctaagctgcatgtttttcgaaaagaacaatctagaaatatgaaaatggagaggaatcatcttggagcaacactcaacgaatgtaatcagtgttttaaagtcttcagcacaaaatcttcccttacacggcacaggaagtattccatactgggagaaagaccctatggctgcagtgaatgtgggaaatcctacagcagtagatcttaccttgctgttcataagagaatccacaatggggtgaaaccctatgagtgcaataactgtgggaaaaccttcagcagcagatcttaccttactgttcataagagaatccacaatggggagaaaccctacgattgcagttactgtgggaaaaccttcagcaattcctgatacctcagaccgcacttgagaattcacactggagaaaaaccgtacaaatgtaaccagtgttttcgtgagttccgcaatcagtcaatcttcacaaggcacaagagagttcatacgggggagggtcattatgtatgtaatcagtgtggaaaggctttcggcacgaggtcatctctttcttcgcactatagcattcatacaggggagtacccttacgaatgccacgattgtgggagaaccttcaggaggaggtcgaatctgacacagcacataagaactcatactggagaaaaaccctacacatgtaatgagtgtgggaaatcctttaccaatagcttttgtcttacaattcacaggagaatacataatggagagaaatcctatgagtgcagtgattgtggaaaatcctttaatgttctctcatccgttaagaaacacatgagaactcacactggaaaaaaaccctatgaatgtaattattgcgggaaatccttcacaattggtcagggagatggatttgagattgttctcccacctcctcagctgcagcagctgattaaagccttcttccttggcaatactcattgtctcagcgataggctttctgtgcagtgcatccactacagcatccgctacctccacctcaatatccactacctccactacagcatccactacctccactacagcatctgctacctccactacagcatcatggatccaccacagcaatcaccacatccactacagcatccactacagaatccactacagtga

SEQ ID NO: 134303 - DNA, 408 bp, Homo sapiens
  misc_feature (1)...(408): n = a,t,c or g
tttcgtgctggtggtggctgtgacagtgctggcggtcttgttccgctccagtctggccgagttcatttccgagcgggtggaggtggtgtccccactgagctcttggaagagagtggttgaaggcctttcactgttggacttgggagtatctccgtattctggagcagtatttcatgaaataactgatgcactcactgctattgccctgtattttgcaatccaggacttcaataaagttgtgtttaaaaagcagaaactcctcctagaactggaccagtatgccccagatgtggccgaactcatccggacccctatggaaatgcgttacatccctttgaaagtggccctgttctatctcttaaatccttacacgattttgtcttgtgttgccaagtctacctgtgccan

SEQ ID NO: 134304 - DNA, 280 bp, Homo sapiens
cggcagtacatacctgtgaaaatgaagagcaaagccttctggatcttttcttgggagtatgccatgatgtatgtgggaagcctagtggtaatcatttgcctctccttcttccttctcagctcttgggatttcatccccgcagtctatggctttatggagcaccccatcttcttcatgtttatccagatcgctgtcatcgccatctttaagtcctacccgacagtgggggacgtggcgctctacatggccttcttccccgtgtggaaccatctctacagat

SEQ ID NO: 134305 - DNA, 469 bp, Homo sapiens; identical to SEQ ID NO: 126037

SEQ ID NO: 134306 - DNA, 1818 bp, Homo sapiens
tttcgtatggcggctcccttggtcctggtgctggtggtggctgtgacagtgcgggcggccttgttccgctccagtctggccgagttcatttccgagcgggtggaggtggtgtccccactgagctcttggaagagagtggttgaaggcctttcactgttggacttgggagtatctccgtattctggagcagtatttcatgaaactccattaataatatacctctttcatttcctaattgactatgctgaattggtgtttatgataactgatgcactcactgctattgccctgtattttgcaatccaggacttcaataaagttgtgtttaaaaagcagaaactcctcctagaactggaccagtatgccccagatgtggccgaactcatccggacccctatggaaatgcgttacatccctttgaaagcggccctgttctatctcttaaatccttacacgattttgtcttgtgttgccaagtctacctgtgccatcaacaacaccctcattgctttcttcattttgactacgataaaaggtaaggccctgaaaggagagtacaaaggcagtgctttcctcagtgctatttttcttgccttagcgacataccagtctctgtacccactcaccttgtttgtcccaggactcctctatctcctccagcggcagtacatacctgtgaaaatgaagagcaaagccttctggatcttttcttgggagtatgccatgatgtatgtgggaagcctagtggtaatcatttgcctctccttcttccttctcagctcttgggatttcatccccgcagtctatggctttatactttctgttccagatctcactccaaacattggtcattttctggtacttctttgcagagatgtttgagcacttcagcctcttctttgtatgtgtgtttcagatcaacgtcttcttctacaccatccccttagccataaagctaaaggagcaccccatcttcttcatgtttatccagatcgctgtcatcgccatctttaagtcctacccgacagtgggggacgtggcgctctacatggccttcttccccgtgtggaaccatctctacagattcctgagaaacatctttgtcctcacctgcatcatcatcgtctgttccctgctcttccctgtcctgtggcacctctggatttatgcaggaagtgccaactctaatttcttttaaggcatcacactgaccttcaacgttgggcagctgccccatgagctcttcatcatggtcccagagggaggcggccctggagccctcatggctgccatagagaggaatgtggaccgagccgtccctgggggcagcgctgagagggaccccatcgagaggtccacattacatatcctgctcatctctgattacttctatgccttcctgcggcgggagtactacctcacacatggcctctacttgaccccccaagggattgcaccagaggccatgctcgtgcttcaaagtaggcctggctggcacagggcttcatggaccctcagggggcttgtggggccagaagctgggccaaagctctccagcccagagttgccagcaggcgagtgcttgggcagaagaggttcgagtccaagggtcacaagttctctggtaccaaaaagggacccatggctgactgacagcaaggcctatggggaagaactgggagctccccaacttggacccccaccttgtggctctgcacaccaaggagccccctcccagacaggaaggagaagaggcaggtgagcagggcttgttagattgtggctacttaataaatgttttttgttatgaagtctaaa

SEQ ID NO: 134307 - DNA, 554 bp, Homo sapiens; identical to SEQ ID NO: 119959
  misc_feature (1)...(554): n = a,t,c or g

SEQ ID NO: 134308 - DNA, 432 bp, Homo sapiens
  misc_feature (1)...(432): n = a,t,c or g
tttcgttgcggagcgagttacgagaattcccggccgctgcaagggagctctgcgtgcctcttgctgtgccctacctggacaaacccccaactccgctccacttctaccgggactgggtctgccccaacaggccgtgcattatccgcaacgctctgcagcactggccggccctccagaagtggtccctcccctatttcagaggtgagtgtggccgcgaccccagatggttacgcggatgccgagagaggggatcgcttcatgatgccagctgagcgccgcctgcccctgagcttcgtgctggatgtgctggagggccgggcccagcaccctggagtcctctatgtgcagaagcagtgctccaacctgcccagcgagctgccccagctgcttgctgatctggaatcccatgtgccctgggcctncgaagccctg

SEQ ID NO: 134309 - DNA, 470 bp, Homo sapiens
  misc_feature (1)...(470): n = a,t,c or g
nttcgagaatcgatgaacactagcccagngcggnggaattccgcttccactgcccagcctgctgggagcaggagctgagtattcgcctgcacgtatgcccccgaggagcaactaaaggcgccactgagtgccctgccctctggtcaagtggcgaggcttgtcttccccacgtgccaggagcccctgatgagagtggagctgacaaaagaagnnnnnnnnnnnnnnnnnnnnnnnnnnnnnnnnnnnnnnnnnnnnnnnnnnnnnnnnnnnnnnnnnnnnnnnnnnnnnnnnnnnnnnnnnnnnnnnnnnnnnnnntgagggagctgaccgggcgactggtcttcaggccctgtgcaaaggagcaggccttcctgagcatgacgaagcaggtggcggccgcggacttgaagcaagccctgcagctggacggagacctgcaagaggatgagatcccactggtagctattatg

SEQ ID NO: 134310 - DNA, 570 bp, Homo sapiens
  misc_feature (1)...(570): n = a,t,c or g
ggaatcccatgtgccctgggcctccgaagccctgggaaagatgcccgatgctgtgaacttctggctgggggaggcggctgcagtgacttctttgcacaaggaccactatgagaacctctactgcgtggtctcaggagagaagcatttcctgttccatccgcccagcgaccggcccttcatcccctatgagctgtacacgccggcaacctaccagctaactgaagagggcacctttaaggtggtggatgaagaggccatggagaaggtgccctggatcccactggaccccttggcgccagacctagcacggtaccctagttacagtcaggcccaggcccttcgctgcacggtgcgggccggtgagatgctctatctgccggctctgtggttccaccacgtccagcaagtcccagggctgcatcgagggtgaagagttgcccaggccacctggggaagaaggccctnccaaagtgaatttcttggtatgacatggaatacgacctcaagtatagttacttccaagctgctcgactcccttcaccaaggctttcaggccttttgactgatgga

SEQ ID NO: 134311 - DNA, 567 bp, Homo sapiens
acaaggagcaggtcccccttctgaagatagaagaaccaccctcaacagccggcagaatagctgagtttttcaccgatcttctgacgtggcgtccactggcccaggccacacataatttcctgcgtggcctccatttccacaaagactactttcagcatcctcacttctccacatggaaagctaccactctggatgggctccccaaccagctgacaccctcggagccccacctgtgcctgctggatgttggctacctcatcaataccagctgcctgcccctcctgcagcccactcgggacgtggacctcatcctgtcattggactacaacctccacggagccttccaggttgagaagggtgggcagcccaccagggaggcgcagttgcagctcctgggccggttctgccaggagcaggggatcccgttcccacccatctcgcccagccccgaagagcagctccagcctcgggagtgccacaccttctccgaccccacctgccccggagcccctgcggtgctgcactttcctctggtcagcgactccttccgggagtactcggcccctg

SEQ ID NO: 134312 - DNA, 1317 bp, Homo sapiens
atggaggagcttgaccagacggcccaaaccctcactggccccgaagtccctgagcagcagcgtgtggtgcaggagaggctccgggagcagctgcgggcactgcaggagttggcggccacacggctgtgctcagctcatgctaccggcctggatcccacacctgccaagggcgagtggggcagcgaggggtgtctctgcgtgcctcttgctgtgccctacctggacaaacccccaactccgctccacttctaccgggactgggtctgccccaacaggccgtgcattatccgcaacgctctgcagcactggccggccctccagaagtggtccctcccctatttcagagccacagtgggctccacagaggtgagtgtggccgtgaccccagatggttacgcggatgccgtgagaggggatcgcttcatgatgccagctgagcgccgcctgcccctgagcttcgtgctggatgtgctggagggccgggcccagcaccctggagtcctctatgtgcagaagcagtgctccaacctgcccagcgagctgccccagctgctgcctgatctggaatcccatgtgccctgggcctccgaagccctgggtgagtggagctattttgaccctgggggtcttgccatgattggggcctggagccacatccatggctctgctccggacgcccctgggttaagagcagcagcctctcaagccactctgtggcaggagctccaggtggaggtaaaagctcaccaggggcaggtgcaacgggtgctgagttctgggcggagcctggcagcctcagggcacccccaagcccaacacatcgtggagcagtgccaggagctggaaggccactgggcagagctggagagggcatgtgaagcgcgggcccagtgtctgcagcaggctgtcactttccagcagttgcagctcttgggccggttctgcaaggagcaggggatcccgttcccacccatctcgcccagccccaaagagcagctccagcctcgggagtgccacaccttctccgaccccacctgccccggagcccctgcggtgctgcactttcctttggtcagcgactccttccgggagtactcggcccctggggtccggcggacacccgaggaggcggcagctggggaggtgaacctgtcttcatcggactctccctaccactacacgaaggtgacctacagccaggaggacgtggacaagctgctgcacctgacacattacaatgtctgcaacaaccaggagcagctgctggaggctctgcgccaggcagtgcagcggaggcggcagcgcaggccccactga

SEQ ID NO: 134313 - DNA, 3684 bp, Homo sapiens
  misc_feature (1)...(3684): n = a,t,c or g
atggactctcagtacgagacgggccacattcgcaagctacaggcccggcacatgcagatgcaggagaagactttcaccaagtggatcaataacgtcttccagtgcggccaggaaaggtggaagcaaggcttcttcccatgtggtaagaacaattggaacaagctgggcttccctccttacataaccattattgggcaagtccgcatatacaactgtgaagcagccaagagcatctacttccgcattgcgcaaaagtttggagatggagtgcagttcacacggacacaccacgtggtgcggaagacgaccctctatgacatggatgtggagcccagctggaagtacacggctatcggctgccaggaccgaaatattcggatatttaacatcagcagtggaaagcagaagaagctgtttaaagggtcacagggtgaggacggcacactcattaaggtgcagacagacccctcagggatctacattccatggatttcctccatgttgggcctgcaattcagcaatttgtcttccaaagccctacctttcaccaagataccatattgtcagcttttcccccgtcctagctcgagctcctgggacagctgccgcgggaacttgcagggcagctctctgagcctgttcctggatgagaggatggcagcggagaaagtagcttccatagacctccttgacctcacgggagcccgggtgcacgaactcaagtccctgagtgagatgctgaaggtggaggcccatgactctgagattctgtgcctggagtattctaagccagacacaggtctgaaactgctagcatcggcgagccgggaccggctgatccatgtgctggatgccgggcgggagtacagcctacagcagacgctggacgaacactcatcctccatcactgctgttaagtttgcaganacttttatcatggctgagaagatgtcagacaactcattagatgcaggtgtgatgggatcacatgagaaggtagcccagctccgcagggcccggttggaggaggccatggccctgttcggtttctgcagttcctgtggggagctccagttgtggctggagaagcagacagtgatgctccaaagggtgcagccccaggctgacaccctggaggtcatgcagctcaaatatgaggctgagtttatcagggagggacagaggctgctgcaggggggccacccagcctcggaggccatccaggagcgactggaggagctgggagcactctggggtgagctgcaagacaactcccagaagaaggtggccaagctccagaaggcctgtgaggccctgcgtctgcggcggagcatggaggaactggagaactggctggagcccatcgaggttgagctgagagcccccactgtgggccaggccctgcctggggtgggcgagctcctgggcacacagagggagctggaggcagcagtggacaagaaggccaggcaggctgaggcactgctgggccaggcccaggcctttgtgagggaaggccactgccttgcccaagatgtggaagagcaggcccggcggctgcttcagagtctgaggagctgcatgaagcagccaaacctgatgagcttttacagggaaaaagaactgcagagctggggtctcatgggccatgcagtgaccccctctgactgctacgtgactctctggctgcccacggcctgcagccacaggctccagacacgcacggtcaagaacagcagtagccctgtctggaaccagagctttcacttcaggatccacaggcagctcaagaatgtcatggaactgaaagtctttgaccaggacctggtgaccggagatgaccctgtgttgtcagtactgtttgatgcggggactctgcgggctggggagttccggcgcgagagcttctcactgagccctcaggcaaggcggtgtttccacggcagccctagctggaaagatgcccgatgctgtgaacttctggctggggaaggcggctgcagtgacttcttgaaaaccatcactgcccttgctttctcccctgatggcaaggacttggtcactgganaggaggagtttggggccagcgcagccctgctgtccaccaaggaagccctgctggtctggtgccagcggaagacagccagctacaccaacgtgaacattacagatttctcccgaagctggagcgatgggctgggcttcaatgccctcatccatgcccacaggcttgaaggagggaaagtggacacagataatgtcatggaactgaaagtctttgaccaggacctggtgaccggagatgaccctgtgttgtcagtactgtttgatgcggggactctgcgggctggggagttccggcgcgagagcttctcactgagccctcaggcaaggcggtgtttccacggcagccctagctgtcgcctcttctctggagtggcgaatgccaggtatccagacaccattgccttgacctttgatcctactaatcagtggctgtcttgtgtgtacaacgatcatagcatttatgtttgggatgtgagggaccccaagaaagtgggcaaggtgtactcggctctgtatcattcttcctgcgtctggagtgtggagcccccccgtccgaacaaaaaattggggtgcctcaaaaaattttcaagtcggcccaaagcaagtgccattttggaagaattcaagaaatttgccaaaaccgccaacgtgaagacccctcttttggattccaaagcccgccaaccgccaatgggatggccccaatgccggaggccgcagccaccgctcctcatcatgcagcagcgcctcgttgatgagggcccacaggttggtgaaacagcttgggtagccccagcgggcacgctcggccagctcctgccgcggttgaggtcaaccacgatgaccacgatccggtggatatcctcatcaccatggcggcggttcgatgccattactcaccagaaagtgggcatcatgcagatcgtcaacctgtttgaagatgaagagaattttgaccgtttacgcgcctgccgtaccgagcaaggaatcgcgctggacaaccagactatggatagcgcctacgaaaccactcgcctgattgccgaagaagtcgacattatcgaagtgggcaccattctgtgcgtgggcgaaggcgtgcgtgcggttcgtgacctgaaagcgctctacccgcacaaaatcgtactggcagacgccaaaattgccgatgcaggcaaaatcctttcgcgtatgtgcttcgaagccaacgctgactgggtgacggtaatttgctgtgcggatatcaacaccgccaaaggcgcgctggacgtggcaaaagagtttaacggcgacgtgcagatcgaactgaccggttactggacctgggaacaggcgcaacagtggcgcgatgcaggcattgggcaggtggtttatcaccgcagccgtgacgcgcaggccgcaggcgtggcgtggggcgaagcggacatcaccgcgatcaaacgtctttccgatatgggcttcaaagtcaccgtcaccggaggcctggcgctggaagatctgccgctgttcaagggtattccgattcacgtctttatcgcgggccgtagtatccgtgatgccgcttctccggtggaagccgcacgtcagttcaaacgttccatcgctgaactgtggggctaa

SEQ ID NO: 134314 - DNA, 4499 bp, Homo sapiens
ggtgcacgaacttcagtccctgagtgagatgctgaagccagaagttttatctcctactgtgaagggcaaactgctcactggaattaaatctccacggtcatatactcccaaacccaatcctgtgacacacgtcatctccacagggattcaaaagatctggataggagccacagtgggctccacagaggtgagtgtggccgtgaccccagatggttacgcggatgccgtgagaggggatcgcttcatgatgccagctgagcgccgcctgcccctgagcttcgtgctggatgtgctggagggccgggcccagcaccctggagtcctctatgtgcagaagcagtgctccaacctgcccagcgagctgccccagctgctgcctgatctggaatcccatgtgccctgggcctccgaagccctggtgcacaagcaccactatgagaacctttactgcgtggtctcaggagagaagcatttcctgttccatccgcccagcgaccggcccttcatcccctatgagctgtacacgccggcaacctaccagctaactgaagagggcacctttaaggtggtggatgaagaggccatggagaaggtgtctgtcctgttcttgggctctagggagggagaagggcagaagcctggctctgaagaacaggcacaaaagatctggggagtggaggcagccgtccagaggctgggcatgctggaggctggcatcttgccccaggaggggcgcttccaggccctggctgagatcgcagacatcctccggcaggagcagtaccacagctgggcagatgtggcccgcagagggcctccactgaaaggatgtcagcgagctgccagctctcccgggcttcagctcctgtggctgcagcaggagctcctgttccatcttggggagtgggcaaggtgggggcagctggaggccctgaagagggagaaggccgtgcagctggcacacagtgtggaagtgtgcagttttctgcaggagtgtggacccacacaggtccagctgcgagacgtgctcctccagctggaggccctgcagccagggagctcagaggacacctgccacgccctgcagctggcccagaagaagaccctggtgctggagaggagggtccacttcctccaaagtgtggtcgtaaagtacggccagcgcagtggtggcattgggaggcagtcagagtggcctttccttcatgcctgccaaagcacaaagatcagtggcctcacccaagtctcacagacccaagagtctagtctggggatcccaggctctagcttatacatggtgaccttggagaaggtgctgggaattacagtgtctggaggcagaggacttgcctgtgacccccgatcaggtttagttgcttacccagcaggggctgaccgtggcgagtggctcgtcagcaatggcgttctggtggtggctggctgcaagatgccctcagcagagcaaagtcggattgcccagctcctcagagacaccttctcttcagtgcgacaggagctggaagctgtggctggggcagtgctgtccagcccaggcagcagccctggggctgtgggagccgagcagacacaggccctgctggagcaatactcagaactgttgcgggaaaatgacgacttatttatgatgccacgaattgttaatgtgacatcattggccacagagggaggtttggtagatatgggtggcagcaaatatcctcatgaagttcctgatagcaagccatctgaccatctgaaagacaccgtcaggggggaagataattccttagaggataagggtagaatctcttccagaggaaacagagatggcagagtgacgttgggtccaacgcaggtttttctggcaaacaaagattctggttatccacaaatagttgacgtttccaatatgcagaaagcacaagagttcttacctaaaaagatttctggtgatatgagagggattcagtataaatggaaagagagtgaatcaagaggggagagagtgaagtcaaaggattcttcatttcataaattaaagatgaaagatctcaaggactcaagcatagagatggaactgaggaaagtaacatcagctatagaggaagcagctcttgattccagtgaactgctgactaacatggaagatgaggatgatactgatgagacactgacttcactgctcaatgaaattgcctttcttaatcaacaactaaatgatgactctgttggcctggctgaactacccagctctatggatacagagttcccaggggatgctcggcgggcttttattagtaaggttcctcctggaagcagagcaactttccaggttgagcacttgggaactggtttgaaagagttgcctgatgttcaaggggagagtgactctatcagtcccctcctcttgcacttggaagacgatgacttttctgagaatgaaaaacaacttgcagaaccagcctctgagccagatgtccttaaaaatgttattgactctgaaataaaggatttcctcctttccaacaagaaaagctatggatggaggaaagaatacttctggcctccctgcagagcccgaattggattttcagtgcgggatgcatggccaacctctacccagcaaggccctcttaccccggccgagtttcctcggaactcgcggagccgccgtcggagctgcaggcagtgctccaggtcctggcccaggtcaccaacattcatcttcacctcctgtgaaagccgaagccacaactggagctccccacaggaactgcagaaaccgaacagggccatggcctcctccaaccgggccctgcggagctggggagaggtggcccaaggctggggacgtcttggggtgcagggctctcagcatgatggtttgcctcctcccgtgcccctgccctccataccctgcccccgggccttctttctgttggcagtgcacaaggaccactatgagaacctctactgcgtggtctcaggagagaagcatttcctgttccatccgcccagcgaccggcccttcatcccctatgagctgtacacgccggcaacctaccagctaactgaagagggcacctttaaggtggtggatgaagaggccatggagaaggcagaggtgtccaggacctgcctgctcacggttcgtgtcctgcaggcccatcgcctaccctctaaggacctagtgaccccctctgactgctacgtgactctctggctgcccacggcctgcagccacaggctccagacacgcacggtcaagaacagcagtagccctgtctggaaccagagctttcacttcaggatccacaggcagctcaaggtccaggcctgctgctaccacaaagagcccaggattcccataggatccacctcctaccactctccatcccccagatgggatgagctatgcatggggcagcacagacacagggagcaggacacacaaggatacctgagctggctcccaaagcaacaggcacaggaggaacaagagcgtgggggctgggggcagtgtaaggatgatcagataagaaaagcagggagacaaggagggagggtgaggggcgcctggaagttgaatttcgcctgcagagtctcctcagagcacagagttcagcttgtggttcctgggtcctgtgagggtccgcaggaggcctctgtgggcactggcaccttccgcttccactgcccagcctgctgggagcaggagctgagtattcgcctgcaggatgcccccgaggagcaactaaaggcgccactgagtgccctgccctctggtcaagtggtgaggcttgtcttccccacgtcccaggagcccctgatgagagtggagctgaaaaaagaagcaggactgagggagctggccgtgcgactgggcttcgggccctgtgcagaggagcaggccttcctgagcaggaggaagcaggtggtggccgcggccttgaggcaggccctgcagctggatggagacctgcaggaggatgagatcccagtggtagctattatggccactggtggtgggatccgggcaatgacttccctgtatgggcagctggctggcctgaaggagctgggcctcttggattgcgtctcctacatcaccggggcctcgggctccacctggggccttggcaaacctttatgaggacccagagtggtctcagaaggacctggcagggcccactgagttgctgaagacccaggtgaccaagaacaagctgggtgtgctggcccccagccagctggcagcggtaccggcaggagctggccgagcgtgcccgcttgggctacccaagctgcttcaccaacctgtgggcccttattcaacgagggcgttgttgcattgatggagccccatgatcacaagctctcagatcaacggggaggccctgagtcatggccagaaccctctgcccatctactgtgccctcaacaccaaagggcagagcctgaccacttttgaatttgggggtgagtggcccaagagctga

SEQ ID NO: 134315 - DNA, 3419 bp, Homo sapiens
ctgataccccagcttggcacggggacgcgaacaggacgaaagcggctttggaagccgcgcggagcgattatttagaattcccgcccgctgcaagggagctctgcgtgcctcttgctgtgccctacctggacaaacccccaactccgctccacttctaccgggactgggtctgccccaacaggccgtgcattatccgcaacgctctgcagcactggccggccctccagaagtggtccctcccctatttcagagccacagtgggctccacaaaggtgagtgtgggccgtgaccccagatggttacgcggatgccgttgagagggggattcgtttcattgattgccagttgagcgccgcctgcccctgagcttcgtgctggatgtgctggagggccgggcccagcaccctggagtcctctatgtgcagaagcagtgctccaacctgcccagcgagctgccccagctgctgcctgatctggaatcccatgtgccctgggcctccgaagccctgggaaagatgcccgatgctgtgaacttctggctgggggaggcggtttgagtgacttttttgcacaaggaccactatgagaacctttactgcgtgggctcaggagagaagcatttcctgttccatccgcccagcgaccggcccttcatcccctatgagctgtacacgccggcaacctaccagctaactgaagagggcacctttaaggtggtggatgaagaggccatggagaaggcagaggtgtccaggacctgcctgctcacggttcgtgtcctgcaggcccatcgcctaccctctaaggacctagtgaccccctctgactgctacgtgactctctggctgcccacggcctgcagccacaggctccagacacgcacggtcaagaacagcagtagccctgtctggaaccagagctttcacttcaggatccacaggcagctcaagaatgtcatggaactgaaagtctttgaccaggacctggtgaccggagatgaccctgtgttgtcagtactgtttgatgcggggactctgcgggctggggagttccggcgcgagagcttctcactgagccctcagggtgaggggcgcctggtaagttgaatttcgcctgcagagtctggctgaccgtggcgagtggctcgtcagcaatggcgttctggtggcccgggagctctcctgcttgcacgttcaactggaggagacaggagaccagaagtcctcagagcacagagttcagcttgtggttcctgggtcctgtgagggtccgcaggaggcctctgtgggcactggcaccttccgcttccactgcccagcctgctgggagcaggagctgagtattcgcctgcaggatgcccccgaggagcaactaaaggcgccactgagtgccctgccctctggtcaagtggtgaggcttgtcttccccacgtcccaggagcccctgatgagagtggagctgaaaaaagaagcaggactgagggagctggccgtgcgactgggcttcgggccctgtgcagaggagcaggccttcctgagcaggaggaagcaggtggtggccgcggccttgaggcaggccctgcagctggatggagacctgcaggaggatgagatcccagtggtagctattatggccactggtggtgggatccgggcaatgacttccctgtatgggcagctggctggcctgaaggagctgggcctcttggattgcgtctcctacatcaccggggcctcgggctccacctgggccttggccaacctttatgaggacccagagtggtctcagaaggacctggcagggcccactgagttgctgaagacccaggtgaccaagaacaagctgggtgtgctggcccccagccagctgcagcggtaccggcaggagctggccgagcgtgcccgcttgggctacccaagctgcttcaccaacctgtgggccctcatcaacgaggcgctgctgcatgatgagccccatgatcacaagctctcagatcaacgggaggccctgagtcatggccagaaccctctgcccatctactgtgccctcaacaccaaagggcagagcctgaccacttttgaatttggggagtggtgcgagttctctccctacgaggtcggcttccccaagtacggggccttcaatcccctctgagctctttggctccgagttctttatggggcagctgaagaagaggcttcctgagtcccgcatctgcttctttagaaggtatctggagcaacctgtatgcagccaacctccagggacagcttatactgggcctcagagcccagccaattctggggaccgctggggtcaaggaaccaggccaacctgggacaaggagcaggtcccccttctgaagatagaagaaccaccctcaacagccggcagaatagctgagtttttcaccgatcttctggacgtggcgtccactggcccaggccacacaaaattttcctgcgtgggcgttccattttccacaaagactactttcagcatcctcacttctccacatggaaagctaccactctggatgggctccccaaccagctgacaccctcggagccccacctgtgcctgctggatggtggctaactttaataaataccagctgcctgcccctcctgcagcccactcgggacgtggacctcatcctgtcattggactacaacctccacggagccttccagcagttgcagctcctggggccggttctgccagggagcaggggatcccgttcccacccatcttcgcccagccccgaagaggcagctccagccttggggagttgccacaccttctccgaccccacctgccccggagcccctgcggtgctgcactttcctctggtcagcgactccttccgggagtactcggcccctggggtccggcggacaccccgaggaggcggcagctggcggaggtgaacctgtcttcatcggactcttccctaccactaacacgaaggtgacctacagccaggaggacgtggacaagctgctgcacctgacacattacaatgtctgcaacaaccaggagcagctgctgggaaggctctgcgccccaggcagtgcaaacggaaggcggcagcgcaaggcccccactgaatggccggggcccctgcccaccccctaactctcattcattcccctggctgctgagttgcaggtgggaacttgtcattcacgcagtgcttccagagcctcgggctcaggtggaactgtcccagggtcccaggctgagggctgggagctcccttgcgcctcagcagtttgcagtggggtaaggaggccaagcccatttgtgtaatcacccaaaaccccgccggcctgtgcctgttttcccttctgcgctaccttgagtagttggagcacttgatacatcacagactcatacaaatgtgaaaaaaaaaaaaa

SEQ ID NO: 134316 - DNA, 1239 bp, Homo sapiens
atggcgccgtcctccaggagcggagctgggaacacgtccacgcccggggggtgtgcacgcgcccgggctcccccagggaacgctggcgtgcactcgggcacccagaccggggctgtccgagatacggccttcatatccccttcctcccctggactctttctgagctcagagccgccgcagccgggacagagggcaggctttctccaaccatcatgctgcggagcatattacctgtacccctggctccgggagcggcagtcgagtatcctctggtcaggcggcgcggcggcgcctcagcggaagagcgggcctctgggccgcagtgaccaaccccccccctcaccccacgtggttggaggtttccagaagcgctgccgccaccgctcgcgcagctctttgccgtcggagcgcttgtttgctgcctcgtactcctcatttatccgccatgataagtgccagccgagctgcagcagcccgtctcggggcgccgcagcctcccggggcctacgggccgcccgccaccagatcagaagcaatcaagggacagttgttggtattgatttgggtactaccaactcctgcgtggcagttatgaagaaaaatgttccctttaaaattgtccgtgcctccaatggtgatgcctgggtgaggctcatgggaaattgtattctccgagtcagattggagcatttgtgtgatgaagatgaaagagactgcagactaatagttgccttgcctgagggtatggaggaaccggaatttgactaccagaatgacatggggaacagccaggacctggagaggcggagggggtgtgctgcggagccctgggaggagggggttgggcagtcgctggcgctgccgctggtgtccctgtgcttgaagtgccggtggtatcggagtccatgcacccaaggccagcacccagcaacattctctggcccagcagagggggtcatctctgagagaagtatgctggaacattggcatgaggaaatcaatcaatgcaaagcatataatgaggatgtattcagcaccatgaggaccaacccagcgagaataagctcagaagcaatggcaccagcagatatcattgatcattcctcccaaagaccagatttcacgagtggcaaaatgttagcggatgagtttggaactgcatctaacattaagtcacgagtaaacgcctttcagtcctgggagccattacatctgtacaacaaagactcaaacttataa

SEQ ID NO: 134317 - DNA, 728 bp, Homo sapiens
tttcgtccgagctgcagcagcccgtctcgtgggcgccgcagcctcccggggccctacggccgcccgccaccaggtgaggaactgggaccttcccgaatggggtcacggcctcgggccttgggcctcgggcttcgctgcggcgggccgcgcgccctttagggtttgaattctccagtataggtcaggcgggaaggaaggtaacgggccttccatagttagcgctgccgggtcaagattttgcccaaggttttgcctccggcttgggccctgctgagtcacacccctcgcgatctagagtgtcatttcaaaattaccaggatagctggaatggccttagtcatgaggcttttagacttgtttcaaggcgggattatgcatcagaagcaatcaagggagcagttgttggtattgatttgggtactaccaactcctgcgtggcagttatggaaggtaaacaagcaaaggtgctggagaatgccgaaggtgccagaaccaccccttcagttgtggcctttacagcagatggtgagcgacttgttggaatgccggccaagcgacaggctgtcaccaacccaaacaatacattttatgctaccaagcgtctcattggccggcgatatgatgatcctgaagtacagaaagacattaaaaatgttccctttaaaattgtccgtgcctccaatggtgatgcctgggttgaggctcatgggaaattgtattctccgagt

SEQ ID NO: 134318 - DNA, 3721 bp, Homo sapiens
  misc_feature (1)...(3721): n = a,t,c or g
atggcgccgtcctccaggagcggagctgggaacacgtccacgcccggggggtgtgcacgcgcccgggctcccccagggaacgctggcgtgcactcgggcacccagaccggggctgtccgagatacggccttcatatccccttcctcccctggactctttctgagctcagagccgccgcagccgggacagagggcaggctttctccaaccatcatgctgcggagcatattacctgtacccctggctccgggagcggcagtcgagtatcctctggtcaggcggcgcggcggcgcctcagcggaagagcgggcctctgggccgcagtgaccaaccccccccctcaccccacgtggttggaggtttccagaagcgctgccgccaccgcatcgcgcagctctttgccgtcggagcgcttgtttgctgcctcgtactcctccatttatccgccatgataagtgccagccgagctgcagcagcccgtctcgtgggcgccgcagcctcccggggccctacgggccgcccgccaccaggatagctgggaatggccttagtcatgaggcttttagacttgtttcaaggcgggattatgtcatcagtaagcaatcaagggagcagttgttggtattgtatttgggtactaccaactcctgcgtggcagttatggaaggcaatcaagccaagggtgttggagaatgccgaaggtgccaaaaccaccccttcagttgtggcctttacagcagatggtgagcgacttggtggaatgccggccaagcgacaggctgtcaccaacccaaacaatacattttatgctaccaagcgtctcattggccggcgatatgatgatcctgaagtacagaaagacattaaaaatgttccctttaaaattgtccgtgcctccaatggtgatgcctgggttgaggctcatgggaaattgtattctccgagtcagattggagcatttgtgttgatgaagatgaaagagactgcagaaaattacttggggcacacagcaaaaaatgctgtgatcacagtcccagcttatttcaatgactcgcagagacaggccactaaagatgctggccagatatctggactgaatgtgcttcgggtgattaatgagcccacagctgctgctcttgcctatggtctagacaaatcagaagacaaagtcattgctgtatatgatttaggtggtggaacttttgatatttctatcctggaaattcagaaaggagtatttgaggtgaaatccacaaatggggataccttcttaggtggggaagactttgaccaggccttgctacggcacattgtgaaggagttcaagagagagacaggggttgatttgactaaagacaacatggcacttcagagggtacgggaagctgctgaaaaggctaaatgtgaactctcctcatctgtgcagactgacatcaatttgccctatcttacaatggattcttctggacccaagcatttgaatatgaagttgacccgtgctcaatttgaagggattgtcactgatctaatcagaaggactatcgctccatgccaaaaagctatgcaagatgcagaagtcagcaagagtgacataggagaagtgattcttgtgggtggcatgactaggatgcccaaggttcagcagactgtacaggatctttttggcagagccccaagtaaagctgtcaatcctgatgaggctgtggccattggagctgccattcagggaggtgtgttggccggcgatgtcacggatgtgctgctccttgatgtcactcccctgtctctgggtattgaaactccacggagccgtcttttccaaacttattaataggaaaacaaatattccaaccaagaagagccaggtattctctactgccgctgatggtcaaacgcaagtggaaattaaagtgtgtcagggtgaaagagagatggctggagacaacaaactccttggacagtttactttgattggaattccaccagcccctcgtggagttcctcagattgaagttacatttgacattgatgccaatgggatagtacatgtttctgctaaagataaaggcacaggacgtgagcagcagattgtaaatccagtcttctggtggattaagcaaagatgatattgaaaatatggttaaaaatgcagagaaatatgctgaagaagaccggcgaaagaaggaacgagttgaagcagttaatatggctgaaggaatcattcacgacacagaaaccaagatgggagaattccaaggacccaattaccctgcctgatgagtgcaacaagctgaaagaagagatttccaaaatgaggggagctccctggctagaaaaagaccagcgaaaactgggaggaaaatattagaccaggccagcatcctctcttcgagcgaggcatcgactgaagcttgttcgaaatggcataccaaaaagatgggcatctgagcggagaaggctctggaagttctggcactgggggaacaaaagggaagattcaaaagggagggaaaaaccagtaattaatagcagaaattttgaagccagaaggaccaacatatgaagcttaggagtgaagagacttccctgagcagaaatgggcgaaccttcagtccttttacctgtgtttttgcagtattcctatatataatttccttaatttgtaaatttagtgaccattagctagtgatcatttaatggacagtgaatcctaacagtataaaagttcacaatattcctatgtcccctaccctgtcattttttcagctgcatgttaaaagggaggtagggatggattggttccttattaaaggttttaactatttttatgctggaagtgacccatatttttccaaggggtgaaaacccatcttcgcacaacagccaatgaaaggtagtccatcccatagaacttgaaatgagacccaccatatggggggatgagatccttctaggttagcctagtactgctgtactgggcctgtatgtacagggggtccttcaactgagggccttgcaagttcaaggctggctgtgccatgtttgtagatggggccgagggaacttagacacatgggaaaccttagctatttatattagggcacgctattaaaacgaaggtaggaatgaggctagacctttaacttccctaaggcatacttttctagctaccttctgccctgtgtctggcacctacatccttgatgattgttctcttacccattctggaatttttttttttttaaaataaatacagaaagcatcttgatctcttgtttgtgaggggtgatgccctgagatttagcttcaaggaatatgccatggctcatgcttcccatatttcccaaagaggggnaatacaggatttgctaacactggttaaaaatgcaaattcaagatttggaagggctgttataatgaaataatgagcagtatcagcatgtgcaaatcttgtttgaaggattttattttctccccttagacctttggtacatttagaatcttgaaagtttctagatctctaacatgaaagtttctagatctctaacatgaaagtttttagatctctaacatgaaaaccaaggtggctattttcaggttgctttcagctccaagtagaaataaccagaattggcttacattaaagaaactgcatctagaaataagtcctaagatactatttctatggctcaaaaataaaaggaacccagatttctttccct

SEQ ID NO: 134319 - DNA, 448 bp, Homo sapiens
ctggagagggagagacggaagcgcagccgaaaagagctgctcaacttctacgcctggcagcatcgagagagcaagatggagcatctacggcactgcgcaagaagttcgaggaggacaagcagaggatcgagctgctgcgggcccagcgcaaattccgaccgtactgagctgtgagagccgcagtgaatggctggaggtgcagggccaggaggaggcgaggcagggcctgcagcggtctctgagaggccgagctctgccaacgggccccaggttgaaggccaccgcgtccaacagccccatcagagtccacacaggccaggagggaaggaccaggccacccctcgggtcttgtgcttcagcagtcctggggaccctggatgaatccgttctgtgcttccttttccctcaatgcaaaagcccttgctggcaacgaaaaagcctcaaaagc

SEQ ID NO: 134320 - DNA, 2570 bp, Homo sapiens
  misc_feature (1)...(2570): n = a,t,c or g
gcgctcgcgccggcgccgaaccgcaactcccggcgacccccgcgctcccgggtggcaagatggtggcgcgcagtctcgctggcctcagctcagggtagcctggccatccctcccctcccatttcctttccagctattccaatcaagttctctgaaaagcaacaggcttctcactacctctatgtgagagcacacggcattcaacaaggcaccaagtggagggaggctttgggatggccctgcggatgctcacacttggcttccctctccctgcagcaggagagcctgtcctgcctccagtccacctgtggccttgtccagtctgtagagttgaagttcccagatttgccacatccttgcacttcctgcctggctttttctgtcccgtgttaaagctcacggaccgtctctgctggccacctgcagggccttccccggctcccctcctgcttccccactgagggagctccttccccaggcttgggggccgggtctccaggagcactgttgttcagagaccttgtgccagacgtgggaaggagcccccaacctctgacatctctctctcttcagggtttccaggtagcctacgtggtgttccagaagccaagtggggtgtcagcggccttggcggtggggcccaaatgccaggcctgaggaagccccgtttccctggctcccttttcctcagaatggatcagtgactacgcagactctgtgcccgaccctggctggaggctgcgggaggtcccaggcgcccaccggacgatgggatcaccttccttgcaggaagaagctaaggccaaggaggaggagggggtccctgacgaggagggctgggtgaaggtgacccgccggggccggcggcctgtgctcccccggactgaggcagccagcttgcgggtgctggagagggagagacggaagcgcagccgaaaaagagctgctcaaacttctacgcttggcagcattcgagagagcaaagatggagcattcttaaggcaagtgcgcaagaagtttcgaggaggacaagcagaggattcgagcttgctgcgggcccaagcgcaaaattccggaccgtaactgagctgtgagagccgcagtgaatggctggaggtgcagggcccaggaggaacatgaggtgaagcagggcctgcagcggtctctgagaggccgagctctggccaacgggccccaggtttgaaggccaccgcgtccaacagccccatcagagtccacacaggccaggagggaaggaccaggccacccctcgggtcttgtgcttcagcagtcctggggacccaggcgtgccggagaggaggacttgtccttcctgcttcttgcctccacacccctcctctccaggaccctggatgaatccgttttgtgcttccttttccctcaatgcaaaagcccttgctggcaacgaaaaagcctcaaaagcagtgagaatacaagaaccttttattttccatccagttgggcagcagggaaaggctaggtgggcccagcccgcccttccttcctccagctggctggatatttattattagccaggagaaagcagccctggaacccagactctgtctcccccttgaggtcacagatgttgaagttggaatctcgctccttcccctgactaccatcctaggctgggcctcaagactagtgaggccttgtccccaccatccctgggccttgttgtgggggctcaggaactcaagagtcccagtgttgagtctggggagcactagggtctttcatagttccagggggccagagctacagctggggctgggggagcatggtgttgtngcgctgtaaagaaggagctgatgatactgggccacggtgcttggggttcgctcatgtggacacagtggattgcctgggacttccacaaacttggaaccgctctttgagggtggatttcattgtgtctatcatgaacgacagggactccttgtcagagtaattctctcttggatcaaaatatccgtggactgctttgatcaacaggacatgggcctgcagcttcctgatggaatgcgcacacagctccctgctgacgaagtcaatgctgttctctgccagctccccgtccacaccgggcacccacctctgcagcagctgcttcaggctgaacacgtgcgagggctcctgggaggcctctacctgcagcacgtgctctatggctctccgcttgtaggtcagcaagttctccatttccattccgcccacgacgccacctgccacaactcttcggatctcactcacaaaagtctggaggtaatatgggacacctgggctgtaatgggacgagagcccatgacctccgaaatccatggcaacgtaataaaagtcttgcgggagaagagggatgagtctgtcgaaggagctggcattgtccagccagccgtgcaggcagagaactggagggccctgcagggagccccaggctttggctgcgatgtggccccagggcacagccagcttcagctctgagatcagaccccaggcaagccccgcaactccagcagtccccgcaactccagccgtccccgcccccat

SEQ ID NO: 134321 - DNA, 418 bp, Homo sapiens; identical to SEQ ID NO: 130029

SEQ ID NO: 134322 - DNA, 453 bp, Homo sapiens
aattcgagaacactgtcgagagccgtggaattcctaggatacaaacccaggccacctggctccagggtctgtgctcttagctctcccttccctgctcctgcccctgacccaccccctccctgacagtcggaccctttcctggggatgattatgggcctcggaggaggcatggactttgactccaagaaggcctacaggtgaggccccgccgggggttggggcagcctggaatggacagggtgaggtgggagcgggggcacgaaggcagatgagaggagcaggcaggggcgagcccgcctgggaactctgatctcctgctgcaccgcagggacgtggcctggctgggtgaatgcgaccagggctgcctggcccttgctgagctccttggatggaaggtgaggagctgagcaaccccagcctgtcctgagccccatccctggaccctctccccac

SEQ ID NO: 134323 - DNA, 458 bp, Homo sapiens
aaagcaaagccactcacatgaggtcttgctcctggggacgggcatggccaggactccaaccccggcaggctgtcccagagccctggagctagccccagtgcagtctctccaccaccccgcacttcctcaggccaccttcctgccacagccttttccccaaacctggtatcaccccctctcctccctccctaatcccacctctcgggcctggccactccaccccaccccttccaggactcagattcagactctgagggaggagccgctggtggagaagcagacatggacttcctgcggaacttattctcccagacgctcagcctgggcagccagaaggagcgtctgctggacgagctgaccttggaaggggtggcccggtacatgcagagcgaacgctgtcgcagagtcatctgtttggtgggagctggaatctccacatccgcaggcatccccgactt

SEQ ID NO: 134324 - DNA, 2007 bp, Homo sapiens
ggcacgaggggtgacaggacagagcagtcggtgacgggacacagtggttggtgacgggacagagcggtcggtgacagcctcaagggcttcagcaccgcgcccatggcagagccagacccctctcaccctctggagacccaggcagggaaggtgcaggaggctcaggactcagattcagactctgagggaggagccgctggtggagaagcagacatggacttcctgcggaacttattctcccagacgctcagccttgggcagccagaaggagcgtctgctggacgagctgaccttggaaggggtggccccggtacatgcagagcgaacgttgttcgcagagttcatcttgtttggtgggagctggaatctccacatccgcaggcattccccgacttttcgcttctccatccaccggcctcttattgaacaacctagagaagtgaccatctttccctaacccagaggccatcttttgagattcagctattttcaagaaacattccggaaccctttttcgccctcgccaagggaactcttatcctggggcagtttcaaggccaaccatctgttcaataatttcatgcggcttgcttgaaagggacaaaggggggctactcctgcggttgttaaaaggagggaacattaggttacctgggagcgaatagccggggttggaacaggaggacttggtggaggcgcacggcaccttctacacatcacactgcgtcagcgccagctgccggcacgaatacccgctaagctggatgaaagagaagatcttctctgaggtgacgcccaagtgtgaagactgttcagagcctggtgaagcctgataatcgtcttttttggtgagagcctgggagcgcgtttcttctcctgttattgcagttcagattttctgaaggttggaccttcttctgggtcatgggtacctccttgcagggacgtggcctggctgggtgaatgcgaccagggctgcctggcccttgctgagctccttggatggaagaaggagctggaggaccttgtccggagggagcacgccagcatagatgcccagtcgggggcgggggtccccaaccccagcacttcagcttcccccaagaagtccccgccacctgccaaggacgaggccaggacaacagagagggagaaaccccagtgacagctgcatctcccaggcgggatgccgagctcctcagggacagctgagccccaaccgggcctggccccctcttaaccagcagttcttgtctggggagctcagaacatcccccaatctcttacagctcccttccccaaaaactgggggtcccagcaaccctggcccccaaaccccagcaaatctctaaaaacctcctagaggcccaaggctttaaaccaggcattttctaccagcccccaactgtcttctaaacaaatccctgggcctaaaggagtaaacctcccctcatctcctaaaaacttgccccacggggcccagggctacccccagaactttttaactcttccccaggacaggggagcttcgggccccccactctgtctgcctgcccccggggggcctggtggtaaagtaaaccatacctaacctaccccagtgtgggtgtcgggcctctgaatctaacccacgacccagcgtaggggggagtcttgagccgggagggctcccgaagtctctagccttcagcttcccaaagtggggtggtggggcccccttcacgtgggacccacttcccatgctggatggggcagaagacattgcttattgtagacaaattagaaacaataacaactaacaaaaaatattacagaaaggggcggcgatttaaaaggtccccacgaggggcccacgttaacagaggcgtccaagctcatacttgtcaccttatggggggcctaataaaagcctaggcccggcccgtcatttaaaacacgatgggccggaaaaatcctcaatctggaaatcttgtggaaggaccttaatttttgcgaggagaaaaattg

SEQ ID NO: 134325 - DNA, 413 bp, Homo sapiens
actttggtttcaatgggtgttccaaaaggatcatcaagcttcaggagctttctgaccttgaagaaagggaaaatgaagatagcatggtgccacttccgaagcaaagcctgaagttcttctgtgctttagaagtggtgttgccatcctgtgattgcaggagtcctggcattggcttggtggaggagcctatggataaggtggaggaaggaccattatcattccttatgaaaaggaagacagcccagaagcttgctattcagaaggctttgtcagatgcattccagaaactgttgattgttgttctaggtaagactgtcttgatcatccttgaagtacttcagtttcagtaagcaaataaactcattttgaaaagttaattgaataaaaatattgatatctaaagcaaaaaaaaa

SEQ ID NO: 134326 - DNA, 1822 bp, Homo sapiens
tcatttgcttgcttcttggctgggagaagttagcgtccctgatatgtcgtactgctgagactgtataccctgcagcctcctactgtattggagaggggttctcatctttagtaggttctggagattcagctgaagtctcctgttgaactggtaaaggtccagtctcttccgatgactctcttgatatactggaggttggggtacaaattccttaggaggctgagttggggtctcctgcatggttggagaaagttcaatttctgtagtggattctggagtgatgataaaccccaggtccaaaggttgaagtgtgacactggccagtgttgaaagctgagcttgatcctgaccttgtgttggaattgtcacctcataacgaggtggaagttgagctacaacctccgtaggtggttctggaagttgatttgagttctccatggttggaggaaatatattctctgggaccatctgctggcttgaaagttctatattcttggggggctctgaagcctgaactgtggcctcctgctggtttggagaaggctctgcctccatagggggtatggagtctgagctggaaagttttgctgagttagagagggttccacttcctgagggagctaaagtctgagctggtgactgagttgtgggctcttgagggactggaggaagttcatcattttcaggggtatttagctgctgaataatcatttcttgctggtctttcaaatgctgaaactgccctgagtttttatcttcacatacttgaattaaaccgtgtagttcttcttcgcatctgacacctacgatgtcttcactgggtctgtactccacagctattttaccactttcttcctccaccttatccataggctcctccaccaagccaatgccaggactcctgcaatcacaggatggcaacaccacttctaaagcacagaagaacttcaggctttgcttcggaagtggcaccatgctatcttcattttccctttcttcaaggtcagaaagctcctgaagcttgatgatccttttggaacacccattgaaaccaaagtagtaattcgccagttcttggcatttggaactgttcagggcaagggcttgatgttgaactgccttatgtctggtgccaagacgaaccttgactggagatttctgaaaaagctgcttccggtcgcatgccttttgggctctgtgggcagcccttgcagaataaaacttaatgacggcatagaaaccaggatgggccactgcagcatttgggaagacccggactgaatacagaaggccaaactgagaaaatgctgtgaacagagaatgctgtgggggtgggacaagtaaatgcatgaaatctcacgcccagaaaacaaaaccggcacatgccctcatattccccaaacctctcttcgcgaaggatgcgattcaaaacacttcccacttaatcaacaggttttcctcttaaaatcctaaactttaagaagcactggaaggtaaaacgttctgaaggtgaagagatacctctccgggactctaaatatctgttgggggtcgtcagttgtcagttgggatcccctttataattaagagtccttcagcggaggctcaggcaggtgagggtctgaggcaggactccggaactcccagtcagcgggtgggcagctttctccatccctccctccatcctggccccggctcacatgcaaagcctcggccgtgggtccggagctcagctcccacactagcaaggttttgtcactaaaaatgggaaccgcaaaaggtaccaactccgccatccacgaaatcgtcgacccgggaaatc

SEQ ID NO: 134327 - DNA, 864 bp, Homo sapiens
ggaattccagcagcagacagaagaagccagtctggagcttattaaactggacatttctagaacatttcctaatctctgcattttccagcaaggtggtccatatcatgacatgttgcacagtattttgggcgcttatacttgttaccggccagatgtgggttatgtccagggcatgtccttcatagcagcagtgttgatcttgaacttagatactgcagatgcctttattgccttttctaaccttctgaataaaccctgtcaaatggcgttttttagagtggaccatggccttatgttgacttattttgctgcatttgaagtattctttgaagaaaatttgccgaaattatttgcgcatttcaagaagaacaacctaactccagatatctacctaattgattggatctttaccttatatagtaaatctctgcccctcgacctggcctgtcgtatctgggacgtgttctgtcgcgatggggaagagttcctgttccgcacggccctgggcatcctgaagctgttcgaggacatcctgaccaagatggacttcattcacatggcccagttcctgacccggctgcccgaggacctgcccgccgaggagctgtttgcctccatcgccacgatccagatgcagagccgaaacaagaagtgggctcaggtactgactgcattgcagaaagacagccgggaaatggagaagggaagtccgtccctccgacactgaggctgcagcgggaattcgcactcggcaccaatcagagccccatgccgcggcccctctgttgtttcagactgacacccgggcagccgagaagaacagacgctctttaagtttgattcctaacactggagttggcctta

SEQ ID NO: 134328 - DNA, 1052 bp, Homo sapiens
agtgcggtggaattcccaagatggaagagtcggcagagtacgaggcagcgcggcataaacgggagaagaggatggagaacataaacctagccggctccaaacggggaaaggaggacggcaaagacagcgagttcgccgccattgagaaccttccaggcttcgagctcctgtcagatcgcgagaaggtgctctgcagctctttaaacttgagtccagcccgctacgtgactgtgaagactattataattaaagaccacctccagaagcggcaaggaatcccctccaaaagccgccttcctagctacctggacaaagtcctaaagaaaaggattttgaatttcctcacagaaagcggctggatctccagggacgcgtcttgaagctgagacgctttgaaagccagggtgatgctcagacagtgtgccagccaaaatgacttgggggaggggagccgcttccccactgttgctcttttttaaacaaattgagttcctttttttaagatagaaattcttttcatggtcctctgaaagaagcaatagtaacaatcttatattggatcatgggggaagcaaatgtgtgtattttaagtgagttcctgcgagtcatacactgcgatgatgctccgcctttacccgttcagttgggagcttattgtgagattggatcatttccttttgagtgttcttctctttggtacaaaagctattgtgggtgacaggagccagtgtttcctgctggacccgcaagccaccagctatttcctggtgacacaagctcttctcaggcggggctgcctgcaggctcccgttttctgagcccacgctgcccacagctgaccccagcgcagccccgggcacgcggcactttacatgggggcagcttgggcccagactcctccgctgtgtagcagatgaggaaaatcaggccagaggacaacaggctggcgttttgttgggaactgaagaggaatctgttgaacacagcgaccagatgaccttccatttcaccggcggcaaaaggttttcagcgtgcagttcccaaaccccaaa

SEQ ID NO: 134329 - DNA, 513 bp, Homo sapiens
cctagcggtaccgggcccggatttcccgggtcgacgatttcgtgagggagggagggaggccggccctccgctcgctgggcatggagcctccggccgcgcgcctctaaggccccggcgttcatggaatatgaagacaaggctggaagacctagcaagccaccctctccaaagcagaatgtgaggaagaatcttgactttgaaccactttccaccaccgcactcatcctcgaggacagaccagcaaatctcccagcaaaaccagctgaagaagctcagaagcacagacagcagtatgaagaaatggtggttcaggccaaaaagcgagagctgaaagaagcccagcgaaggaagaagcagctggaagaaagatgcagagtcgaggaaagcattggaaacgctgtgctcacctggaataatgagatcttacctaactgggaaacaatgtggtgctctagaaaagttcgagatttatggtggcagggaatccctccaagtgtgagaggcaaagtctcg

SEQ ID NO: 134330 - DNA, 4017 bp, Homo sapiens
aaaaccaagaatggaaacgaagccctcccatcacggtagctaaggccactcaaggagcctacttgaacattctcaaagacaccctacgagctcagaaagagcaaaaggaaggcaaggaggaagtcatccataaaggtgctaagctgcaccccaacggatacaggatggcgcagggaagtgagactctggtggcaagaggaggcccgtgcagatccgtggagccctcagctgcttctccgcaggagctcaggggctggtgggaggcccaagctctgaaacggtggggcctgatgggaggcgtttgggtcatggaggtggatccctcgtggcttggtgccatctctgcaatagtgagttctagtgccagccggttgttgaaaagtgtgtggcacatcccctgcccccacttcctcctgctccggccacagctgaaagaagcccagcgaaggaagaagcagctggaagaaagatgcagagtcgaggaaagcattggaaacgctgtgctcacctggaataatgagatcttacctaactgggaaacaatgtggtgctctagaaaagttcgagatttatggtggcagggaatccctccaagtgtgagaggcaaagtctggagcttagccattggcaacgagttaaatatcacccacgagctctttgacatctgtcttgcccgagccaaggagaggtggcggtcccttagcacaggaggctctgaagtggagaacgaaggactgtgtgtagcagtctgcgctcagcaaggccatgttggtgtgatgggcttcggctcagatgagcccagtgcagtgagcccgtgtgagaaagggaaatccctggcagcctgggttctcatctttgtggatttccgtgtgggtcttcagaaatcttttcagaagaggaaagagagggaatctacaaagctccagcagctttggtcctggtgtctgatgttgacttattttgctgcatttgaagtattctttgaagaaaatttgccgaaattatttgcgcatttcaagaagaacaacctaactccagatatctacctaattgattgtgattcaggctccttgttgggtgctgacagttcggtgaaagctcagatcagaaacaggttgggcagtagggaggaagcaaaggggaagaacagactttacataagacctgtcctagaagctgccatttcagaagcactcgtcactgtggtcttcagtgttcaggagcaggtgtacctatttctgggcacagaagaagtcactgaggcccatggtgtgaggtccagcagccatcggagcctcctggaaactggcctcttgagtcggctgtgtatgcagcagcccctccgcagccttggacagaagctggtgtcgagggctggagaagctgcacaggccaaggccggctctgcccctgccgcccgcctgcgcggtggaagcacagacgaagatatggctgcccacgttggtgcttcccggactccccaagaggtgatggagcattacgtgagcatgtacatccacgggaacctggggaaggcctgcatccccgacaccatccccaaccgcgtgacagaccacacctgtcccagcggaggccccctctcacccagcctcaccaccccgctgcccccgctggacatctctgtggctgagcagcagcagctgggctacatgccgctgcgggatgattacgagatcgagtatgaccaggatgccgagacgctcatcagcgggctctctgtcaactatgatgacgacgacgtggagatcgagctgaagcgcgcccacgtggacatgtacgtgcggaagctgaaagagagacagcggcggaagaacatcgcccgtgactacaatctggtgccagccttcctggggaaatgacaagaaggagaaggaaaaggcgctgaagcgcaagatcaccaaggaggagaaggagctgcgcctgaagctgaggccgctgtaccagttcatgtcatgcaaggagtttgatgacctttttgaaaacatgcacaaagaaaaaatgctccgggccaagatccgagaactgcagcggtaccggcgaaacgggatcaccaagatggaagagtcggcagagtacgaggcagcgcggcataaacgggagaagaggaaggagaacaaaaacctagccggctccaaacggggaaaggaggacggcaaagacagcgagttcgccgccattgagaaccttccaggcttcgagctcctgtcagatcgcgagaaggtgctctgcagctctttaaacttgagtccagccccgctacgtgactgtgaagactattataattaaagaccacctccagaagcggcaaggaatcccctccaaaagccgccttcctagctacctggacaaagtcctaaagaaaaggattttgaatttcctcacagaaagcggctggatctccagggacgcgctcccgttttctgagcccacgctgcccacagctgaccccagcgcagccccgggcacgcggcactttacatgggggcagcttgggcccagactcctccgctgtgtagcagatgaggaaaatcagggccaagaggacaacaggctggccgtttttgtttgggaactggaagaggaatcttgttgaacacaccgaccagatgaccttccatttcaccggcggcagcagtttcagcgtgcagttccccaaaccccaaagctgaccctgcgccccatttgaatacggccagagcctgctggttcactttgggtagagccgtgcctcttgggcaggctcccatagtgaccacgtccccacgaatgggaaagcacgttagtgggagggacgtaggacacgtgtggaccgccaggccctctcagtccattttccggggctgctcggtgctgctgttaagactttctccttggaccaagatgactgatggaaaactctccacctctacaaatggcgtagccttcatgggtattctggatggtcgaccaggaaacccccttcagaacctgcaacacgtcaatctcaaggcgccccgactcctctccgcgcctgagtacgggcccaagctgaaactcagggctttagaagaccggcacagcctccagtccgtggactcggggattcctaccctggagatcgggaacccggagcctgtaccctgcagcgcggtccacgtgaggaggaagcagtccgactccgacctcatccccgagcgggccttccagagcgcctgcgcgctgccatcctgtgcgccaccagctcctagcagcaccgagcgggaacagagcgtgcgcaaatcctccacgtttcccaggacaggctatgactcggtaaagctctatagcccgacctccaaagccctgacccgcagcgatgatgtctccgtctgcagcgtgtccagtcttgggacagagctgtccaccacgctgtccgtcagcaatgaggacatcttggaccttgtggtcacgagcagctccagtgccattgtgaccctggagaatgacgatgacccacagtttaccaacgtcaccttgagctctatcaaggaaacccgtggcttacaccagcaggactgtgttcatgaagctgaggaggggagtaaattgaaaatattggggccatttagtaacttctttgcaagaattagctctagtgacctgagatggaacattgtaactatgccttttctgtgcaaacagtttgttaatattgctggtgactttgccctggcattatggatatacagatggcacctgctatggacctgcgttgctgctggtgtgtatgagcttagttgcggcgatgaaaggaccattctaatcaaggtgttgggctgcagttgtcagggagtaaggaagcaagaagattcgaaggtgggcagactagtgctggaggccactgggtcagtccctctactgtgtgatgaggatctggagagagatgtgaacaaagcagcaaagcccgttgacagctcagaaagaagtaacagggctgagatgccagctggccttcgaaagtgctgtccacccgcctga

SEQ ID NO: 134331 - DNA, 556 bp, Homo sapiens
  misc_feature (1)...(556): n = a,t,c or g
cggccaccaaattgagcactgcattgangggcaatccgcanaggcagaggagctggngagaagacagcgaaatggcgcctccggcccccggcccggcctccggcggtttcggagaggtttacgagctgttcgacgtaaagaacgccttctacatcggcagctaccagcagtgcataaacgaggcgcagcgggtgaagctatcaagcccagagagagacgtggagagggacgtcttcctgtatagagcgtacctggcgcagggacagcatcgtggccgagctggaccgagagatgagcaggagcgtggacgtgaccaacaccaccttcctgctcatggccgcctccatctatctccacgaccagaacccggatgccgccctgcgtgcgctgcaccagggggacagcctggagtgcacagccatgacagtgcagatcctgctgaagctggaccgcctggacctcgcccggaaggagctgaagagaatgcaggacctggacgaggatgccaccctcacccagctcgccactgcctgggtcagcctggccacgggtggtg

SEQ ID NO: 134332 - DNA, 792 bp, Homo sapiens; identical to SEQ ID NO: 111107
  misc_feature (1)...(792): n = a,t,c or g

SEQ ID NO: 134333 - DNA, 886 bp, Homo sapiens
aggaagttcggtgtggtcctggatgagatcaagccctcctcggcccctgagctccaggccgtgcgcattgtttgctgactacctcgcccacgagagtcggagggacagcatcgtggccgagctggaccgagagatgagcaggagcgtggacgtgaccaacaccaccttcctgctcatggccgcctccatctatctccacgaccagaacccggatgccgccctgcgtgcgctgcaccagggggacagcctgggagtgcacagccatgacagtgcagatcctgctgaaagctggaccgcctgggacctcgcccggaaggagctgaagagaatgcaggacctgggacgaggatgccaccctcacccagctcgccactgcctggggtcagcctgggccacgggtggtgagaagctgcaggatgcctactacatcttccaggagatggctgacaagtgctcgcccaccctgctgctgctcaatgggcaggcggcctgccacatggcccagggccgctgggaggccgctgagggcctgctgcaggaggcgctagacaagccacctcatggctgctcctgtgagcgcaagctggtgtcccccttcatggtggagactgaggctcagaaaagtccggtctgcaaaaaggtgccctgccatgggccgccgtgggcaggtcgggctctgggcgcatcctcgttggatagtggctacccagagacgctggtcaacctcatcgtcctgtcccagcacctgggcaagccccctgaggtgacaaaccgatacctgtcccagctgaaggatgcccacaggtcccatcccttcatcaaggagtaccaggccaaggagaacgactttgacaggctggtgctacagtacgctcccagcgcctga

SEQ ID NO: 134334 - DNA, 1531 bp, Homo sapiens
  misc_feature (1)...(1531): n = a,t,c or g
tgtggtggaattcgaggagctggtgagaagacagcgaaatggcgcctccggcccccggcccgngcctgccggcggctccggggaggtagacgagctgttcgacgtaaagaacgccttctacatcggcagcgtaccagcagtgcataaacgaggcgcagcggggtgaagctatcaagcccagagnagyagdacstggagagggacgtcttcctgtatagagctgtacctgggcgcagaggaaagttcggtgatggtcctggatgaagatcaaagccctccttcggcccctgagcttccagggccgtgccgcatgttttgcttgacttacctcggcccacgagaagtcggaagggacaagcatcgttggcccgagcttgggaccgaggagattgagccaggagcttgggacgttgaccaacaccacctttccttgttcatgggccgcctcccatctatcttccacgaccagaacccggatgccgccctgcgtgcgctgcaccagggggactagcctggagtgcacagccatgacagtgcagattctggctgaagctggaccgcctggacctcgcccggaaaggagctgaagagaatgcaggactggaccgagaatgccaccttcacccagcttcgccactggctggggtcagcctggcccacgggttggtgagaagctgcaggatgcctactacatcttccaggaagatggctgacaaggtgctcgcccaccctgctgctgcctcaaatgggcaggcgggcctgccaccatggccccagggtccgctgggaggcccgctgaagggccttgctgcagggaggcgctagacaaggatagtggcttacccggagacgctggtcaacctcatcgtcctgtcccaagcaaccttggcaagccccctcacccagctcgccactgcctgggtcagcctggccacgggtggtgagaagctgcaggatgcccacaggtcccatcccttcatcaaggagtaccaggccaaggagaaacgacttttgacaggctggtgctacagtacggctnccagcgccctgaggctggcccgagagctgtcaggaccatgaagccaggacacgagcccaggagccaggccctgcagccctccccacccggcatccacctgcatccccttctgggggcaggagtcccaccacccgcccccccatctgttaataaatatctcaactccgagggtgttccacctgnnnnnnnnnnnnnngggggggcccgttttaaaggatccctgggggggcccaaagttaacgggggcggtgcaaggaaaaagttttttccttatggggggccgaataaaaaccaacttgggaatttttgggaaagaacccttacttttgggggggaaacaaattgggccaaccttccctacaaaatttaaaggctctagggaaaataaaaaattttaaagggtaaagggggtaaaacaacctgcatatgctggttgttggaaagttttgcttccggggtttgatttttgaaaatttttttccccggggctgg

SEQ ID NO: 134335 - DNA, 413 bp, Homo sapiens
tttcgtggcggttctgagagcttcagagagcgatggaaagcaaaatgggtgaattgcctttagacatcaacatccaggaacctcgctgggaccaaagtactttcctgggcagagcccggcactttttcactgttactgatcctcgaaatctgctgctgtccggggcacagctggaagcttctcggaacatcgtgcagaactacagggccggcgtggtgaccccagggatcaccgaggaccagctgtggagggccaagtatgtgtatgactccgccttccatccggacacaggggagaaggtggtcctgattggccgcatgtcagcccaggggtctaaagatgagggccactgtagacggggcagaagtgagtgtctttgttccctcaggaagaccccaaccgtggtgttctgg

SEQ ID NO: 134336 - DNA, 2215 bp, Homo sapiens
  misc_feature (1)...(2215): n = a,t,c or g
atgaagcaccccaacatcaactcggccctccaggccccccacccctttgtgcctggtcggcctcacctggtcgctggtgtggcgccgccagccttgtcaaaccacccgcaggcgagagctactgccgcagccggcaaaccccacccacgctgcgcggaggctgcgggaattgggctggcctgcaccgccccgggctcccattggctgaaaatgggtgaattgcctttagacatcaacatccaggaacctcgctgggaccaaagtactttcctgggcagagcgccggcactttttcactgttactgatcctcgaaatctgctgctgtccggggcacagctggaagcttctcggaacatcgtgcagaactacagggccggcgtggtgaccccagggatcaccgaggaccagctgtggagggccaagtatgtgtatgactccgccttccatccggacacaggggagaaggtggtcctgattggccgcatgtcagcccaggtgcccatgaacatgaccatcactggctgcatgctcacattctacaggcaggggtctaaagatgagggccactgtagacggggcagaagtgagtgtctttgttccctcaggaagaccccaaccgtggtgttctggcagtgggtgaatcagtccttcaatgccattgttaactactccaaccgcaggtggtgacacttcccatcacttgtgaggcagctggggaccagcctatgtgagtgccanccactggagctgtggccacggccctgggactcaaatccctcaccaagcacctgccccccttggtcggcagatttgtgccctttgcagcagtggcagctgccaactgcatcaacatccccctgatgaggcagagagagctgcaggtgggcatcccggtggctgatgaggcaggtcaaaggcttggctactcggtgactgcagccaagcagggaatcttccaggtggtgatttctagaatctgcatggcgattcctgccatggccatcccaccactgatcatggacactctggagaagaaagacttcctgaagcgccgcccctggctgggggcacccctgcaggtgggactggtgggcttctgctccatacacataagcaacctggaaccagagctgagagctcagatccatgagcaaaaccccagcgttgaagtggtctactacaacaaggggctttgaggagggtcagcctctgtcccctccctcacttccttgggctgctgctttagtggagccatgtcacccctaccacttggctatctgcctatcactgggcaggggcctcggtgggcagatggcaattgaaggcagcaacctattaaggtgggggagggacccccataaggcttttcctcccttctctggtttcaaagatcagagcacataacccctcctgtgcttgagtgtccatgcatatacatacatgatacacatgtgtatgtgtacattgggtcctgaaagctaggaagcaggcatgctagcctagtatgttctgacatctggcttcccttctcagcctcatgtccacctgcctgccagccagggtaacaggtgtgacttccttcttttaaactgttacaccagccaagttattttttgatgggcacctcatcccttctaggaattagggaggagccccagggttttcagggacagagacttatagacactagtaggacaaagcgggcttgaatccttcaggtttctgaatacctagctccccaagctgactgggctggcagaggagaacatgttgagacaagggaggcagggggacttatgcatcccttcagtgccatcccttgtatcctggaatagctccatttcccctcctcctctctaccagacaaaggagtgcctgtttcctgtactgccctcgctgtctcccccaccaccctacttgacagcgtgggcatcttcaggcacagccttgggagttcctggtgtgctcttgacatcatgacctcaaatctaaaatcctccaatcccaactccctttcccaaacaaaaagccacagaggcagagcaagcattcccctttaagagctttcactgcaccccctcccaagggacacagcggtaggaatggtgcttaaactccacaggtatcagagagggtgtaactaggacatcctcaagggcagctaggccccgaatgtacaatgttaagacagggaattttgtgttccattgactt

SEQ ID NO: 134337 - DNA, 480 bp, Homo sapiens
  misc_feature (1)...(480): n = a,t,c or g
gacggtgtcaaactctgctttattggaatagagaatacaggcagcaggaatcacgcttggtgctggcagctccaggtcccctgcccccacgggctctcccacttgtctggatcaggggagacctccactttgaagaacaatatggggtgggagcttccaatgtgcattctgctaccagcctcaggattagcagcaagatgccaacagcaacagcaacagcaacagcaacagttgtgggtgccacggttgggcatggggttgaagtcggccttgatgacgttgaggtgctggggcgtgagcaacagccagtaggggatggcggcggacttgacggcctcagagggcgcgcagcaggagcgccgcacggctgaacagagtgtgcagctggcccactcgatgttgcctgagtagtccccggcggccgtctgcaccatgcgcttgtcactgtagaccangtagacggggaagcagccctggctg

SEQ ID NO: 134338 - DNA, 1182 bp, Homo sapiens
atgtttgaacaactggacaacaacacaagcaacgaaaggagaaaagagccagaagaatggccctcagagcggaagacccttctacccgctcctcggggctgcagatcccggacccctccccaagcccccgagtcggactcccggttccagccaccacccccgcttcgggtgcccgcgcccccaacacaccgtataagtgtccacaagctccgagcccacgacgcgcgcttccttggccggctcggcttcccgctcgggcccgaacgtgcgcgcggttgccatgttcgggtcttcgccgccaacgccgcccggcgcagactagcagcagcacggggcggggggtctatctgtgcccacctgtggctaagctctgctgctgccttccagagggtctgggtgcagaatgccagcgtggatgtggctgacctccttgccaccaacggtgtcctacacatcctcagccaggtcttactgcccccccgaggggatgtgcccggtgggcaggggttgctgcagcagctggacttggtgcctgccttcagcctcttccgggaattgctgcagcaccatgggttggtgccccagattgaggctgccactgcctacaccatctttgtgcccaccaaccgctccctaggaggcccagggcaacagcagtcacctggtgaggccgacgcagacacagtgcggcaccatgtggtcctgggggaggccctctccatggaaaccctgcggaagggtggacaccgcaactccctcctgggccctgcccactggatcgtcttctacaaccacagtggccagccaatgttccaggggagacaaatgaaacaagccaatgtcagctggtggctggtgctgccagacaacctgaagaagcgcatctccaacatcaaccgctacctgacctacagcctctacagcaacgtctgccgcagcctctttgagaagcacaagctgatgtttgccttcctgctgtgtgttcgcatcatgatgaacgagggcaaaatcaaccaggtgctggcagagacacccaggacagactgcctgaggggtggccctgtggcagggcctgagaacagggtggaaggaaagggaaagccaggcatgaaggcaccgcgagagcaaagtggcagaggaaacaattccttgattaaaagcagccagggccgggcacggtga

SEQ ID NO: 134339 - DNA, 372 bp, Homo sapiens
atggcggggccccggggcctcctcccactctgcctcctggccttctgcctggcaggcttcagcttcgtcagggggcaggactggccgtgccatagctggcacccacacccgggccgctacctcagcaatgctgctgtggaagagctcgatgatggcgctgccccgcaggctggcgacgtgccggagcgacgggcaggcaggcaagtgcgaggggatctgattctcctccgaggtggcctggatgaggtgctcactcggagcctctgctgggacctcctggggacgctggtcattgctgtatcccccgaaaaacaccatattaacagcggaccccaaatgaagattcacatcgcatgtgcagcttcagagtga

SEQ ID NO: 134340 - DNA, 5203 bp, Homo sapiens
gaactggcccagaatcactctcgccctgctccggcgtctgcgccgggcggcggtggcggcggagacccgaacatggcgaccgcgcgcaccttcgggcccgagcgggaagccgagccggccaaggaagcgcgcgtcgtgggctcggagcttgtggacacttatacggtttacatcatccaggtcactgatggcagccatgagtggacagtaaagcaccgctacagcgacttccatgacctgcatgaaaagctcgttgcagagagaaagattgataaaaacctgcttccgcccaaaaagataattgggaaaaactcaagaagcttggtggagaagagggagaaggatctggaggtctacctccagaagctcctggctgccttccctggcgtgacccccagagtactggcccacttcttgcattttcacttcatatgagacataagtcattcacgcggcatctggctgaagagctctttgagaaaggagaacagctcctgggggccggcgaggtctttgccattggacccctgcagctgtatgccgtcacggagcagctgcagcagggaaagcccacgtgcgccagtggggatgccaagaccgacctcgggcacatcctgggacttcacctgtcgccttaagtaccttaaggtttctggcacagaaggaccttttgggaccagcaacattcaggagcagctcctgccgttcgacctatcaatattcaagtccctgcatcaggtggagataagtcactgtgatgctaagcacatcagagggctggtcgcatcgaagcccaccttagccacgctgagtgtccgcttctcagcaacctcgatgaaggaagtccttgttcctgaagccttattaatttgatgagcgggagcctgaaggcacaaccctagaaggccctgtgactgccgtcatccccacttggcaggcattgaccacgcttgacctgagccacaacagcatcttccgagatcgacgagtctgttgaaattgattcccaaagatttgagttcctggacctgagtcacaatgggtttgctggttgtggacaatctgcagcacctgtataaccttgtgcatctggacctgtcctacaacaagctctcctccttggaagggcttcacaccaagctggggaacatcaagaccttaaacctgggcagggcaacctcctaggagagtctgagtgggcctgcacaagctcttactcactggttcaacctgggatctccggggacaacagggattcgaacagatgggagggaggttccggagcatagggcagcctcccgtgtctggagcacgtgtctctgctgaacaaccctctgagcatcatccccgactaccggaccaaggtgctggctcagttcggagagagggcctcagaggtctgtctggatgacacagtgaccacagagaaggagctggacactgtggaagtgctgaaagcaattcagaaagccaaggaggtcaagtccaaactgagcaacccagagaagaagggtggtgaagactcccggctctcagctgccccctgcatcagacccagcagctcccctcccactgtggctcccgcatctgcctccctgtccccagcccattcctctctaaccaaggaatcatgttcgttcaggaggaggccctggccagcagcctctcgtccactgacagtctgactcccgagcaccagcccattgcccagggatgttctgattccttggagtccatccctgcgggacaggcagcttccgatgatttaagggacgtgccaggagctgttggtggtgcaagcccagaacatgccgagccggaggtccaggtggtgccggggtctggccagatcatcttcctgcccttcacctgcattggctacacggccaccaatcaggacttcatccagcgcctgagcacactgatccggcaggccatcgagcggcagctgcctgcctggatcgaggctgccaaccagcgggaggagggccagggtgaacagggcgaggaggaggatgaggaggaggaagaagaggaggacgtggctgagaaccgctactttgaaatggggcccccagacgtggaggaggaggagggaggaggccagggggaggaagaggaggaggaagaggaggatgaagaggccgaggaggagcgcctggctctggaatgggccctgggcgcggacgaggacttcctgctggagcacatccgcatcctcaaggtgctgtggtgcttcctgatccatgtgcagggcagtatccgccagttcgccgcctgccttgtgctcaccgacttcggcatcgcagtcttcgagatcccgcaccaggagtctcggggcagcagccagcacatcctctcctccctgcgctttgtcttttgcttcccgcatggcgacctcaccgagtttggcttcctcatgccggagctgtgtctggtgctcaaggtacggcacagtgagaacacgctcttcattatctcggacgccgccaacctgcacgagttccacgcggacctgcgctcatgctttgcaccccagcacatggccatgctgtgtagccccatcctctacggcagccacaccagcctgcaggagttcctgcgccagctgctcaccttctacaaggtggctggcggctgccaggagcgcagccagggctgcttccccgtctacctggtctacagtgacaagcgcatggtgcagacggccgccggggactactcaggcaacatcgagtgggccagctgcacactctgttcagccgtgcggcgctcctgctgcgcgccctctgaggccgtcaagtccgccgccatcccctactggctgttgctcacgccccagcacctcaacgtcatcaaggccgacttcaaccccatgcccaaccgtggcacccacaactgtcgcaaccgcaacagcttcaagctcagccgtgtgccgctctccaccgtgctgctggaccccacacgcagctgtacccagcctcggggcgcctttgctgatggccacgtgctagagctgctcgtggggtaccgctttgtcactgccatcttcgtgctgccccacgagaagttccacttcctgcgcgtctacaaccagctgcgggcctcgctgcaggacctgaagactgtggtcatcgccaagacccccgggacgggaggcagcccccagggctcctttgcggatggccagcctgccgagcgcagggccagcaatgaccagcgtccccaggaggtcccagcagaggctctggccccggccccagtggaagtcccagctccagcccctgcagcagcctcagcctcaggcccagcgaagactccggccccagcagaggcctcaacttcagctttggtcccagaggagacgccagtggaagctccagccccacccccagccgaggcccctgcccagtacccgagtgagcacctcatccaggccacctcggaggagaatcagatcccctcgcacttgcctgcctgcccgtcgctccggcacgtcgccagcctgcggggcagcgccatcatcgagctcttccacagcagcattgctgaggttgaaaacgaggagctgaggcacctcatgtggtcctcggtggtgttctaccagaccccagggctggaggtgactgcctgcgtgctgctctccaccaaggctgtgtactttgtgctccacgacggcctccgccgctacttctcagagccactgcaggatttctggcatcagaaaaacaccgactacaacaacagccctttccacatctcccagtgcttcgtgctaaagcttagtgacctgcagtcagtcaatgtggggcttttcgaccagcatttccggctgacgggttccaccccgatgcaggtggtcacgtgcttgacgcgggacagctacctgacgcactgcttcctccagcacctcatggtcgtgctgtcctctctggaacgcacgccctcgccggagcctgttgacaaggacttctactccgagtttgggaacaagaccacagggaagatggagaactacgagctgatccactctagtcgcgtcaagtttacctaccccagtgaggaggagattggggacctgacgttcactgtggcccaaaagatggctgagccagagaaggccccagccctcagcatcctgctgtacgtgcaggccttccaggtgggcatgccaccccctgggtgctgcaggggccccctgcgccccaagacactcctgctcaccagctccgagatcttcctcctggatgaggactgtgtccactacccactgcccgagtttgccaaagagccgccgcagagagacaggtaccggctggacgatggccgccgcgtccgggacctggaccgagtgctcatgggctaccagacctacccgcaggccctcaccctcgtcttcgatgacgtgcaaggtcatgacctcatgggcagtgtcaccctggaccactttggggaggtgccaggtggcccggctagagccagccagggccgtgaagtccagtggcaggtgtttgtccccagtgctgagagcagagagaagctcatctcgctgttggctcgccagtgggaggccctgtgtggccgtgagctgcctgtcgagctcaccggctagcccaggccacagccagcctgtcgtgtccagcctgacgcctactggggcagggcagcaggcttttgtgttctctaaaaatgttttatcctccctttggtaccttaatttgactgtcctcgcagagaatgtgaacatgtgtgtgtgttgtgttaattctttctcatgttgggagtgagaatgccgggcccctcagggctgtcggtgtgctgtcagcctcccacaggtggtacagccgtgcacaccagtgtcgtgtctgctgttgtgggaccgttgttaacacgtgacactgtgggtctgactttctcttctacacgtcctttcctgaagtgtcgagtccagtcctttgttgctgttgctgttgctgttgctgttgctgttggcatcttgctgctaatcctgaggctggtagcagaatgcacattggaagctcccaccccatattgttcttcaaagtggaggtctcccctgatccagacaagtgggagagcccgtgggggcaggggacctggagctgccagcaccaagcgtgattcctgctgcctgtattctctattccaataaagcagagtttgacaccgtcttaaaaaaaaa

SEQ ID NO: 134341 - DNA, 4739 bp, Homo sapiens
atggcggcgcagcgcgcggcgggggcgacgggcggcgggggccggggggcgtctgcgccgggcggcggtggcggcggagacccgaacatggcgaccgcgcgcaccttcgggcccgagcgggaagccgagccggccaaggaagcgcgcgtcgtgggctcggagcttgtggacacttatacggtttacatcatccaggtcactgatggcagccatgagtggacagtaaagcaccgctacagcgacttccatgacctgcatgaaaagctcgttgcagagagaaagattgataaaaatctgcttccgcccaaaaagataattgggaaaaactcaagaagcttggtggagaagagggagaaggatctggaggtctacctccagaagctcctggctgccttccctggcgtgacccccagagtactggcccacttcttgcattttcacttctatgagataaatggcatcaccgcggcactggctgaagagctctttgagaaaggagaacagctcctgggggccggcgaggtctttgccattggacccctgcagctgtatgccgtcacggagcagctgcagcagggaaagcccacgtgcgccagtggggatgccaagaccgacctcgggcacatcctggacttcacctgtcgccttaagtaccttaaggtttctggcacagaaggaccttttgggaccagcaacattcaggagcagctcctgccgttcgacctatcaatattcaagtccctgcatcaggtggagataagtcactgtgatgctaagcacatcagagggctggtcgcatcgaagcccaccttagccacgctgagtgtccgcttctcagcaacctcgatgaaggaagtccttgttcctgaagcctcagaatttgatgagtgggagcctgaaggcacaaccctagaaggccctgtgactgccgtcatccccacttggcaggcattgaccacgcttgacctgagccacaacagcgtctccgagatcgacgagtctgtgaaactgatcccaaagattgagttcctggacctgagtcacaatggattgctggttgtggacaatctgcagcacctgtataaccttgtgcatctggacctgtcctacaacaagctctcctccttggaagggcttcacaccaagctggggaacatcaagaccttaaacctggcaggcaacctcctagagagtctgagtggcctgcacaagctctactcactggtcaacctggatctccgggacaacaggatcgaacagatggaggaggtccggagcataggcagcctcccgtgtctggagcacgtgtctctgctgaacaaccctctgagcatcatccccgactaccggaccaaggtgctggctcagttcggagagagggcctcagaggtctgtctggatgacacagtgaccacagagaaggagctggacactgtggaagtgctgaaagcaattcagaaagccaaggaggtcaagtccaaactgagcaacccagagaagaagggggttcaagatgacccagactgtgcccctggggagcttggagccatgcgggaggatgagccatgtgctggaggagaacagggaatcatgttcgttcaggaggaggccctggccagcagcctctcgtccactgacagtctgactcccgagcaccagcccattgcccagggatgttctgattccttggagtccatccctgcgggacaggcagcttccgatgatttaagggacgtgccaggagctgttggtggtgcaagcccagaacatgccgagccggaggtccaggtggtgccggggtctggccagatcatcttcctgcccttcacctgcattggctacacggccaccaatcaggacttcatccagcgcctgagcacactgatccggcaggccatcgagcggcagctgcctgcctggatcgaggctgccaaccagcgggaggagggccagggtgaacagggcgaggaggaggatgaggaggaggaagaagaggaggacgtggctgagaaccgctactttgaaatggggcccccagacgtggaggaggaggagggaggaggccagggggaggaagaggaggaggaagaggaggatgaagaggccgaggaggagcgcctggctctggaatgggccctgggcgcggacgaggacttcctgctggagcacatccgcatcctcaaggtgctgtggtgcttcctgatccatgtgcagggcagtatccgccagttcgccgcctgccttgtgctcaccgacttcggcatcgcagtcttcgagatcccgcaccaggagtctcggggcagcagccagcacatcctctcctccctgcgctttgtcttttgcttcccgcatggcgacctcaccgagtttggcttcctcatgccggagctgtgtctggtgctcaaggtacggcacagtgagaacacgctcttcattatctcggacgccgccaacctgcacgagttccacgcggacctgcgctcatgctttgcaccccagcacatggccatgctgtgtagccccatcctctacggcagccacaccagcctgcaggagttcctgcgccagctgctcaccttctacaaggtggctggcggctgccaggagcgcagccagggctgcttccccgtctacctggtctacagtgacaagcgcatggtgcagacggccgccggggactactcaggcaacatcgagtgggccagctgcacactctgttcagcccgtgcggcgctcctgctgcgcgccctctgaggccgtcaagtccgccgccatcccctactggctgttggtcacgccccagcacctcaacgtcatcaagggcgacttcaaccccatgcccaaccgtggcacccacaactgtcgcaaccgcaacagctttaaagctcagccgtgtgccgctctccaccgtgctgctggaccccacacgcagctgtacccagcctcggggcgcctttgctgatggccacgtgctagagctgctcgtggggtaccgctttgtcactgccatcttcgtgctgccccacgagaagttccacttcctgcgcgtctacaaccagctgcgggcctcgctgcaggacctgaagactgtggtcatcgccaagacccccgggacgggaggcagcccccagggctcctttgcggatggccagcctgccgagcgcagggccagctgcacatgcgatgtgaatcttcatttggggtccgctgttaatatggtgtttttcgggggatacagcaatgaccagcgtccccaggaggtcccagcagaggctctggccccggccccagcggaagtcccagctccagcccctgcagcagcctcagcctcaggcccagcgaagactccggccccagcagaggcctcaacttcagctttggtcccagaggagacgccagtggaagctccagccccacccccagccgaggcccctgcccagtacccgagtgagcacctcatccaggccacctcggaggagaatcagatcccctcgcacttgcctgcctgcccgtcgctccggcacgtcgccagcctgcggggcagcgccagtcatcgagctcttccacagcagcattgctgagtgttgaaaacgaggagctgaggcacctcatgtggtcctcggtggtgttctaccagaccccagggctggaggtgactgcctgcgtgctgctctccaccaaggctgtgtactttgtgctccacgacggcctccgccgcttacttctcagagccactgcaggatttctggcatcagaaaaacaccgactacaacaacagccctttccacatctcccagtgcttcgtgctaaagcttagtgacctgcagtcagtcaatgtggggctttttcgaccagcatttccggctgacgggttccaccccgattgcaggtggtcacgtgcttgacgcgggacaagctaccttgaccgcactgcttcctccagcacctcatggtcgtgcttgtcctctcttggaacgcacgccctcgccggagcctgatgacaaggacttctactccgagtttgggaacaagaccacagggaagatggagaactacggagctgatccactctagtcgcgtcaagtttacctaccccagttaaggaggagattggggacctgacgttcacttgtggcccaaaaaattggctgagccagaaaagggccccagccctcagcatcctgctgtacgtgcaggccttccaggtgggcatgccaccccctgggtgcttgcaggggccccctgcggccccaaggacacttccttgcttcaccagcttccgagatctttcctcctgggatgaggactgtgtccacttacccacttgcccgagttttgccaaagagccgccgcagagaagacaggttaccggcttggacgatggccgccgcgtccggggacctggaccgagtgctcatgggctaccagacctacccgcaggccctcaccctcgtcttcgatgacgtgcaaggtcatgacctcatgggcagtgtcaccctggaccactttggggaggtgccaggtggcccggctagagccagccagggccgtgaagtccagtggcaggtgtttgtccccagtgctgagagcagagagaagctcatctcgctgttggctcgccagtgggaggccctgtgtggccgtgagctgcctgtcgagctcctcggttaatccatccccattccctctgtcgtgcctgcctgaccctacttgtcaggccccgcgcttcggactgttcc

SEQ ID NO: 134342 - DNA, 505 bp, Homo sapiens
tgaaagattcagacctcccatagcccgagtgattgatgtatctaatgggaaagttcatgttgctgaaactgtttggaagaaacaggtggcctgggagtagatattgtcctagatgctggagttggatcctccagatagccactgccttttcctcaagggagcaacgttagctttcctgaatgatgaagtttggaatttgtcaaatgtacaacagggaagatatctttagtattccaagtgccttgcaagtattcatttaaacattaaaacagccttttgagatgtaagtactgttatcatacccatttcacaggtgaagaaacagaagcacagagatgttgatacagactcaaggacgcagcaagtggcggacgaagaatcacactcaggcagtctctctcctttctgaacagagatgagccctaagatacctggaagattttgtttttaacctcacattaaggaaagcacacatcaccttgaaaggttgcacacttactcctat

SEQ ID NO: 134343 - DNA, 487 bp, Homo sapiens
tgaaggtgcaggccgttggggcggctcagaggcagagttccacagatgaagaaataacatttgtatttcaagaaaaggaagatcttcctgttacagaggataactttgtgaaacttcaagttaaagcttgtgctctgagccagataaatacaaagcttctggcagaaatgaagatgaaaaaggatttatttcctgttgggagagaaattgctggaattgtattagatgttggaagcaaggtatcattctttcaaccagatgatgaagtagttggaattttgcccctggactctgaagaccctggactttgtgaagttgttagagtacatgagcattacttggttcataaaccagaaaaggtcacatggacggaagcagcaggaagcattcgggatggagtgcgtgcctatacagctctgcattatctttctcatctctctcctggaaaatcagtgctgataatggatggagcaagtgcatttggtac

SEQ ID NO: 134344 - DNA, 395 bp, Homo sapiens
cggacgcgtgggtgatgaaccagctgtaaaactacaactactaccacataaacatgatatcatcacacttcttggtgttggaggccactgggtaacaacagaagaaaaccttcagttggatcctccagatagccactgccttttcctcaagggagcaacgttagctttcctgaatgatgaagtttggaatttgtcaaatgtacaacagggaaaatatctttagtattccaagtgccttgcaagtattcatttaaacattaaaacagccttttgagatgtaagtactgttatcatccccatttcacaggtgaagaaacagaagcacagagatgttgatacagactcaaggacgcagcaagtggcggagcaagaatcacactcaggcagtctctctt

SEQ ID NO: 134345 - DNA, 395 bp, Homo sapiens
catctctctcctggaaaatcagtgcctgataatggatggagcaagtgccatttgsgtacaatagctattcagttagcacatcatagaggagccaaagtgatttcaacagcatgcagccttgaagataagcagtgccttgaaagattcagacctcccatagcccgagtgattgatgtatctaatgggaaagttcatgttgctgaaagctgtttggaagaaacaggtggcctgggagtagatattgtcctagatgctggaggttatatttttcagcattctagttacatatttacatgatggctgatatgcaaataccgtaattctcacctaccaatcttcactgattttccaacaccctcatgaagatggccagaaaagacacacacacaccccta

SEQ ID NO: 134346 - DNA, 712 bp, Homo sapiens
tatacgtgctaaaattgtttttaactaaaaatgccatatgtagtgtagaaatgaaaactagacactatttcattcgcatccattgagataatagtggtgagcacttaggataagcaccaggcttgacttgctgctcttgtcacttgtccttggaaatttaggctctattacaccaccaactctcaaatcatttccctgttgtagagctaaacttgacgtcctacagaatttctctaacttaacatgttgagtctctgagagtgcaaaacttgaaacaagagaaagtggcctgcctggcatcctctgcttattgaatggttttatttaattctcctttacattgccaccttaacaatccttccagctacgtatcttaaaggatgtgatggagaagttatcaactggtgttttcagacctcagttggatgaacccattccactgtatgaggcaaaagtttccatggaagctgttcagaaaaatcaaggaagaaaaaagcaagttgttcaattttaattttcttctttctcagacctcagtcggatgaacatattccagtatttgaagccagaattttctttggaaattgttgagaaaaaccaaggaagataaaacaagttgcatttttaagcacgtttctctgctaagacaagatgctcagttgacacatttgaaaagtggtttgaaaaattcttgtgcaaatgatcaagataa

SEQ ID NO: 134347 - DNA, 559 bp, Homo sapiens
  misc_feature (1)...(559): n = a,t,c or g
agtgagattatatagtaaagatgatgaaccagctgtaaaactacaactactaccacataaacatgatatcatcacacttcttggtgttggaggccactgggtaacaacagaagaaaaccttcagttggatcctccagatagccactgccttttcctcaagggagcaacgttagctttcctgaatgatgaagtttggaatttgtcaaatgtacaacagggaaaatatctttnttaacaatccttccagctacgtatcttaaaggatgtgatggagaagttatcaactggtgttttcagacctcagtcggatgaacatattccagtatttgaagccagaattttctttggaaattgttgagaaaaaccaaggaagataaaacaagttgcatttttaagcacgtttctctgctaagacaagatgctcagttgacacatttgaaaagtgtttgaaaaaatccttgtgcaaatgatccagataattctataattaacatcttaagggaatttttctaaaaaccttttcattgtttctatatattttgcccctgctataaaattc

SEQ ID NO: 134348 - DNA, 1372 bp, Homo sapiens
  misc_feature (1)...(1372): n = a,t,c or g
atgccccgggcagccatcgcgcagacccccgcgccgacccccgcccccgctgcagccgcccgtggtccaggccgccgccttgcagccctctcctcacctcatctccgggcggcggaacatgacgggagatgtagttccgagaccggttgccatggcgttctggacagcctcgcgagtccgaccccgcccttcaggagtgacgagcggcctgaccaatgggagcagggggcgggctctctgacgaaggactggaaggtggcggtggtgaaggtgcaggccgttggggcggctcagaggcaggtgagccccgggaaacgcgtcctgtgtcttgggaaacgggcctttaagcgaaaggtggagagatgccccacagaaccgtgcagccctggggaggatggtggttcgcgtcgaaccctaacctgggacttgttcgggcccaggcctagcttagctgaggccgctgagggccacttctttcttcctcatcactttgctgttttcggaaagcagttagtagttattcgctgtatgtggcttttgagccagatcggccctcttcattatgctaaacggcggaatcatctggagcgagatgtgactatgaaaggcttatatttccaacagagttccacagatgaagaaataacatttgtatttcaagaaaaggaagatcttcctgttacagaggataactttgtgaaacttcaagttaaagcttgtgctctgagccagataaatacaaagcttctggcagaaatgaagatgaaaaaggatttatttcctgttgggagagaaattgctggaattgtattagatgttggaagcaaggtatcattctttcaaccagaagatgaagtagttggaattttgcccctggactctgaagaccctggactttgtgaagttgttagagtacatgagcattacttggcccgagtgattgatgtatctaatgggaaagttcatgttgctgaaagctgtttggaagaaacaggtggcctgggagtagatattgtcctagatgctggagtgagattatatagtaaagatgatgaaccagctgtaaaactacaactactaccacataaacatgatatcatcacacttcttggtgttggaggccactcgggtaacaacagaagaaaaccttcaggtgaagaaacagaagcacagagatgttgatacagactcaaggacgcagcaagtggcggagcaagaatcacactcaggcagtctctctcctttctgaacagagatgagccctaagatacctggaagattttgtttttaacctcacattaaggaaagcacacatcaccttgaaaggttgcacacttactcctactgatggtgccatntgcacacgaaaaca

SEQ ID NO: 134349 - DNA, 1696 bp, Homo sapiens
cccacgcgtccggaccaatgggagcagggggcgggctctctgacaaaggactggaaggtggcggtggtgaaggtgcaggccgttggggcggctcaaaggcaggtgactatgaaaggcttatatttccaacagagttccacagatgaagaaataacatttgtatttcaagaaaaggaagatcttcctgttacagaggataactttgtgaaacttcaagttaaagcttgtgctctgagccagataaatacaaagcttctggcagaaatgaagatgaaaaaggatttatttcctgttgggagagaaattgcctggaattgtattagatgttggaagcaaggtatcattctttcaacccagatgatgaagtagttggaattttgccccctggactcctgaaagacccctggacttttgtgaaagtttgttaagagtacatgagccgttacttgggttcataaacccagaaaaggtcacatgggacggaagcagcaggaagcatttcggggatgggagtgcgtgcctattacagcttcttgcatttatctttcttcatcttctctcctgggggaaatcagtgctgataatgggtgggagccaagtgcatttggtacaatagctattcagttagcacatcatagaggagccaaagtgatttcaacagcatgcagccttgaagataagcagtgccttgaaagattcagacctcccatagcccgagtgattgatgtatctaatgggaaagttcatgttgctgaaagctgtttggaagaaacaggtggcctgggagtagatattgtcctagatgctggagtgagattatatagtaaagatgatgaaccagctgtaaaactacaactactaccacataaacatgatatcatcacacttcttgggtgttggaggccactgggtaacaacagaagaaaaccttcagttggatcctccagatagccactgccttttccctcaagggagcaacgttagctttcctgaatgatgaagtttggaatttgtcaaatgtacaacagggaaaatatctttgtatcttaaaggatgtgatggagaagttatcaactggtgttttcagacctcagttggatgaacccattccactgtatgaggcaaaagtttccatggaagctgttccagaaaaatcaaggaagaaaaaaaccaagttggttccaattttaattttccttcctttcctcagacctcagtcggatgaacatattcccagtatttgaagcccagaattttctttggaaattgttgagaaaaaccaaggaagataaaacaagttgcatttttaagcacgtttcccctgctaagacaagatgcctcagttgacacatttgaaaagtgtttgaaaaattccttgtgcaaatgatcaagataattctataattaacatcttaagggaatttttctaaaaaccttttcattgtttctatatattttgcccctgctataaaattccttccatgaagaaaactgcctctttcagcaaaagtcacactactcttgataaaagctgttgcaggcctttgctaagctatcaaagtaacgtattaattttgtattcaactcccgttctcaacaccttcattaagtctttgctgtcataatttaagcatttgagtatattttgaagtcttaaaagacttagcccataggcccttaaaaaaaaaaaaaaaaa

SEQ ID NO: 134350 - DNA, 506 bp, Homo sapiens
ttttttttaaattcagtttttttaatggatgctgaagcattaagagacaatcccaagggcaagcactggatagggatattatctgctttgtagatatttgtacaaaagactgttaagactacatggccagttcccactgcaggaaacagaatgattttcttttttttttattattattccctgccaatagcattttccatctaacacatttaaattctcacagcataattgcaaacatgtacatattggttcccacgagaaatctgcaggtgacatttcgggatgtttggagtcaatcagataaagcacattatgacagaaaccataagaggggagctgggacctgggactgtgcagaatgaaaagccacggctacgggaagcataagcttgtgctgcaacggcatgtgcacatgacctgaaagaaaccgctactgagggaaagactaagacttcaaaagaatttgcttttcccgccaactcggcactgtgaagcctgcctttcaa

SEQ ID NO: 134351 - DNA, 5344 bp, Homo sapiens
  misc_feature (1)...(5344): n = a,t,c or g
atgaaagaggaggagttaaccaggcagattgttttggtacaggaagcagggaagggagtggtgaggacaaaggatggagcatgtgcagaggtctggcaggcactggaggagctagaaaaaggcctgtgtgccggcattgtgagagtggaggggatggctgcagctcctccaagttactgttttgttgccttccctccacgtgctaaggatggtctggtggtatttgggaaaaattcagcccggcccagagatgaagtgcaagaggttgtgtatttctcggctgctgatcacgaaccggagagcaaggttgagtgcacttacatttcaatcgaccaagttccaaggacctatgccataatgataagcagacccgcctggctctggggagcagaaatgggagccaatgaacatgggagtgtgcatagccaatgaagccatcaacaccagagagccagctgccgagatagaagccttgctggggatggatctggtcaggctttggtttagaaagaggggaaacagctaaagaagccttagatgtcattgtctccttgttggaagaacatggacaaggtgggaattactttgaagatgcaaactcctgccacagcttccaaagtgcatatctgattgtggatcgtgatgaagcctgggtgctcgagaccatagggaagtactgggctgccgagaaagtcacagagggagtgaggtgcatttgcagtcagctttcgctcaccactaagatggatgcagagcatccggaactcaggagttacgctcagagccaaggttggtggacgggagagggcgagttcaatttttccgaagtcttttctccagttgaggatcatctagactgcggtgctggcaaagacagcttagaaaaacaagaagaaagcatcacagtgcagactatgatgaacaccttacgggacaaagccagcggagtgtgcatagactctgagtttttcctcaccacagccagtggagtgtctgtcctgccgcagaatagaagctctccgtgcattcactacttcactggaacccctgatccttccaggtccatattcaagcctttcatctttgttgatgacgtaaaacttgtccccaaaacacagtctccctgttttggggatgacgaccctgccaaaaaggagcctcggttccaggagaaaccagaccgccggcatgagctgtacaaagcccacgagtgggcacgtgccatcatcgaaagtgaccaggagcaaggtcgcaagctgaggagcaccatgctggagctggagaagcaaggcctgtaagccatggaagaaatcctgaccagctccgagccactggaccctgcggaagtgggggaccttttctatgactgtgttgacacggagattaagttctttaagtgaagtaagcgttccctttccccttcttatttaagacttcccaccttactaaattaccagcaaaacaaaccactctcctgtttgagtaaaatgagaaagttaatatgtggcctccttttctgaagccagatcaaactgttacccttgtgttccaccttggaatctcacaagcgtccccttctgcaaatgtaggtctccttcctgtgcagtgtaacatggtatcccgttgcctgttgttcggttgtgtgactaattgtggattttaagctgctattattgtatttcagtggcaatggacacattagccttttacaagaggactagagttcatcaagccttgaaaggcaggcttcacagtgccgagttggcgggaaaagcaaattcttttgaagtcttagtctttccctcagtagcggtttctttcaggttaacaagaggcatttgtgcacacacacagggctcttgtgtgtgttgtcaaggggaccctccgtggcctcccgtgagtgcatgcctgtagtgcacagtgtctctacaggtgtcttctggggggcagaaccaattggaaggaagaaagggacccctctccagtcctggctccttcctacatcctgggctcctgaagaagctgtcttcccattttccatgcgctgtgcttatgtgtggtggactgcagagctgcttccacttacaggagagctgataatttgttagctggaacctattcacttccgagattcagacatagccatgctggtggccttctgaatcactgcatggatgtcccaggaggcagctctccccacacagcagcacagccatcacaggattccttgtgtagaaatgattcccagtctagttaccaacagctagtctaggagtaattgaatggccctatggcacagttccacccacagagtagtgaatctctcagccaaggagggaaagaaaaggaagaactcttgactatttagattctagttaaatatctggaatcttagcagtcactacattatctcagcagagagactttaattaaactgatttgttttccaatgtcgggttcacttaaaggatttgacttaccaccagagcatagaaaagcatgcaaggaagaccagatgggcttagcattgggaagacagagggcaaggaggtgatagatggatatagaagcatttctctgcaggataccagttcaggccccaccattcctgccaaggccattacatcccacaaacccaaatacaaagcagctgacttccctggatcttccccccactcctcacacctcacatgtcccaggagctgccttcattcaggcgggtagctgcactgggcatggggtggtggtgggagcttaccgccacctattcaagctctcagctactcctgaaacgggcagagatgatgaacagaagtgtatgtaaatacagcagctagtgggagagcaccagttgggcctaatcctgcctcatcattcttggcaggaatctgcaaatggaaacattgtgagtatcagcaatctgggaagtgacagggttaataactccttcccagaagctgtatcatgagattttgaggggaccgagccctgttacatggatgtgaacagtgaggatcagaggttttatcagaacacattctttttttctaccaactctccagagcgtgagtataggagtgccatgagctttttagtcagcagttttgtaaactctgtatataaaatcattaaccacacattgtgggtgatgggaagacgatttcagctgacagagttaatggcaacccaataatggtggcctgtagctgctaagagcttcacgcaggtttggcctgggctttcactgttggtgaatttagagtgtccttttaggtggggcggctattctaaaagtgtctttctatcactgttaagggggggggaaagtgaggttcgaggatgacgtaggtaactctcccctcccaagtccatgttccaagtggctatgtaaagcaagatgatacagaaagctgctctaaaatctcactgagtgatttcaccttcgcctactatgaaatgtctcatcagacctgacatgtctgagataaccaaggtgattcaggatttgatcaaaagaagtctagtaagaattaattacacagaagcctcctttcatttctatgggccaaacaaaggccatggataaccctacccgctttatgtcattacccattgggaaacacaatggctacttctgttagggtacattgaccttggtcaagcatcttaaagaaggcaaccctaattgagagctgtcttggctaatactctgcaccacaattgtgatgtcctagtcctaccactagagggcatggtanagccctggcaaaagttaaaaggggtgtggcagctcccatccaggtcatggaggtggtctataagcacagttgacagttgtgcattgggatgggtggagaaagacgacaagagagcagagaatctgcctggatgtggctgcccctttacttttagtgactttatgtacttatattaacagctggaaataggttgttgggttttgagcaggctgttatagtgaggaatgttcatttttaaatgttcctaacagattttgcttttgaaaaatgcttgttacatgaataatttgtggaccagggattgcttttctgaaggcagtatagggaacatgaatattcaagatgaaatacaaaaattatgtttaagggtcatagtgtataagtgggcttccctagggaaacccctttgtgtatcttttccagactggggtgggggctgagcatgcttgtgcagaaagaagccatagccagaaagggacagaattctctcccccacttcccttgccccataacccaaacataagctagctagtcttgtcctaatagatgggatttactataggtgaagatagccctcatattcaacggaccagaagctctggcacggagtaaatttagcaaagcagaaatagtaccctttcattcttggaggtgctttgaaattttaggtagaatataatcgaaattatggaggttccttagtgctcaataatataagacctgttgttattagaacgagtctttcttataaactaacagagcaggtatatgcctgttagatcttaagctgtggggttccttttactattggggtgaatcattaggtataaaaaataatcatcaaccagggcaaattactttgcttcctagctggatgtcatcccacattggtacaggtgttattcagtactgggtggttcagcaggggaagccagggtgggaccagtgtgtctgtcatggaaaccacttaactggcattcctgacttgaaggagccatctgtccatttattggggggaaggtctttcagttggagctctcagcccttaggtaaggggaaggcacttggaggagggacggaggaggtttcccttgctgggcatgcttcgtagaagggccaggagccagcaggtcatgtgcaacaatgcccgttgcaagcaccaaagctttattgcattccccggttagccggtggcttttcattctggcacagtcccaaggccccagctccccctcttatggtttctgtcataatgtgcctttatctgatttgactcccaaacatcccgaaatgtcacctgcagatttcttcgtggggaaccaatatgtacatgtttgcaaattatgctgtgagaatttaaaatggtgttagatggaaaatgctatttggcagggaataataataaaaaaaaaaagaaaatcattctgtttcctgcagtgggaactggccatgtagtcttaacagtcttttgtacaaatataaacaaagaagaataatatccctatccagtgcttgcccttggaattgtctctaaatgcatcaagcatacaataaaaaaaactgaaattaaaaaaaaaaaaaaaaaa

SEQ ID NO: 134352 - DNA, 356 bp, Homo sapiens
  misc_feature (1)...(356): n = a,t,c or g
cagacacctaaaattgtggcagataaagattattctgtgaccgccaattcttaagattgtagtggtaactgcaggagtccgtcagcaagaaggggagagtcggctcaatctggtgcagagaaatgttaatgtcttcaaattcattattcctcagatcgtcaagtacagtcctgattgcatcataattgtggtttccaacccagtggacattcttacgtatgttacctggaaactagatttcgctaccttatggctgaaaaacttggcattcatcccagcagctgccatggatggattttnggggcacatggcgactcaagtgtggctgtgtggagtggtgtgaatttggcaggtgt

SEQ ID NO: 134353 - DNA, 484 bp, Homo sapiens; identical to SEQ ID NO: 133052

SEQ ID NO: 134354 - DNA, 1272 bp, Homo sapiens
gccggaggagacgcacgcagctgactttgtcttctccgcacgactgttacagaggtctccagagccttctctctcctgtgcaaaatggcaactcttaaggaaaaactcattgcaccagttgcggaagaagaggcaacagttccaaacaataagatcactgtagtgggtgttggacaagttggtatggcgtgtgctatcagcattctgggaaagtctctggctgatgaacttgctcttgtggatgttttggaagataagcttaaaggagaaatgatggatctgcagcatgggagcttatttcttcagacacctaaaattgtggcagataaagattattctgtgaccgccaattctaagattgtagtggtaactgcaggagtccgtcagcaagaaggggagagtcggctcaatctggtgcagagaaatgttaatgtcttcaaattcattattcctcagatcgtcaagtacagtcctgattgcatcataattgtggtttccaacccagtggacattcttacgtatgttacctggaaactaagtggattacccaaacaccgcgtgattggaagtggatgtaatctggattctgctagatttcgctaccttatggctgaaaaacttggcattcatcccagcagctgccatggatggattttgggggaacatggcgactcaagtgtggctgtgtggagtggtgtgaatgtggcaggtgtttctctccaggaattgaatccagaaatgggaactgacaatgatagtgaaaattggaaggaagtgcataagatggtggttgaaagtgcctatgaagtcatcaagctaaaaggatataccaactgggctattggattaagtgtggctgatcttattgaatccatgttgaaaaatctatccaggattcatcccgtgtcaacaatggtaaaggggatgtatggcattgagaatgaagtcttcctgagccttccatgtatcctcaatgcccggggattaaccagcgttatcaaccagaagctaaaggatgatgaggttgctcagctcaagaaaagtgcagataccctgtgggacatccagaaggacctaaaagacctgtgactagtgagctctaggctgtagaaatttaaaaactacaatgtgattaactcgagcctttagttttcatccatgtacatggatcacagtttgctttgatcttcttcaatatgtgaatttgggctcacagaatcaaagcctatgcttggtagctcttgaacaaataaaattaactattgtagtgtg

SEQ ID NO: 134355 - DNA, 867 bp, Homo sapiens; identical to SEQ ID NO: 133339

SEQ ID NO: 134356 - DNA, 529 bp, Homo sapiens
ctagtagcatgaaatcttatgtgcttcccacagaattcctggtggaaggaggaattcttcctcctctttctcgtctttctgggcaggtattgtgaggacggtatctgccctgtcagtatctacccaaacaatccagagcaaggacaagtagggcctggttttagctgcaaatgcacaaagtctctccgctgagccgcagctgctaccctctgccttctgctcctccgccagggcacggcccccgctgcgccccaaactgagcggcaaagtcagggcccgcggccggatgctcagagctaaaggccgcggaggacagatgtgcttcttcctccttcccgcgtctccccatacaagtaataccccgcacgtcccatcaggcttgtctgtgggccaggattcagggtcctgagccgaaacctaccaggagagacaaggctctggagccctctgtatcagtcgtaaaaagaaaacaaagtcagctgcgtgcgtctccacgaaatcgtcggcccgggtttcccgaaccgaatca

SEQ ID NO: 134357 - DNA, 1353 bp, Homo sapiens
atggagaaacctaagaggctgcggtggttgtggggccccgccccctcctccctccttgcagagccggcgccggaggagacgcacgcagctgactttgtcttctccgcacgactgttacagaggtctccagagccttctctctcctgggggggccgtgccctggcggaggagcagaaggcagagggtagcagctgcggctcagcggagagacttgttgcatttgcagctaaaaccaggccctacttgtccttgtgcaaaatggcaactcttaaggaaaaactcattgcaccagttgcggaagaagaggcaacagttccaaacaataagatcactgtagtgggtgttggacaagttggtatggcgtgtgctatcagcattctgggaaagagcagagcaatggagcacacaactgcaggggcaccatacacaccaaggcagcagacctgccagtgcaacatgatgtctctggctgatgaacttgctcttgtggatgttttggaagataagcttaaaggagaaatgatggatctgcagcatgggagcttatttcttcagacacctaaaattgtggcagataaagattattctgtgactgccaattctaagattgtagtggtaactgcaggagtccgtcagcaagaaggggagagtcggctcaatctggtgcagagaaatgttaatgtcttcaaattcattattcctcagatcgtcaagtacagtcctgattgcatcataaattgtggtttccaacccaagggacatttttaacgtatggtacctggaaactaagtggattacccaaacaccgcgtgattggaagtggatgtaatctggattctgctagatttcgctaccttatggctgaaaaacttggcattcatcccagcagctgccatggatggattttgggggaacatggcgactcaagtgtggctgtgtggagtggtgtgaatgtggcaggtgtttctctccaggaattgaatccagaaatgggaactgacaatgatagtgaaaattggaaggaagtgcataagatggtggttgaaagtgccctatgaagtccatccaagcctaaaagggatatacccacctgggctattggattaagtgtggctggatcttaaatgaatccatgttgaaaaatctatccagggattcatcccgtgtcaacaatggtaaaggggatgtatggcattgagaatgaagtcttcctgagccttccatggtatcttcaaatgccgggggattaaccagcgttatcaaccccagaagtaaaggatgatgaggttgctcagctcaagaaaagtgcagataccctgtgggacatcccagaaggacctaaaagacctgtga

SEQ ID NO: 134358 - DNA, 1723 bp, Homo sapiens
ttttttttttttttttttcacactaccaatagttaattttattttgttcaagagcttcagatttgcaagccattaaaacccaagcataggcttttgaattctgtgagcccaaattcacaatatttgaagaagatcaaaggcaaacttgtgatccatgtaccatgggatcgaaaacttaaaggctcggagttaatcacattagtaatttttaaatttactacagactagagctcactagtcacaggtcttttaggccctttctggattgtcccacagggtatctgcacttttcttgaagctgagcaaccctcatcatccttttagctttctggttgataaccgctggtttaatccccggggcattgagggatacatgggaagggctcagggaaggactttcattctccaatggccatacatcccctgcctttaccattggttggacaaccgggatggaatcctgggataagattttttcaacatgggattccaataagattcagccagcacttaaatccaaatagccccagttgggtatatccttttaagcctgatgacttcatagggcacttttcaacccaccatccttatgcacttccttccaaattttcaacttatcatttgtcagttccccatttctggatttcaaattccctggagagaaacacctgccacattcacaccacttccacacagcaacacttggagtcggccatgttccccccaaaattccatccatgggcagctgcctggggatgaaaggcccaagtttttcaagcccataagggtagcggaaatctagcaggaatccacgattacatccaacttccaatcacggcggtgtttgggtaatcccacttagtttccccaggtaacatacggtaagaatgtccaactgggtgggaaaccaccaattatgatgcaaatcagggactgtacttggacgatcttgaggaataatggaatttggaagaccattaaccatttctctggcacccagatttgagccggattctcccccttcttggctggacgggactccctgccagttaccaacttacaaatctttaggaattggcgggtcacagaaataaatcttttatctgcccacaatttttaggtgtctgaaagaaaataagctccccatgctggaaggaaccatcattccctcctttaagcttatcttcccaaaacatcccacaagagcaaagttcatcaggccaggagactttccccagaatgctgatagcacactgccataccaacttgtccaacacccactacaggtgatcttattgtttggaactgttcgcctcgctcttccgcaactggtgcaatgagtttttccttaagagttgccattttgcacaggagagagaaggctctggagacctctgtaaccattggtcggaaaaagccaaagtcagctgcgtgcgtcattttccgcagatttccaggggccccactgatcccttatccactcatcactaaggaggatataaatgctatagaaatggaagaagacaaaagagacctgatatctcgagagatcagcatattcagagacacacataataaactggaagaagagaaaggcctaaaggacaaagaaagacaggaaattgagaaagaacggagagaaagagagagggagcgtgaaagggaacgagataggcgagaacgggaacgagaaagggaaagagaacgtgaacgagaaaaggag

SEQ ID NO: 134359 - DNA, 404 bp, Homo sapiens
acttgcagttctttaaagaatgctgctttttattctcctaaccctttcaagtgggtgcagacttctcgttagcagctggaagacattcctcccacacttttccctttctggttgtcacagagtttcattgagtccagctgcagccacgtggccatctggagctggtgctataggtgaccatctggtacattgaggggacctgtttgcctcctccactctataagcagtcatcttgggagaccgggaggagaaggtggtgggctagtcctgtgtcctcctccacttcccatgcctctatgttacccatctgtgtctcctgtgcagaaggagaggaaggggcattaagagatgaagggtgattatgtattacttatccatttctgaataaacatttgttattccta

SEQ ID NO: 134360 - DNA, 456 bp, Homo sapiens
caccaagatgactgtgaataatctgcaccctcgagtcactgaggaggacattgttggcagccgatgaagtgcaaccttcacatgaatgggaatgttatcacctcagaccagcccatcctgctgcggctgagtgacagcccatcaatgaaaaaggagagcgagctgcctcgcagggtgaactctgcctcctcctccaacccccctgccgaagtggaccctgacaccatcctgaaggcactcttcaagtcctcaggggcctctgtgaccacgcagcccacagaattcaaaatcaagctttgagcaggggagtgaggcagccagaagtgggggcagaggagggtggctctgtttccccaaggcaaagcttatgaccaatgggccatcggactggagacccctgattgtgggaagggttgccggggataaagagcttcctcactggaaaaaaaaaaaaaa

SEQ ID NO: 134361 - DNA, 499 bp, Homo sapiens
  misc_feature (1)...(499): n = a,t,c or g
gaccnacatgtcccggacactggtgaacaaggaagaaccccccaaagagctgccagctgctgagcctgttctcagcccattggaaggcaccaagatgactgtgaataatctgcaccctcgagtcactgaggaggacattgttgagcttttctgtgtgtgtggggccctcaagcgagctcgactggtccatcctggggtagcggaggtggtgtttgtgaaaaaggacgatgccatcaccgcatataagaagtacaacaaccggtgtctggacgggcagccgatgaagtgcaaccttcacatgaatgggaatgttatcacctcagaccagcccatcctgctgcggctgagtgacagcccatcaatgaaaaaggagagcgagctgcctcgcagggtggctctgtttccccaaggcaaagcttatgaccaatgggccatcggactggagacccctgattgtgggaagggttgccagggataaagagcttcctcactggaaaaa

SEQ ID NO: 134362 - DNA, 423 bp, Homo sapiens
acgccaagcttggcacgaggatctcatcgccaaggtaggcttgtgtttttcagtgtgtgcctccccgagcctcagccccaagctgatttcttatctggaaatggtacactgaattctctgggtggctttcttgtggccccatgggatgcagcgtgggggctgtctgaaggaccctgctttttccaggggccgaggggctgcctttcctttgtgtgtattaagcttttccttgagttgtgctgaatgccccaccccagctctctttcccttctgggtgtctttgctgggagggggctgtgttgtgagccctcccggttctcacctcgcctgggcacttaaccacacccgggttttgtgtagccgccagctctcttctggttggggcctttgaaaggctcagccctccattgtgcagggcttggg

SEQ ID NO: 134363 - DNA, 885 bp, Homo sapiens
ggcacaggcagaaagatgcccgatttcgaatcaaagggaaagtgcaggatgccagagagatgttgaactctcgcaagcagcagaccacggtgccccagaagccccgccaggttgctgatgcccgggagaagatcagcttgaagaggagttcccctgctgccttcataaacccacccattgggacagtgacccctgctctgaagctcaccaaaaccatccaggttccacagcagaaagccatggcaccacttcatccccatcctgccggaatgagaatcaatgttgtcaataaccaccaggccaaacagaatttatatggacctggatgaagatgatgatggtatagcttccgtttcctactaaacagatgaagtttgcagcctcaggcggctttcttccaccacatgggctgggctaagcagttccaagctttccatgtccaaggccctccctctcaccaaagtggttcagaatgatgcatacacagctcctgctctcccttcctctattcgaacaaaagccttgaccaacatgtcccggacactggtgaacaaggaagaaccccccaaagagctgccagctgctgagcctgttctcagcccattggaaggcaccaagatgactgtgaataatctgcaccctcgagtcactgaggaggacattgttgagcttttctgtgtgtgtggggccctcaagcgagctcgactggtccatcctggggtagcggaggtgggctagtcctgtgtcctcctccacttcccatgcctctatgttacccatctgtgtctcctgtgcagaaggagaggaaggggcattaagagatgaagggtgattatgtattacttatccatttctgaataaacatttgttattcctaaaaaaaaa

SEQ ID NO: 134364 - DNA, 3906 bp, Homo sapiens
  misc_feature (1)...(3906): n = a,t,c or g
atggaaattgccagtttcgtgggtcccaacgtcaatactgtgggcaaccttagaccggctcaaagcgcagctggggacggtgatgaagtgcagagcgtccacagccagcgacaagactgccaagcaactggcagcctgagtaacggagaaaacaacgaaaaaaacgcattcaccacctaccaacaagaaacaaaaaacacgaccaccccacagtcagtctactttttaggcgtgaataagatgagcagccagcaccgcgaaggctcacggggaacgtccccgccccttccggttcttgcctgctttgagctggctgtcgcgagagttggtccgcggacgccggaagtagttcgtcgctccctagcggccgaaggggcgggctcgcggggtctcgactgctttcggcttgctcggcggatcaagatggcggacatctccctggacgaactcatcaggaagcgcggggcggtcggcgaaaggacggcttaatgccagaccgggagttggaggtgtccgatctcgagttgggatccagcaaggccttctcagccagtcaacacgcacagccaccttccagcagagatttgatgcccggcagaagattggcctctcagatgcccggctcaaactgggagtcaaggatgcccgggagaagcttttgcagaaagatgcccgatttcgaatcaaagggaaagtgcaggatgccaggagagatgtttgaacttttcgcaagcagcagaccaccggtgccccagaagccccgccaggtttgctgattgcccgggagaggattcagcttggaagagggaggtcccctgctgccttcttaaacccacccattgggacagggacccctgctctgaagctcaccaccaccatccagagaatgcatgtggaccctgtggggtggattctgaccactgagtgtttccaggttccacagcagaaagccatggcaccacttcatccccatcctgccggaatgagaatcaatgttgtcaataaccaccaggccaaacagaatttatatgacctggatgaagatgatgatggtatagcttccgttcctactaaacagatgaagtttgcagcctcaggcggctttctccaccacatggctgggctaagcagttccaagctttccatgtcccaaggccctccctctcaccaaagtggttcagaatgatgcatacacagctcctgctctcccttcctctattcgaacaaaagccttgaccaacatgtcccggacactggtgaacaaggaagaaccccccaaagagctgccagctgctgagcctgttctaagcccattggaaggcaacaagatgactgtggaataatctgcaccctcgagtcactgaggaggacattgttggaggttttctgtgtgtgtgggggccttcaaggcgagctcgactggttccttctgggggttagccgaaggttgtgttttgtgaaaaaagggacgatgccatcaccgcatataagaagtacaacaaccggtgtctggacgggcagccgatgaagtgcaaccttcaacatgaatgggaatgttatcacctcagaccagcccatcctgctgcggctgagtgacagccccatcaatgaaaaaggagagcgagctgcctcgcagggtgaactctgcctcctcctccaacccccctgctgaagtggaccctgacaccatcctgaaggcactcttcaagtcctcaggggcctctgtgaccacgcagcccacagaattcaaaatcaagctttgagcaggggagtgaggcagccagaagtgggggcagaggagggtggctctgtttccccaaggcaaagcttatgaccaatgggccatcggactggagacccctgattgtgggaagggttgccagggataaagagcttcctcactggatgggacccgcctttctgtgttgtgttctgccctgtgctcttctctctacgttaacgtttcctgtagtatgtttcttcatctcatcgccaaggtaggcttgtgtttttcagtgtgtgcctccccgagcctcagccccaagctgatttcttatctggaaatggtacactgaattctgtgggtggctttcttgtggccccatgggatgcagcgtgggggctgtctgaaggaccctgctttttccaggggccgaggggctgcctttcctttgtgtgtattaaagcttttcaaacaatgggaggggatggagagccctgggtgtcctgacgggagccagggtcggcctgagagctgtgcccgctcctctgtcttgttcagtggaggtgcctgggtggggagcaggtctcaggcctcttgtcctctccccagtggctccaggcctcactagtggcaagggcaggatgaggctgcaccgctgggaagaagtctatctaagttcttggcttggagtcccgtgtcgtctccgcccagaggaagttctccagagttcacctttcccttttccttgagttgtgctgaatgccccaccccagctctctttcccttctgggtgtctttgctgggagggggctgtgttgtgagccctcccggttctcacctcgcctggcacttaaccacaccctggttttgtgtaagccgccaagctctcttctggttggggcntttgaaaggctcaagcctcccattgtgcaagtgcttgggtttggaagcttatttgaatggaagaaggtcaagtttgttcctgggctctccaatttctggcctcagttgtctacaggaacaagtggtcagggatgcctggaggcatatatccagctgccaccaaggggcactgtttgttcccacttatgtgagtgaccccatccatccatgaccagaggattattttcctgccttggcagaggaggaggagtcaagggagcagggcagctctaccgggcaaggtgtttccccagcataggcgcagacagttgggacgaaacttcagagcccaggcagtccctgaatgaccaggccagtgttgtcactgagtggtcccctgctggttgggagtgaagagaatccaggctggcagagctggagccagttggggagcacggttctgggagctctgcaaaatcagtagcaagtgcctggaaaaggcacatgccgaagatactcaagagctcccaagattttgcttgaggctagcccagtgaagaaaaaccagagactcatgttttccaggggtcaatcttgtcaggcaggaagggcccagggttttgaacccagcttcagtgtgcaggctctgaggctgcccaggacgggaaagtccaaggaaggggcctggtggtgctccacttgcagttctttaaagaatgctgctttttattctcctaaccctttcaagtgggtgcagacttctcgttagcagctggaagacattcctcccacacttttcccttcctggcccaagagagcatccagaaggcagtaggacctggtttttccaggtacctgggacccgggggctcactgcttgcactgtgccttagggtagggatggtaaatatcctcccctgcaatggctttatcctccctctgtcatccccaaagcagggtatcttctggttgtcacagaagtttcattgagtccaagctgcagccacgtggccatctgggagctggtgctataggtgaccatctggtacattgaggggacctgtttgcctcctccactctataagcagtcatcttggggagaccgggaggagaaaggtgggtggggctagtccctgtgtcctcctccacgttcccgatgcctcctgatgttacccgatcgatgtgtcctccatgtgcaagaagcgagagaagggggcattaagagatgaaagggtgattatgtattacttatccgatttctgaataaacgatttgttattcctaaaaaaaaaaaaaaaaaa

SEQ ID NO: 134365 - DNA, 918 bp, Homo sapiens
atgggtagcagcgaccacccagtctcagaccgtgcttctctacagtctcagcagcaaagtaaagctcaacaatgctttcaagaatggtattgtaagaattgtagaattcgagaaacccagtctgatactttgcagaattgcgtttcctatttacggatttcactgcctaccccacaccattgtgtccaagatcacactgttggtcacatcagacaagcaatgaaggcaagtcagaaggtgatacaccaaaaaaaggcagagatgagactctggccccagaaaaacaaggaaacggaggcagataaagagctcagagatgggaaaatcacagacaaatttggggcacttgacatgactccaaagagttatcatgtacctcttgcatcatacccagtactctatgatatccatgttgaatccattttagttcatgttgccaaagtggcttccatggacaagtaccagtccactcagcaaaccgttacagactacaatgagtcagatacagagttttgggataagatgcaagcagaatgggaagaaatggctcggaggaactggatatctgagaaccaagaagcccagaaccaagtaaccatctcggctagtgagaagggatattactttcacactgaaaaccccttcaaggactggcctggagcatttgaagaaggcttaaaaaggctgaaggaaggggatctgccagtcaccatcctgttcatggaagcagcaattcttcaggaccctggagatgcagagaattctgaaggtggactctatgtatgcatgaatacatttttggcctttggaagggaacatgttgaaagacattttcgaaaaactggacagagtgtatacatgcacctgaaaagacatgtgcgagaggtgagagcggcactttcagagaactggccttga

SEQ ID NO: 134366 - DNA, 3239 bp, Homo sapiens
atctagatactgatgacgatttaaatagcgacgattatgaatatgaagatgaagccaaacttgttatattcccagatcactatgaaatagcactaccaaatattgaggagttaccagccctggtcagtgagtgtgcacggctgctagctagatgcgcatggctctgtgtcagcttaaaactctcaacgctactgaccgatgacactgggctactcacagtcaggaacaaggaagaagtcctggccagaagtgctaaggtaacaattgcttgtgatgcagttctcagctcaaaatctccatacagaaagcaggacccagacacgtgggaaaatgaattgccagtatctaaatatgccaacaacctcacccagctggacaatggagtcaggattcctccaagtggttggaagtgtgccagatgcgacctgcgagaaaacctctggttgaatctgactgacggctctgtcctgtgtggaaagtggttctttgacagctctgggggcaacgggcatgcgctggagcattacagagacatgggcctacccactagccgtgaaactgggaaccatcactcctgacggggcagatgtttattcttttcaagaagaagaaccctgttttggatcctcatttggccaagcacttagcgcatttttggaattgatatagcttcatatgcatgggacagagaatgggctccaaggacaaatgacatcaagctgagggtcagtgagtgggaagtgatccaggagtcgggcacgaaactgaagccaatgtatggtcctggctacacgggtctgaagaacctgggcaacagctgctatctcagctctgtcatgcaggccatcttcagcatcccagaattccagagagcgtatgtaggaaaccttcccagaatatttgactactcgcctttagatccaacacaagatttcaacacacagatgactaagttaggacatggccttctctcaggccagtattcaaagcctccggtgaaatctgaactcattgaacaggtgatgaaggaggagcacaaggtatgtgtccgagcgtttgccatgttgacatgtagcctttctagcagctgcagccagccacagcagaacgggatctctccgcgcatgtttaaggcctttgtaagcaagagccacccggaattctcctctaacaggcagcaagatgcccaggaattcttcttgcacctggtgaatctagtagagaggaaccgcatcggctcagaaaacccaagcgatgtttttcgttttttggtggaagaacgcattcagtgctgtcagacccggaaagtccgctacacggagagggtggattacctgatgcagttacctgtggccatggaggcggcaaccaacaaggtcgcaaaggggagcatgcaaaaagatgtaaatggcttgataccacctgttggtgcaactctaaagacagccccagaacagcctttcagcaggggcatctggctctgtaaagggcgacaaataagcaactctggcccagcgcagaagccttcagggaagactgtccaaagagggtgcttttcatttccacagggtaagagcgattgcaaggtctttgatttgctctttcacccagatgaactgatcgcttatgaactaacgagaagggaagcagaagcaaacagaagaccccttcctgagttggtacgtgccaagataccatttagtgcctgccttcaggccttctctgaaccagaaaatgttgatgatttctggagcagtgccctacaagcaaagtctgcgggtgtgaaaacatctcgctttgcttcattccctgaatacttggtagtgcagataaagaagttcacttttggtcttgactgggttcccaaaaaatttgatgtttctattgatatgccagacctacttgatatcaaccatctccgagccagggggttacagccaggagaggaagaacttccagacatcagcccccccatagtcattcctgatgactcaaaaggaagggcaaagcaggtgacattttatagaggatcaaacttcctagatctaggaagttttggagaccgaagacctgggaccagaactagggctaggagttaccttgcttctcatgccactagactatcctggcatgtgagaggtttgctggttgcgcctgatgctgtggagagctggcctgcaggatctcactccatgggaagtgatgggcatttggaattaactgtgccagaggagcctgcctctgacgcatcagacatcgatgagtcatcagtgatgcagctggccgagatgggtttcccgctggaagcatgtcgcaaggctgtgtacttcactggaaatatgggcgccgaggtggccttcaactggatcattgttcacatggaagagccagattttgctgagccgctgaccatgcctggttatggaggggcagcttctgctggagcctctgtttttggtgcttctggactggataaccaacctccagaggaaatcgtagctatcatcacctccatgggatttcagcgaaatcaggctattcaggcactacgagcaacgaataataacctggaaagagcactggattggatctttagccaccctgagtttgaagaagacagtgattttgtgattgagatggagaataatgccaatgcaaacattatttctgaggccaagcccgaaggacctagagtcaaggatggatctggaaggaggtattctgatgaggaagtggtgacaaagctaagtggtttgctagtggtagaaccaggagcccaactggctttgcctagtggatcctgtgccagggccgtgggtggagctgcccgccagttccgcgccacgcgcctgcactcctcagcccttgggcggtcgatgggactgggcactgcggagcagggggcggtgcccctcggggaggcttgggccatgcaggagcccaccacgaactcagtgctggctcgcgagcattgtgcgcagccccggttcctgcctgcgcctctccctccacctgcgcctctccctccacaccttgcaagcagagggagctggctccactctcagccagcccagagaggggctcccacagtgcagcggtgggctgaagggctcctcaagcgtggccagagcagatgtcacggtcgaggaggtgctgagagcgagcaagggctgccagcacgttgtcacctctcaccaccaggtcccacctccaacattgggggtcacatttcaacatga

SEQ ID NO: 134367 - DNA, 2770 bp, Homo sapiens
cgcggaattccgcggaattccgcgccgccgccgccggcagaccccgcgctccggctccggctcggctcgctcggctccggtgcgcgccgaggccatgcagcgccggggcgccctgttcggcatgccgggcggcagcggaggcaggaagatggctgcaggagacatcggcgagctgctagtgccccacatgcccacgatccgcgtgcccaggtccggcgacagggtctacaagaacgagtgcgccttctcctacgactctcccaattctgaaggtggactctatgtatgcatgaatacatttttggcctttggaagggaacatgttgaaagacattttcgaaaaactggacagagtgtatacatgcacctgaaaagacatgcgcgagagaaggtaagaggggcgtctggtggagcgttaccaaaaaggaggaattccaagatttttttagatctagatactgatgacgatttaaatagcgacgattatgaatatgaagattatagcctttcttgttatattcccagatcactatgaaatagcactaccaaatattgaggagttaccagccctggtaacaattgcttgtgatgcagttctcagctcaaaatctccatacagaaagcaggacccacacacgtgggaaaatgaattgccagtatctaaatatgccaacaacctcacccagctggacaatggagtcaggattcctccaagtggttggaagagtgccagatgcgacctgcgagaaaacctctggttgaatctgactgacggctctgtcctgtgtggaaagtggttctttgacagctctgggggcaacgggcatgcgctggagcattacagagacatgggctacccactagccgtgaaactgggaaccatcactcctgacggggcagatgtttattcttttcaagaagaagaacctgttttggatcctcatttggccaagcacttagcgcattttggaattgatatgcttcatatgcatgggacagagaatgggctccaggacaatgacatcaagctgagggtcagtgagtgggaagtgatccaggagtcgggcacgaaactgaagccaatgtatggtcctggctacacgggtctgaagaacctgggcaacagctgctatctcagctctgtcatgcaggccatcttcagcatcccagaattccagagagcgtatgtaggaaaccttcccagaatatttgacctactcgcctttagatccaacacaagatttcaacacacagatgactaagttaggacatggccttctctcaggccagtattcaaagcctccggtgaaatctgaactcattgaacaggtgatgaaaggaggagcacaagccacagcagaacgggatctctccgcgcatgtttaaggcctttgtaagcaagagccacccggaattttcctcttaacaggcagcaagatgcccaggaattcttctttgcacctggtgaatcttagtagagaaggaacccgcatcgggttcagaaaacccaagcgatggtttttcgtttttttggtggaagaaccgcatttcagtgctgtcagacccggaaagtccgctacacggagagggtggattacctgatgcagttacctgtggccatggaaggcggcaccaaacaaggatgaactgatcgcttatgaactaaccgagaagggaagcagaagcaaaccagaagaccccttcctgagttggtacgtgccaagataccatttagtgcctgccttcaggcctttcttctgaaccagaaaatgttgatgatttctggagcagtgccctacaagcaaagtctgcgggtgtgaaaacatctcgctttgcttcattccctgaatacttggtagtgcagataaagaagttcacttttggtcttgactgggttcccaaaaaatttgatgtttctattgatatgccagacctacttgatatcaaccatctccgagccagggggttacagccagggagagggaaggaacttccaggacatcagcccccccatagtcattcctgatggacttcaaaaggttcgcctggatggaaccatttgataggacccttcaggacatcgatggggtcatcagtgatgcagctggccgagatgggtttcccgctggaagcatgtcgcaaggctgtgtacttcactggaaatatgggcgccgaggtggccttcaactggatcattgttcacatggaagagccagattttgctgagccgctgaccatgcctggttatggaggggcagcttctgctggagcctctgtttttggtgcttctggactggataaccaacctccagaggaaatcgtagctatcatcacctccatgggatttcagcgaaatcaggctattcaggcactacgagcaacgaataataacctggaaagagcactggattggatctttagcccaccctgagtttgaagaagaccagtgattttgtgattgagatggagaataatgccaatgcaaacattatttctgaggccaagcccgaaggacctagagtcaaggatggatctggaacatatgagctatttgcattcatcagtcacatgggaacatccacaatgagtggtcattacatttgccatatcaaaaaggaaggaagatgggtgatttacaatgaccacaaagtttgtgcctcagaaaggccccctaaagacctgggctacatgtacttttaccgcaggataccaagctaaacctcaaatataaaaattggcgaaaagaagccatacgcctttttaatttgcc

SEQ ID NO: 134368 - DNA, 450 bp, Homo sapiens
ggaattcgggaaaaccttcagtgtgaagaggacactgctgcagcaccagaggatccacaccggggagaagccctacacgtgcagcgagtgtgggaaggccttcagcgaccgctcagtcctcattcagcaccacaacgtgcacaccggggagaagccctatgagtgcagtgagtgtgggaagaccttcagccaccgctccacactgatgaatcacgagcggatccacaccgaggaaaagccctatgcatgctacgaatgtgggaaggccttcgttcagcactcacacctgatccagcaccagaaagtgcacagaaagttgtgacccatggctgacacaagaatccattctcacagaaactgcatgtggaaccacaagcagccttcagcccaagagaagtctctgttaactctataggaagcttttctttggcgattcagtgtcacaaaata

SEQ ID NO: 134369 - DNA, 3721 bp, Homo sapiens
ttttttttattattctttcaacctttatgaatgtatcaacatttgcaaaataaaaaagttgtggaggaggaagaaaaacaaaaaccaggatgcactgaggtctgaggtgaaggtcctaggagcatcagttctctgttgggatcaaggttgctgggacagagcttgatccctgtcaactgctaaaacaatccaggacaatccaatagtagagctgaattttgattaccttggtcctgagcttcacagccctttggcagaggaaatcctgtgacactgaggtgtaaccacaagactggcccaaactgaccctattctgttggtaacaggaggtatagcagagccaaaactgaaagtcatgtaacccggacatgcacaaaggaggaaaatcataactcggaaccaacgtttcctcccttcgggagtggggccaccagaaggtggaataggggtctgctttccggtcccctgacaccggtccaaatcagccccaccctccctgccgggggtgtcagttcctgggctgtgcccgaagcctccacacgggtgtggcccgggcccttgtgaaggcccgcccttctcccccaggtgggcggtgtagacacaccaaaaagcaaacaccagggccgagtgggggagggagacagttcgctgttcagtgacgccccctgtcgggagcacgccgggccggacacagcgaagagtgggtgggcctcggacctcgcagcactcagcctcctaagtgggaggaataacctcacgcaagtcatcaaacaagaggacttcagtgttgcaacgaaggaaagagaaagggcccctgagaaggcgacattcgcattgcagcggcgcagggaccagccaggcggctgagggcaaggtcgttcccagcagcgggaaccgcaagggcaaaaggctcggaggggggaacgagctcgagttccaggacggccgaagccagcgcaagtcgaggagggactgcggggccggcaggggtgtcctccacagggcgacggcggcaggagctcgggaaccgggactgcgagcgggtaaggctcggcgatgggctgtaacctccgcgcccggaagtgcggccggggagccggccgggcccattgcccagaggtgttcggcccctctagggatcgcggagggtctggctctcggtggctcctgagagctccctgcagtcggtcaccgagaaaggcttcgggcgggcaggcgggccaaatgacgtaaacatgcttgccctccaggattggcgaactcggctgtgggggcgggaactgaggggcaggagcccccagggattggcggctgcgcagacggggcggggcagccctttgtctgaaggtgctgtttgatgttcgttccttcccgcgtgaggctgcggctctgacgccccataggctccttcaatttccgagatcctcggagtccccaggagaccaaatgatggcagcagccagactcctgccagtgccggcaggaccccagcccctgtcgttccaggccaagctgaccttcgaggatgtggctgtgctcctctcccaggatgaatgggaccggctgtgccctgctcagaggggcctctacagaaatgtgatgatggaaacctatgggaatgtagtctcattgggacttccaggatgcaagcctgacataatcttccacttggagctgaggggaatatccctgggtcctgtaccggaatggggctaagaagagccagggcctgtggagtgactactcagaatgttgaaaccaagggagagagtcaaaatacagacttgagtccgaagccattaatttcagagcaaacagtgattctggggaaaacacccttggggaggattgatcaagaaaataatgaaacaaagtaaagcttctgtctgagtccaaactctgttgaccaccgtgaagttcaggtcttaagccaaagcatgccactcactccgcaccaggcagtgcctagtggagagaggccctacatgtgtgttgagtgtgggaagtgctttggccggagttcccacctccttcagcatcagcgtatccacactggagagaagccctatgtgtgcagtgtatgtgggaaggccttcagccagagctcagtccttagtaaacacaggagaattcacacaggtgagaagccctatgagcgcaatcgagcgtgcattagtctttacagtgagctcccatcttgctcacctttcactgatacatacaggagagaagcctcactaatgtcttgagtgtccgaaagccttcactcaactctcacatctcattcagcaccagcggatccacacgggagaaaggccatatgtgtgtccgttgtgtgggaaagccttcaaccatagcactgttctgcggagccaccagagggtacacactggggagaagcctcacaggtgcaatgagtgtgggaaaaccttcagtgtgaagaggacactgctgcagcaccagaggatcctacactcgggagaagccctacacgtgcagcgagtgtgggaaggccttcaacgaccgctcagtccttattcagcaccacaacgtgcacactcgggagaagccctatgagtgcagtgagtgtgggaagaccttcagccaccgctccacactgatgaatcacgagcggatccacaccgaggaaaagccctatgcatgctacgaatgtgggaaggccttcgttcagcactcacacctgatccagcaccagagagtccacactggggagaagccctatgtgtgtggtgaatgtgggcacgccttcagtgcacgccggtctctgatccagcatgagagaatccacacaggtgaaaagcccttccagtgcacagaatgtggcaaagccttcagcctgaaagcaactctgattgtgcacctgaggacccacacgggcgagaagccatatgagtgcaatagctgcgggaaggccttcagccagtactcagttgctcatccagcaccagcggatccacacaggcgagaagccctatgagtgcggggagtgtgggggtgccttcaaccagcatggccacctaatccagcaccagaaaagtgcacagaaaagttgtgacccatggctgacacaagaatcccattctcacagaaactgcatgtggaacccacaagcagccttcagcccaagagaagtctctgttaactctataggaagcttttctttggcgattcagtgtcacaaaataactccagaaagaagcacttagcgtgctgttcctgtggaaaaacttcagagactacctgttttattttcctcaaccatcttgaagttatgttggagagtaatcatacaattgtagagaattttggtaaaaaacagccataattctttaacattagtttatttgaactaagggaatttaaggcataagaaccgattatcccgaataaaatcttacattccaaataaagttctttttctaagaacattacatgcccttcctaaatatcaattaaccatactaattattgcacttaaaatttgaaagtcggactatttttcagtattctcttaaaagactaaagtattgtatggataaagtgatataaaaagatattttcatcaagcatcatgtaaaatggttggaaatcctaagtgtgtggatttccatcctaagtgtgtggagtcctgttttgtatgaaacaaggaaaaagcttatatattagtgagaaattacataaatttaaaaaaaaaaaaaaa

SEQ ID NO: 134370 - DNA, 319 bp, Homo sapiens
ggcacgagaccatggctccgcgtcaatgcatatttaatccatgatactgctgattggaaggacctgaacctgaagtttgtgctgcaggctgtgatggaatctgaaatgaagtttgacaaggaccatgatggactcattgaaaatggaggctatgcagaccagacctatgatggatgggtgaccacaggccccagtgcttactgtggagggctgtggctggcagctgtggctgtgatggtccagatggctgctctgtgtggggcacaggacatccaggataagttttcttctatcctcagccggggccaagaagcctatg

SEQ ID NO: 134371 - DNA, 2436 bp, Homo sapiens
atggtcctttcagcacgtcagacagaagctcctgatgttggaaataaagcagtggtggtggtgctagagaggtacctgcagtggtggtaccggaagacccatgtggaaaagaagacacctttcatcgacatgatcaattctgtacccctaagacagatttatggttgtcccttgggtggcatcgggggaggcactattacccgtggctggagaggccagttctgtcgttggcagcttaaccctggaatgtatcagcaccggacagtcatcgctgaccaattcacagtgtgcctgcgtcgggaagggcagactgtgtaccagcaagtcctgtccctggagcgcccaagtgtcctccgcagctggaactggggcctgtgtgggtactttgctttctaccatgccctctatccccgagcctggactgtctatcagcttcctggccagaatgtcaccctcacctgccgtcagatcacacccatcttgccccatgactaccaggacagcagcctgcctgtaggagtctttgtgtgggatgtggaaaatgaaggggacgaagctctagatgtgtccatcatgttctccatgcggaatggactgggtggtggagacgatgccccaggggcagctaccacggtaacccacatcacagcctttgaccctgacagcacggggcagcaggtgtggcaggatctacttcaggatggacagctggactctcccactggccaaagcacccctacgcagaaaggagtaggcattgctggagctgtgtgtgtttccagcaagttgcgacctcgaggccagtgccgcctggagttttcactggcttgggacatgcccaggatcatgtttggagctaaaggccaagtccactacaggcggtatacaaggttctttggccaggatggagatgcagcacctgccctcagccactatgcactgtgccgatacgcagagtgggaagagaggatctcagcttggcagagcccggtattggatgacagatcactgcctgcctggtacaaatctgcgctgttcaatgaactatacttcctggctgatggaggcacagtgtggctggaagttcttgaggactccctaccagaggagctgggcagaaacatgtgtcacctccgccccaccctacgggactacggtcgatttggctaccttgagggccaggagtaccgcatgtacaacacatatgatgtccacttttatgcttcctttgccctcatcatgctctggcccaaacttgagctcagcctacagtatgacatggctctggccactctcagggaggacctgacacggcgacggtacctgatgagtggggtgatggcacctgtgaaaaggaggaacgtcatcccccatgatattggggacccagatgatgaaccatggctccgcgtcaatgcatatttaatccatgatactgctgattggaaggacctgaacctgaagtttgtgctgcaggtttatcgggactattacctcacgggtgatcaaaacttcctgaaggacatgtggcctgtgtgtctagctgtgatggaatctgaaatgaagtttgacaaggaccatgatggactcattgaaaatggaggctatgcagaccagacctatgatggatgggtgaccacaggccccagtgcttactgtggagggctgtggctggcagctgtggctgtgatggtccagatggctgctctgtgtggggcacaggacatccaggataagttttcttctatcctcagccggggccaagaagcctatgagagactgctgtggaatggccgctattacaactatgacagcagctctcggcctcagtctcgtagtgttatgtctgaccagtgtgctggacagtggttcctgaaggcctgtggcctaggagaaggagacactgaggtgagagaggaggaggagcagccagagagaaaaatgggttttccctggaggtgggaagtgtttcctacccaacatgtggtccgtgctctccaaactatctttgagctgaacgtccaggcctttgcaggaggggccatgggggctgtgaatgggatgcagccccatggtgtccctgataaatccagtgtgcagtctgatgaagtctgggtgggtgtggtctacgggctggcagctaccatgatccaagagggcctgacttgggagggcttccagacagctgaaggctgctaccgtaccgtgtgggagcgcctgggtctggccttccagaccccagaggcatactgccagcagcgagtgttccgctcactggcctacatgcggccactgagcatatgggccatgcagctagccctgcaacagcagcagcacaaaaaggcctcctggccaaaagtcaaacagggcacaggactaaggacagggcctatgtttggaccaaaggaagccatggcaaacctgagcccagagtga

SEQ ID NO: 134372 - DNA, 443 bp, Homo sapiens
tggggagctagccgggacccagtgtactcgtggagcctgccctcacagtccctgaccccttcacaggcagctaccacggtaacccacatcacagcctttgaccctgacagcacggggcagcaggtgtggcaggatctacttcaggatggacagctggactctcccactggtgatggggggtctgactgggagatggtgggaagagaggttgtccctgtcttgggaccaggggtgggaggcctggtaataagtaggccttgtttccatgttagggatccctatccctggggctgaaggggctcctgtcctgaattctcttgtgtttctctcaggccaaagcacccctacgcagaaaggagtaggcattgctggagctgtgtgtgtttccagcaagttgcgacctcgaggccagtgccgcctggagttttcactggcttacgaaa

SEQ ID NO: 134373 - DNA, 573 bp, Homo sapiens
gggggaggcactattacccgtggctggagaggccagttctgtcgttggcagcttaaccctggaatgtatcagcaccggacagtcatcgctgaccaaatgaggacactaagatccagagaggtttagtaacatgcgcaaggtcacaagttcacagtgtgcctgcgtcgggaagggcagactgtgtaccagcaagtcctgtccctggagcgcccaagtgtcctccgcagctggaactggggcctgtgtgggtactttgctttctaccatgccctctatccccgagcctggactgtctatcagcttcctggccagaatgtcaccctcacctgccgtcagatcacacccatcttgccccatgactaccaggtgaggcccccacatctgtatcttccattgccctcccttccccaggacctgcctctgctagaaactgcatggcctgcgaggcgcggtagtcacgcctgtaatcccaacactttgggaggcaaggcaggcggatcacgagatcaggagatcgagaccatcctggctaacacgtgaaacccatatctactagaaaaaagacaaaaagat

SEQ ID NO: 134374 - DNA, 384 bp, Homo sapiens
gaatgtatcagcaccggacagtcatcgctgaccaattcacagtgtgcctgcgtcgggaagggcagactgtgtaccagcaagtcctgtccctggagcgcccaagtgtcctccgcagctggaactggggcctgtgtgggtactttgctttctaccatgccctctatccctgagccatcaggacaatcataccccttcccttctctccacccaactgtgccagtaaatgggggttgagagtgacctaggcagcattagaatcacttatttatttctttcctcacctgttccctgactgcgtgaaatgttcagggaggtcagttgatttccccaggtacattcatggtgtgacagacacatgggtacaaataaaagacccagaaagcc

SEQ ID NO: 134375 - DNA, 1018 bp, Homo sapiens
tcacggtgatcaaaacttcctgaaggacatgtggcctgtgtgtctagtaagggatgcacatgcagtggccagtgtgccaggggtatggttggtgtctgggaagagcctagctggttgttgcctttcctcggtacctaggtcttcaacatcttggtccctctctaggctgtgatggaatctgaaatgaagtttgacaaggaccatgatggactcattgaaaatggaggctatgcagaccagacctatgatggatgggtgaccacaggccccaggttagcgggtaggggtttccaggaggcctgaggtgagaaactgggcaacaagggattgtagggctcaagaaagaatgactcattgtctattacacggcatgggacgagctggagctgccagtctgacccccaaacccatgtccctgatcagtgcttactgtggagggctgtggctggcagctgtggctgtgatggtccagatggctgctctgtgtgagggcacaggacaatctaggataagttttcttctatcctcagccggggccaagaagcctatgagagactgctgtggaatggtgagttcggggagcctaagtagtcttaaggcagctgagaggacaccaggagccttatttttctcttcctcgactccaggccgctattacaactatgacagcagctctcggcctcagtctcgtagtgttatgtctgaccaggtgtgctggacagtgggggttcctgaaggcctgtggccttaggagaagggagacactgaggtgagagaggaggaggagcagccagagagaaaaatgggttttccctggaggtgggaagtgtttcctacccaacatgtggtccgtgctctccaaactatctttgagctgaacgtccaggcctttgcaggaggggccatgggggctgtgaatgggatgcagccccatggtgtccctgataaatccagtgtgcagtctgatgaagtctgggtgggtgtggtctacgggctggcagctaccatgatccaagag

SEQ ID NO: 134376 - DNA, 985 bp, Homo sapiens
  misc_feature (1)...(985): n = a,t,c or g
tgaccgtgcggtgtaattcccaagaagcctatgagagactgctgtggaatggccgctattacaactatgacagcagctctcggcctcagtctcgtagtgttatgtctgaccagtgtgctggacagtggttcctgaaggcctgtggcctaggagaaggagacactgaggtgtttcctacccaacatgtggtccgtgctctccaaactatctttgagctgaacgtccaggcctttgcaggaggggccatgggggctgtgaatgggatgcagccccatggtgtccctgataaatccagtgtgcagtctgatgaagtctgggtgggtgtggtctacgggctggcagctaccatgatccaagagggcctgacttgggagggcttccagacagctgaaggctgctaccgtaccgtgtgggagcgcctggggtctgggcctttccagaccccaggagggcatactgccaggcagcgagtgtttccgttcaattggcctacattgcgggccactgaggcattatggggccattgcagcttagccctgcaacagcaggcagcacaaaaaaggcctcctggccaaaaagttcaaacaggggcacagggattaagggacaggggcctatgttttnggacccaaagggaagccattggcaaaccttgagcccaagagtgagccgtcttgaacttgtgggaaggaagttctaacagcccagcctccagcctggcctttcctccttcccctctgaacctcctgcaaccctgagccatcaggacaatcataccccttcccttctctccacccaattgtgccagtaaatgggggttgagggtgacctaggcagcattagaatcacttatttatttctttcctcacctgttccctgactgcgtgaaatgttcagggaggtcagttgatttccccaggtacattcatggtgtgacagacacatgggtacaaataaaagacccagaaagccattaaaaaaaaaa

SEQ ID NO: 134377 - DNA, 3517 bp, Homo sapiens
  misc_feature (1)...(3517): n = a,t,c or g
cggtgccgtggcccaggggccgggccgaggtcccgggggcggtgccttgcgggcccgtcccggggcggtgcctggtgggctggccccgcggttcctcccctctctgcgggcccagtcgccctttggccgggcgagctaatcgtcggctcaatgacgacgaggcccgacccttcccgtccaggacctacagagacaaccgaaggagagcccaaggcggcttctttgctgtcgccgcccccactgaagcaagagctccccggctccactgaaacaccagctcatttaagctttccccaacgaccggccctccgggacgatacctaacaacgaccggcgcccgcatctggaataggctggcgagatacttagtatccgagggctcgggacttggcgccatcgaggtcatggggacccaggatccagggaacatgggaaccggcgtcccagcctcggagcagataagctgtgccaaagaggatccacaagtttattgccctgaagagactggcggcaccaaggatgtgcaggttacagactgtaagagtcccgaagacagccgacccccaaaagagacggactgctgcaatccggaggactctgggcagctgatggtttcctatgagggtaaagctatgggctaccaggtgcctccctttggctggcgcatctgtctggctcatgagtttacagagaagaggaaaccctttcaagctaacaacgtctccctaagctacatgataaagcatataggcatgggcttgaggtacctgcagtggcgtgaccggaagacccatgtggaaaagaagacacctttcatcgacatgaacaaatctgtaccaccaatacagagttatttttgtgcccttgggtggccttcggggaggcactagtacccgtggctggagaggccagttctgtcgttggcagcttaaccctggaatgtatcagcaccggacagtcatcgctgaccaattcacagtgtgcctgcgttcgggaagggcagactgtgtaccagcaagtcctgtccctgggagcgcccaagtgtcctccgcagctggaactggggcctgtgtgggtactttgctttctaccatgccctctatccccgagcctggactgtctatcagcttcctggccagaatgtcaccctcacctgccgtcagatcacacccatcttgccccatgactaccaggacagcagcctgcctgtaggagtctttgtgtgggatgtggaaaatgaaggggacgaagctctagatgtgtccatcatgttctccatgcggaatggactgggtggtggagacgatgccccagggggtttgtgggaatgagcccttctgtctggagcgtaggggtgnaaactgtccgggggctgctcctgcattcatccaacccttccaaacccctacacgatgggctgtggctggcacggagttcacgggcagctaccacggtaaacccacattcacagcctttgaccctggacagcacgggggcagcaggtgtggcaggatctacttcaggatggacagctggactctcccactggccaaaggacccctacgcagaaaggagtaggcattgctggagctgtgtgtgtttccagcaagttgcgacctcgaggccagtgccgcctggagttttcactggcttgggacatgcccaggatcatgtttggagctaaaggccaagtccactacaggcggtatacaagggtctttggcgcgggatggagatgcaccacctgccctcagccactatgcactgtgccgatacgcagagtgggaagagaggatctcagcttggcagagccccggtattggatgacagatcactgcctgcctggtacaaatctgcgctgttcaatgaactatacttcctggctgatggaggcacagtgtggctggaagttcttgaggactccctaccagaggagctgggcagaaacatctgtcacctccgctcccaccctacgggactaccgacgatttggctaacttgaaggccaggagtacccgcatgtacaacacatatgatgtccacttttatgcttcctttgccctcatcatgctctggcccaaacttgagctcagcctacagtatgacatggctctggccactctcagggaggacctgacacggcgacggtacctgatgagtggggtgatgggcacctgtgaaaaggagggaacgttcatcccccatgatattgggggacccagatggatggaaccatgggcttccgcgttcaatgcatattttaatccatgatactgctgattgggaaggacctgaacctgaagtttgtggcttgcaggtttattcgggactatttacctcacgggtgattcaaaatttcctggaagggacatgtgggcctgtgtgtctagctgtgatggaatctgaaatgaagtttgacaaggaccatgatggactcattggaaaatggaaggctatgcagacccagacctatgatgggattgggtgaccacaggccccagtgcttactgtggagggctgtggctggcagctgtggctgtgatggtccagatggctgctctgtgtggggcacaggacatgcagaataagttttcttctatcctcagccggggccaagaagcctatgacaggctgctgtggaatggccgctattacaactatgacagcagctctcggcctcagtctcgtagtgttatgtctgaccagtgtgctggacagtggttcctgaaggcctgtggcctatgagaaggagacactgaggtgtttcctacccaacatgtggtccgtgctctccaaactatctttgagctgaacgtccaggcctttgcaggaggggccatgggggctcgtgaatgggatgcagccccatggtgtccataataaatccagtgtgcagtctgatgaagtctgggtgggtgtggtctacggggctggcagcttcccatgatccaagaggtaatgcactccttttcccatctctccaccatctgtatcctggcccagaaaacttcctcaaccaccaaatttcttcaaggcataacccaatgccatcttgtccgtctataaagcctcccatttttccctgggtatgcattccagctcctgccttcaggtttctgtctgtggggtcatagttatctcctccacttgctggggagctccttgaaggcaaagactctactgcctccatctattccagtgggaagtgggctctttcagaggggttgccaagttagtattgtatggacttgttcatctttcccaacaggggcctgaattggggaggggtttccagacagctgaaggctgctaccgtaccgtgtgggagcgcctgggtctggccttccagaccccagaggcattctgccagcagcgagtgttccgctcactggcctacatgcggccactgagcatatgggccatgcagctagccctgcaacagcagcagcacaaaaaggcctcctggccaaaagtcaaacagggcacaggactaaggacagggcctatgnttggacaa

SEQ ID NO: 134378 - DNA, 497 bp, Homo sapiens
  misc_feature (1)...(497): n = a,t,c or g
ggcacgagtccncgttngagattgaaaatgttccctgtgaatttgtgcagaactttgacccccattaccccattatcctgggtggcttgggcaacagcgagggaaatgttggacacgtgcagatgcgtctgaagaaacatcgctggtataagaaaatcctcaagtcccaagatccaatcatattttctgtagggtggaggaggtttcagaccatcctgctctattatattgaagaccacaatggaagacaaanggcttctaaangtataccccacagcacatgcattgtggagcagcccttttgggcctggattttccggatagctgccacaaggagtttgtcccttgancttggataaaatcccataaaaattngtgaagaaatttaaaagctaacttgggtttttnccatataaaaattttccaaggaacacctttcatttttaatttaggattattngtccttccatggcngaaactttggggaatccctggtt

SEQ ID NO: 134379 - DNA, 499 bp, Homo sapiens
  misc_feature (1)...(499): n = a,t,c or g
aaaccagtgggtgagaaagacacctggtcaggaatgcggaccacgggccaactcaggcntgcccatggcgtcagactaaaggcgaacaaggactctctgtataagccaatcctgaggcaaaagaaacattttaattcactgcacattccaaaagccttgcagaaggccctgccatttaagaacaagcccaagacccaagcaaaggcaggcaaggtgccaaaggacaggcggaggtagacagtttcaaacatcacagtttgaatgcctgtgaatgacacgtcagtgggaaagagctcaagagatgtctctactcaaactgtgcctgcaggaggaggaacagagaagcctgggctgctgggactgggttcattctcatgacttggggctgtcgagatttaaagtgatgtaagctgtggttatgtggattctcttactttcctctgcctgcctcagtttaattattttgtcctacagaaatatcattaaaatatttttttgt

SEQ ID NO: 134380 - DNA, 1969 bp, Homo sapiens
cttaagaataagacaaaataagtcactcttctttaaaaaaaattatggtcatctgttttcaaagaataatcccagatacttaattaattaaagcaaattttctacgatcagcagtgagctttttaaatgatcactaagtgttcacctgaagattatcaatgctatatgaagtgtaaacttgaaaatttgtgtccattttataataagatacaatttgcactgaagagtttttaaaaagataacctacacacatacagttaatttgcctcaaacaacttcttagaaatacagtataaacatttaagaaccacgacaaagttgtggttcaaacttcaacaaagattttcttgaaacccagtataaagattactggctcaagaccatatcccaaagtgaaatcagcaggagatttgattgtaagactctaccttttaaaaaaagagcacacttggttatacatggcttttaaacttgagctacagttatgctacaaatcccccccaccctcccaatctaaaatcagtcatgtggagatatgtacattctctgagcattgtttagagtccttggttttccagctttgatggagatctagaaggcgttcagaagtccgtgtgcttacattcagagcaggatgaactttacaaattccactttcctccattagtgacaggccacagatcccaaagtatgcatgcaaagcatctggatgactgtctggccacttggcaaatccccctacaaggcgatcttgagttgataagatgtaatttctatttttctcaaagttagtgtattggaaaatttttagaagcttcagagttgctcccacccaaaaagaataacaggtgtctacaggcttattaggtcttccatgataaccattttgttgcctcattatacaccacctctttatcctgttcaattctttttctgaaaaaacttcttctagtttacccatcagacatagtgaggcaatgccacaaaaagttgatcctccatgagattcaagtccagctccctgtgccagtccattgtcataggacatactccttctaatataggtgatggcttttttcatatccatgcctgaccagttgttgagcatatagcaaatacaggaagcacagtacacaaatcgcatgtcattttcactgccttcaggtactgcacaaaaactcccatcttccagctgaagggctctcaagcccgctaagcaagcttctttatttactcggcttaagtcgtctccaagaataactaagcatgagaggccagtgtaggtcattgcaatgtggccactatcataaggatgagctgttccaggagcctttgatggattgaacggaatacccaggtatgaagagcctcggaaaccacagcgatttagatttgatctgtcttctgtgggaaggacctgcagggaataaatccactctattatatcatctttgttcaccacatctaaggaatccaacatatccagcccggagagtgcaaaaaatgcaattgtcaacctgcttgtctcgagtgaagaatagcgctccggcaaaacctggaggcagcgctggaaaaatcgcacgtgccgatcccgtaagaaatccagccgctctccctcaccgctccctgctagcctctcatcctcagtggccaccatgcccagccccttgccatccttttagggcaaggaaaccaggctcagagaggtagagtgatttatctaaggtctcaaagtgaatttgccgttgggtcaagactaattataataacaacaactactgacgtttatatgggcccggcattgtgctgaacactttcatggattttgtaacagaatccctagatcagcactgtccagtaactctgcagggatgggagtgtccggtacaggggccacgagccacatacggctgttgtgcatttgacacacagctcatgtgactgaggaactgaattgttcattttattc

SEQ ID NO: 134381 - DNA, 565 bp, Homo sapiens
caactttaaagttttggattgcttttgtcaagccactgggttgcaagttcagatggtctttcttgtttttcttagctaattgtaagtaaaattcactttggtaatttattgtgtcacatagaattgaagtttttctcttgctaatattattcctattttcaaattttggggttcctgctagcctgattttcggatagctgccacataagttgtccttgatctggataaatccataaaaattgtgaagaaattaaagctaactggttttccatataaaatttttaagaacacttcatttattaaggcctgtatatctatatattctcatatttataaatctccatattgtttgagaaaaggaatgaaatacctctaaaatatgggcctcatatttttagaaaagtgtttgaaatcttttataaacttcatattttgtttgctcctttatattctgtattacttaaatatgcctcagaaaagcagtggtaaacagctatttaggaattgaggctgttactcctgacttccatgtgagactgccacagaactcatattgaaaatatgt

SEQ ID NO: 134382 - DNA, 1698 bp, Homo sapiens
atggctgcaaacaggaaggattttattcaccgtcgatgcggccccgagttgtcccaaagcgaggcagtgccccaaggtctatgcagagcagaacgcagctccgccctcgcaatgctctccgggtctgtgccgaggagaacgcagctccgcccttgcaaaggcacacagcgccggtgccggcgtggcggagaagcggacagcggcggagaggcggtcggcggcggcgcggcggagaggcggtcggcggcggcgcggcggagaggcggtcggcggcggggcggcggagaggcggtcggcggcggcgcggcggagaggcggtcggcggcggcgcggcggaggcgaggcgggcggcggcggcgcggcggaggcgaggcgggcggcggcggcgcggcggaggcgaggcgggcggcggcggcgaggcgggcggcggcggcgaggcgggcggcggcggcgcggcgggcggcggcggcgcggcgggcggcggcggcgcggcggatagcggagagcggcggagaggcgcacagccgcggagaggcgcacagcggcggagaggcgcacagcggcggcgcaggcgcggagaggcgcaggcccaggctccactccccagctctgaaaactcatcctggtcagagttcagaaggacatgtggagtataagctgaatcacgtagaatttgaagatcaagatgatgaagccagagttcagtatgagggttttcgacctgggatgtatgtccgcgttgagattgaaaatgttccctgtgaatttgtgcagaactttgaccccctttaccccattatcctgggtggcttgggcaacagtgagggaaatgttggacatgtgcagatgcgtctgaagaaacatctctggtataagaaaatcctcaagtcccaagatccaatcatattttctgtagggtggaggaggtttcagaccatcctgctctattatatcgaagaccacaatggaagacaaaggcttctaaagtatacgccacagcatatccattgtggagccgccttttgggatattgtcttcatgcgaactttggtatcttgtttccatcccagccttctataacccagtaacatctttgttgaaaccagtgggtgagaaagacacctggtcaggaatgtggaccacgggccaactcaggctcgcccatggtgtcagactaaagacaacgaaggactctctgtataagaacatacatatgatagttgagacagacacatattctgatcatgaagaaataaacacaagttaaatatgactaagcagaaagatggaaggaccaggaatggtgatgctaacttggaaccacgatgcaggctctaaactcctctacaatcatcctcccttgtgagaaaaatacataagatctaaggcacatgagatgatatgctttctgtttgagtttctcctttatgttacgcatactgataaaattgttgatgccagttgatctgaaggtcccagcaaggagccgactcacagaagaatgaagttttcacatcatgatgatttaatcttccttgacctgagcaattgacaaccccaattctccagaacctcacccgccacaatccccttaaaaaccctggcccagaacccctcaagcagacagatgtgaagcttgaggattccttcatctctttgcccaatggcattgtgattattaaactctttttctgctgc

SEQ ID NO: 134383 - DNA, 1604 bp, Homo sapiens
  misc_feature (1)...(1604): n = a,t,c or g
gcgctgcaggaattcggcacgaggcacagcgaggcgccggcccagactccactccccagctgtgaaaggaggagctctacggtgactttgaagacttggaaacaggggacgtgcacaagggaaaatcgggccccgatactcagaatgaagatgtagagaaacaaggaagaaattgaccctgacgaagaagaaagtgccaagaaaaagcatttggataagaagagaaaattgaaggagatgtttgatgtggaatatgatgaaggagaaagcacatattttgatgatcttaaaggagaaatgcagaaacaagcacaggtaaacagcatacaaggtttcccccccgcgcaccacgtcatgtacagctgaatcatgcagaatttgaagatcaagatgatgaagccagagttcagtatgagggttttcgacctgggatgtacgtctgcgttgagattgaaaatgttccctgtgaatttgtgtagaaccttgacccccgttaccccattatcctgggtggcttgggcaacagcgagggaaatgttggatacgtgcaggtgggtccctttgctgcatatttggtgcctgaggctctgtggatttcccctccatcaatcatcttaccctctcatccccctcagatgcgtctgaagaaacatcgctggtataagaaaatcctcaagtcccgagatccaatcatattttctgtagggtggaggaggtttcagaccatcccgctctgttatatcgaagaccacaatggaagacaaaggcttctaaagtataccccacagcatgtgcatcgcggagcagccttttgnnnnnnnnnnnnnnnnnnnnnnnnnnnnnnnnnnnnnnnnnnnnnnnnnnnnnnnnnnnnnnnnnnnnnnnnnnnnnnnnnnnnnnnnnnnnnnnnnnnnnnnnnnnnncggatagctgccacaggagttgtccttgatctggataaatccataaaagttgtgaagaaattaaagctaactgggtttccatataaaattttcaagaacacttcatttattaagggaatgtttaattctgccttggaagtggccaaatttgaagatgctgtgattcgaactgtcagtgggataagggggcagatcaagagagcactctgagctccagaaggagctttccaggatagcttggaggataagctgcggatgagcgatattgtcttcatgcgaacttggtatcctgtttccatcccagccttctataacccagtaacatctttgttgaaaccagtgggtgagaaagacacctggtcaggaatgtggaccacgggccaactcaggctcgcccatggtgtcagactaaagacaaacaaggactctctgtataaggtactggtcgtgtgtgtgttagtggagatgaagcctgtgctctacagacagtgagtcacacagacacttttctataatttcttacatactttgaatgttcaagtataaagtctaatgttaaatttgattgaacaattgtatatttgtgggatattttggaatggaacaccaaaaaatggtaatagtggttctttctggattgaagaaaaactcctcttttttaaaataaattttatttttatt

SEQ ID NO: 134384 - DNA, 5142 bp, Homo sapiens
taacaaaaaaatattttaatgatatttctgtcaggaccaaaataattaaactgaggcaggcagaggaaaagtaagagaatcacacataaccacagcattacatcactttaaatcatcagacagccccaagtcatgagaatgaacccagtcacagcagcacaggcattcatctgttccatccatcctgcaggcacagtttgagtagagacatcatcattgagcatcatttcccactgacgtgtcattcacaggcattcaaactgtgatgtttgaaactgtctacctccgcagatccagggacagtccctccaagtccaaagggctcactggcaattgggccctcagccccctttcaaactgggacttctggtttcttctttccttctgcccctggaattctgaagagcttcttcctggaggtccttctggccgcttcagcttctcctcctcctccttctgcttggcctctgaagtgctctttattgtgcaggtgccgctgctccttggccttcttcatcttctgactatgcaccgtactcagagcatccagcagtgcaaggatctttctttcatgaaggctcgcgtaatgacggccggtctccgcgctgtcctcttggcacctttgcctgcacttggcttggtacttgggcttgttcttaaatggcagggccttctgcaaggcttttggaatgtgcagtgaattaaaatgtttcttttgcctcaggattggcttatacagagagtccttgttcgcctttagtctgacgccatgggcgagcctgagttggcccgtggtccgcattcctgaccaggtgtctttctcacccactggtttcaacaaagatgttactgggttatagaacgctgggatggaaacaggataccaagttcgcatgaagacaatatcgctcatcagcagcttatcctcaaagctggccctgaaaactccttctggagctcggagtgctttcttgatctgccccccttatcccactgactgttcgaatcacagcaccttcaaatttggccacttacaaggcagaattaaacattcccttaataaatgaagtgttcttgaaaattttatatggaaaaccagttagctttaatttcttcacaatttttatggatttatccagatcaaggacaactcctgtagcagctatccgaaaatcaggcattatgccacttgacagactgtattgccaagaaaccagttccctgtggagtgatagggccccaaaaggctgctccgcaatgcatgtgctgtggggtatactttagaagcctttgtcttccattgtggtcttcgatataatacagtgggatggtctgaaacctcctccaccctacagaaaatatgattggatctcgggacttgaggattttcttataccagcgatgtttcttcagacgcatctgcacgtagccaacatttccctcactgttgcccaagccacccaggataatggggtaatgggggtcaaagttctgcacaaaattcacagggaacattttcaatctcaatgcggacgtacatcccaggtcgaaaaccctcatactgaactctggcttcatcatcttgatcttcaaattctacgtgaattcagctgtgcttcttttctgcatttctcctttaagatcatcaaaaatatgtgctttctccttcatcatattctgcatcaaacatctccttcaattttctcttcttatccaaatgctttttcttggcactttcttcttcggtcagggtcaatttcttccttaacttctttctctatatcttcattctgagtattggggcctgattttcccttgtgcacgtcccctgtttccaagtcttcaaagtcaccgtagagctcctcatcttctgctaagaccttggctgcatctttatcatcttcccactttccagtcacgaagcaatctctgatactgttcataacctcctctaaatcccagtcatggggggcctccacaagaaatctggagcagtccaaagagtcagccttgtgcttacactctctgtcaggctggttgacacgaaacaaccctccaagctcttctagagtatcatcatcttcttcttcattatcttctgtcactgtcccataaataagctttcggaggtttggagctgcttgctgctgcctcagaaaggcctcagctgcctttctggaaaggtcttccttccacttgagggcacctgacgtttctttggaatcattattttcttccttgtaatcttcttcctctttgagtaaattttctatatcactggtctcatcaatgaagttctgtggccccagtttctgaccactgctcacttgagaaggctttgaaagcttttttctaatagcctcttcattttctgagtcttcttcctctgcactgagtgaggagctttcttcagattcatcttcagatgcaaacacctcttcagctgtgcaatgcccagaatcgaaagtggggagagctgctttcttcatcagcaaagacttctccagattcacacggtcactctggcaattagctggtgacagccctgctttactaccttctccagcagcctttgatcctgaaatgcccttctctcctgcagtgcagtcctcttcttcactgctttcatcagcttcctccgcttccccttcttccgctgagctcctctcaaggtcatcgtcactgtcagcaaatgctggcaaatccatttcactgtcttcttccaactcaagtttccgtcgtttgatgcccttaacagccatatactgatcagtcatctcagcattttcctcctcttctgcttcctcatcactagagccgttttccaacccgtcatcttcagacatttcatcatcttcttcatcatcactatctccagattcatcttcatctccgaaaatggctttccgacgcattcgaccagtgttcaagtccatttgtttttcctcctttggcatcattagcccttgattatctatatcctctgacccaagtggcttggaatcagaaaacagcgtcactcgacttgaagccatcttggcatcaatggtggagtgggtagagatgagactctggaccagctcatgggtgggccccacttcatccgatacctgaaaaacgtggctgccaccaaggtcaacatagacagcgtctttgtcatacagcacacccccaactccagaaagaggcgcataaaccagcttctccttctcatttaaacagcgcttcttttgttgttcaggaagagcgcaagggtctgggaggaaactgatgtcactcacggcaaaatctcctacccctggcatgtgaatttggcttttatctttgaagtgtgctcctcttaaataaccataaagtgacacctgcaggtcacatttgatgtttgtttggatatcctccgggtttgtcaaatcttccatccttttaactgtctgccaggatataagggtgagaagtttgccatgtgagaggcctaaacttcataactgtaataaaatggcccagattgtggatttcttggttttgatattctccatgcaccattccagaaaggtagaacagcttggcacccgggtaaacttccgtccagaacctgtgttttaatcgcttctttgtcttcttcagttgcttattatgcttgaaggagtcgaggtgggtgagaactcccataattttaggaaagccatgtacttgacagatgtttagaaactcaaacgtttccatttcaaacccaaagctggcatctataagcatcagtaccagatctgctacttcaaccaagatcaatcatcatgttaatgtcacacccacaatcaataatggttgagtcggagctttttacctgacacaatcgtcacagggcctctgaatctcggtcaacttctgccgggtgaagttccgaaatgaggcattatatcaaagtgctctttccaacttttggaggccccatcaccactaccacttattggtgggggctctagtggagttcgaatcaaccactggaatatgatgcttttttgtcttcaaatcctgagtcctgtgaaaggatcgagccatccacacagcagactgaaatgcaaaaagctttgggatttctcttccaggcatcttcttcggtctcctagctggagatcctgcagaagccgcttctttttctttgcagctttgggtccactgtttttctttctgtgtttcttctggtccttagcctaccatagtggctatttaccaataacaagtaactctaacccaactaccccaggacacctccgccagatgagaaatatgccgctcctcgggagcaaagatgacccggaggaccgggggaggaccttcccacgcgcacgactcgcgatcttcccagtgccccagagccagggaccccaccgccgcctaccccagcccgcggcaccaccgaacctgctcacagctgcaactcctcagaatctgttacaaaacctagagaaatgtgactcctacgagccactgttatgcaaaggtcgaggccgacgtcgcttccggagcagcatggcggccactgaggaggagaggctagcagggagcgcgctgcctcgaggttttgccggagcgctgttcttcactcgagacaagcaggtctttcccacagaagacagatcaaatctaaatcgctgtggtttccgaggctcttcatacctgggtattctgttcaatccatcaaaggctcctggaacagctcatccttatgatagtggccacattgcaatgacctacactggcctttcatgcttacttattcttggagacgacttaagccgagtaaataaagaagcttgcttagcaggcttgagagcccttcagctggaagatgggagtttttgtgcagtacctgaaggcagtgaaaatgacatgcgatttttgtactgtacttcctgtatttgctatatgctcaacaaccggtcaggcatggatatgaaaaaagccatctcctatattagaagaagtatgtcctatgacaatggactggcacagggagctggacttgaatctcatggaggatctactttttgtgccattgcctcactatgtctgatgggtaaactagaagaagttttttcagaaaaagaattgaacaggataaagaggtggtgtatgaggcaataa

SEQ ID NO: 134385 - DNA, 467 bp, Homo sapiens
  misc_feature (1)...(467): n = a,t,c or g
cgccttccggcntnttattgaacctagaggctagacaccngcccgaancccggncgacccacgcgtccgcggacgcgtgggcggggctggctcgacccagctggaggtctcggcgtccgcgtcctgcggtgccctgggacccgccgacatgaatcccatcgtagtggtccacggcggcggagccggtcccatctccaaggatcggaaggagcgagtgcaccagggcatggtcagagccgccaccgtgggctacggcatcctccgggagggcgggagcgccgtggatgccgtagagggagctgtcgtcgccctggaagacgatcccgagttcaacgcaggttgtgggtctgtcttgaacacaaatggtgaggttgaaatggatgctagtatcatggatggaaaagacctgtctgcaggagcagtgtccgcagtccagcgtatagcaaatcccattaaacttgctcggg

SEQ ID NO: 134386 - DNA, 452 bp, Homo sapiens
tttcgtcccagcttgaggtctcggcgtccgcgtcctgcggtgccctggggtctcccgaggaccttgtacccgcgcggtttccttgggctggctttggacgacgctttcgccttcctgctgcctaggatccgccgacatgaatcccatcgtagtggtccacggcggcggagccggtcccatctccaaggatcggaaggagcgagtgcaccacggcatggtcagagccgccaccgtgggctacggcatcctccgggagggcgggagcgccgtggatgccgtagagggagctgtcgtcgccctggaagacgatcccgagttcaacgcagacacctcattgctttctgactgaccaaggcgcagcgcagtttgcagcagctatgggggttccagagattcctggagaaaaactggtgacagagagaaacaaaaagcgcctggaaaaagagaagcat

SEQ ID NO: 134387 - DNA, 1359 bp, Homo sapiens
atggaggatgaggccatgagccaaggatacaggcagcttgtagaagcaagaaaagacagattctcttctggagcttcccgaaggaactcaaccctgcagacccagtttgaatttctgaccaccagaactgcgcagaaccgttgtgaccagagcggtggcgggctgagcggtttcgagccggcgtcggggagcggcggtaccgggcggctgcggggctggctcgacccagctggaggtctcggcgtccgcgtcctgcggtgccctggggtctcccgaggaccttgtacccgcgcggtttccttgggctggctttggacgacgctttcgccttcctgctgcctaggacccgccgacatgaatcccatcgtagtggtccacggcggcggagccggtcccatctccaaggatcggaaggagcgagtgcaccagggcatggtcagagccgccaccgtgggctacggcatcctccgggagggcgggagcgccgtggatgccgtagagggagctgtcgtcgccctggaagacgatcccgagttcaacgcagaggccttccttctcaacgtctgccctctcatctttcaaatgtcctctattccgcatattgaggaagaaaagagtagagctgaaaagagggaaagcaaagattatggggggaaaggtgggacttttaacagcgtactgtggaccttggcttttcccagccaaggttgtgggtctgtcttgaacacaaatggtgaggttgaaatggatgctagtatcatggatggaaaagacctgtctgcaggagcagtgtccgcagtccagtgtatagcaaatcccattaaacttgctcggcttgtcatggaaaagacacctcattgctttctgactgaccaaggcgcagcgcagtttgcagcagctatgggggttccagagattcctggagaaaaactggtgacagagagaaacaaaaagcgcctggaaaaagagaagcatgaaaaagcttctgcagagatctgcccgagctttcagcgtgtcatcgaaaccctcctcatggacacaccctccagttatgaggctgccatggaacttttcagccctgatcaagacatgagggaggcaggggctcagctgaagaagctggtggacaccctcccccaaaagcccagagaaagcatcattaagctcatgagctcaagccccctccccttatatcagaccatctactcaacatcacagactctactcaacatcacagactccacttgtccaacagaaccagtgatcctgccccagtctgttcctatctcagtcatcctaaagcacatacctttgcgctggtgggccatccgcctggatgagtattgtttcatcggataa

SEQ ID NO: 134388 - DNA, 1467 bp, Homo sapiens
tggcgggctgagcgggttcgagccggcgttggggagcggcggtaccgggcggatgcggggctggctcgacccatcttgaggtctcggcgttcgcgtcctgcggtgccctggggtctaccgaggaccttgcacccgcgcggcttacttgggctggctttggacgacgctttcaccttactgctgcctaagatccgccgacatgaatcccatcgtattggtccacgggggcggagccggtcccatctccaaggatcggaaagagcgagtgcaccatggcatggtcagagccaccaccgtgggctacggcatcctccgggagggcgggagcgccgtggatgccgtacagggagctgtcgtcgccctggaagacgatcccgagttcaacgcaggttgtgggtctgtcttgaacacaaatggtgaggttgaaatggatgctagtatcatggatggaaaagacctgtctgcaggagcagtgtccgcagtccagtgtatagcaaatcccattaaacttgctcggcttgtcatggaaaattttcctcattgctttttgactgaccaaggcgcagcgcactttgcgggagctatgggggttccagagattcctggaaaaaaactggtgacagagagaaacaaaaagcgcctggaaaaagagaagcatgaaaaaggtgctcacaaaacagattgtcaaaaaaacttgggaaccgtgggtgctgttgccttggactgcaaagggaatgtagcctacgcaacctccacaggcggaatcgttaataaaatggtcggccgcgttggggactcaccgagtctaggagctggaggttatgccgaccatgacttctgagccgtctcaaccacagggcatggggaaaggcttcttgaaggtgaacctggctagactcaccctgttccacatagaacaaggaaagacgttagaagaggctgcggaccctatcggttgggttaaatgaagtcaagggttaaaggtttaggtggcctcatcgtggttagcaaaacaggagactgggtggcaaagtggacctccacctccatgccctgggcagccgccaaggacggcaagctgccacttcggaattgatcctgacgatactactatcaccgaccttccctaagccgctggaagattgtattccagatgctagcttagaggtcaagtacagtctcctcatgagacatagcctaatcaattagatctagaattggaaaaattgtcccgtctgtcacttgttttgttgccttaataagcatctgaatgtttggttgtgggggcgggttctgaagcgatgaggagaaatgcccgtattagggaggattacttgagccctgggaggttcaaagcttgaggtgagcccatgatttactccacttgcacttccagcctgggccaacagtagccaggccctgtatcaagaaaaaaaaaaaaaaaaaaaaaaaaaaagggcggccgct

SEQ ID NO: 134389 - DNA, 1419 bp, Homo sapiens
atggccccagaagttgcagcagtagagaagaatggtggctacaaccaactctgtgatatctgggcagtaggaataacagcaattgaacttggagaacttcagccacctatgtttgatctccacccaatgagcccacaagaaaatgggtcacaccacacttttgttgcacagccaggtctctctagagccctagcagttgaactgttagacaaagtgaacaatccagataaccacgcacattacactgaagcagatgacgatgactttgaggcgaattactattctgatctctgttacataaactggcttttacctgatcttgaccttcagggattgtcatcagacccaaatttcatgttacagtggaatccttttgttgatggtgcaaatactggcaaatcaacctcaaaacgtgcaataccacctcccctacctcctaagccaaggataagcagttaccctgaagacaactttccggatgaagaaaaagcatcaaccataaaacattgtcctgattcagaaagcagagctccccaaattctcagaagacagagtagcccaagttgtgggcctgtggcagagacttcttctattggaaatggtgatggtatttcaaaactgatgagtgaaaatacagaaggatcagcacaagcaccacagttaccacgaaaaaaggacaaacgagacttccctgtagtcagaaacccttacacgggacataaatacctctgtggagctttacagtctggaattgttttacttcagtggtatgagccaatgcagaaattcatgttgataaagcactttgattttcctttgccaagtcctttgaatgtttttgaaatgctggtgatacctgaacaggaataccctatggtctgtgtagctattagcaaaggcactgaatcgaatcaggtagttcagtttgagacaatcaatttgaactctgcatcttcatggtttacagaaattggtgcaggcagccagcagttagattccattcatgtaacacagttggagagagataccgttttagtgtgtttagacaaatttgtgaaaattgtaaatctacaaggaaaattaaaatcaagtaagaaactggcctctgagttaagttttgattttcgcattgaatctgtagtatgccttcaagacagtgtgttggctttctggaaacatgggatgcagggtaaaagcttcaagtcagatgagagtaatttcccgccttgtgactctcgtgtctccaaagaagaagcccaactccctttcccaacacctagcagctacggtgcagactcctccaaccagacttacgcacacaagtctcagtctgaaagagagcagcacaaggaagtacgtgctgtcctgaaccattgttctggcttggatggtggagaggagtctggcctttgtgggtag

SEQ ID NO: 134390 - DNA, 278 bp, Homo sapiens
tatgccttcaagacagtgtgttggctttctggaaacatgggatgcagggtaaaagcttcaagtcagatgagagtaatttcccgccttgtgactctcgtgtctccaaagaagaagcccaactccctttcccaacacctagcagctacggtgcagactcctccaaccagacttacgcacacaagtctcagtctgaaagagagcagcacaaggaagtacgtgctgtcctgaaccattgttctggcttggatggtggagaggagtctggcctttgtgggtag

SEQ ID NO: 134391 - DNA, 3092 bp, Homo sapiens
gcggctgagtggcggcggcggcgacggcaaacccggagctgccggccggcgcgcgggaggaggacgcgggtgcggtctaggaagtaggtcccgggctccgcgctcaacaaagacggggccgcccccattagacggagctgcgggcggaggctccatgttgggaagcggcgccgttcgtgcttgttagcgggaatccgggagccgcggggtgagctggcgggggccgggccctaagtgaagatggaggccccgctgcggcctgccgcggacatcctgaggcggaacccgcagcaggactacgaactcgtccagagggtcggcagcggcacctacggggacgtctataaggccagaaatgtacacacaggagagctggctgcagtaaaaatcattaaattggagcctggagatgatttttctttgattcaacaagaaatatttatggttaaagaatgtaaacattgtaacatcgttgcctactttgggagttatcttagtcgggaaaaactatggatttgtatggaatactgtggtggcggatcacttcaagatatttaccatgttactggaccattatcagaattgcaaatagcctatgtatgcagagaaaccttacagggtcttgcctatttgcatactaaaggcaaaatgcatagagatatcaaaggtgctaatattttattgacagaccatggcgatgtaaaattagctgactttggtgtggctgcaaaaataacagctaccattgcaaaacgaaaatctttcattggcaccccttactggatggccccagaagttgcagcagtagagaagaatggtggctacaaccaactctgtgatatctgggcagtaggaataacagcaattgaacttggagaacttcagccacctatgtttgatctccacccaatgagggctctcttcttaatgtcaaaaagtaattttcagcctccaaaactaaaggacaaaacaaaatggtcatcaacattccataattttgtcaaaatagcactaaccaaaaacccaaaaaaaagaccaacatgcttgaaagacttctgacatcacaccttttgttgcacagccaggtctctctagagccctagcagttgaactgttagacaaagtgaacaatccagataaccacgcacattacactgaagcagatgacgatgactttgagccccatgcaatcattcgtcataccattagatctacaaacaggaatgccagagctgaacggacagcttcagaaataaattttgacaaattacaatttgaacctcctctgagaaaagaaacagaagcacgagatgaaatgggattgtcatcagacccaaatttcatgttacagtggaatccttttgtttgatggtggcaaattactggcaaatcaacctcaaaacgtgtcaataccacctcccctacctcctaagccaaggataagcagttaccctgaagacaactttccggatgaagaaaaagcatcaaccataaaacattgtcctgattcagaaagcagagctccccaaattctcagaagacagagtagcccaagttgtgggcctgtggcagagacttcttctattggaaatggtgatggtatttcaaaactgatgagtgaaaatacagaaggatcagcacaagcaccacagttaccacgaaaaaacgacaaacgagacttccctaaaccagccatcaatggccttccacccaccccaaaagttctgatgggagcatgcttttcaaaagtttttgatggctgtcctttgaaaattaattgtgcaacatcctggatacatcctgatacaaaagatcagtacattatttttggaactgaagatggtatttacacactgaatctcaatgagctacatgaggcaacgatggaacagttatttccacggaagtgtacttggctgtatgttatcaataatactttaatgtcattatcagaaggaaaaacctttcagctctactctcacaatcttatagctttgtttgaacatgccaaaaaaccagggttaggctgccccatatttcaaactcacaggtttccagaccgaatactaccaagaaaattcgctttaacaacaaagattcctgatacaaaaggctgccacaaattgttgcatagtcagaaacccttacacgggacataaatacctctgtggagctttacagtctggaattgttttacttcagtggtatgagccaatgcagaaattcatgttgataaagcactttgattttcctttgccaagtcctttgaatgtttttgaaatgctggtgatacctgaacaggaataccctatggtctgtgtagctattagcaaaggcactgaatcgaatcaggtagttcagtttgagacaatcaatttgaactctgcatcttcatggtttacagaaattggtgcaggcagccagcagttagattccatttcatgtaaccaccagttgggagagagataccgttttagtgtgtttagacaatttggtgaaaattgtaaatcttacaaggaaaattaaaatccaagtaagaaactggcctctgagttaagttttgattttcgcattgaatctgtagtatgccttcaagacagtgtgttggctttctggaaacatgggatgcagggtaaaagcttccaagtccagatggaggttacccccagggggatttccagatggaaaccaggagttttcccgcttattaggatcagaccagggttgtcggttttggaaagtaggccaacagaaaatccttactgcacacagcaatctctacatcttggctggacatgaaaatagttactaagcaacagaaactgatctcaaatgacaggaaaatgaatatactccattgaaaggaaaaataaggaaattcaatacaaactgcactatgatttgctttaactattatgggttatattggcaaatggatctgtactttaggggtaggaattcaatattttctggcagctgggaaacagctaagtctatcctccttggccactggtgtggtggggttatatccaagttttgccttaattaaaagctatgagacaaatagtcctctagttccaggaaaaaaaaaa

SEQ ID NO: 134392 - DNA, 389 bp, Homo sapiens
  misc_feature (1)...(389): n = a,t,c or g
nnnnnnnnnnnnnnnnnnnnnnnnnnnnnnnnnnnnnnnnnnnnnnnnnnnnnnnnnnnnnnnnnnnnnnnnnnnnnnnnnnnnnnnnnnnnnnnnnnnnnnnnnnnnnnngaactactatcttttattgtcttcttcactatcccccactaaagcaggttcctggtgggcaggaactcctccnnnnnnnnnnnnnnnnnnnnnnnnnnnnnnnnnnnnnnnnnnnnnnnnnnnnnnnnnnnnnnnnnnnnnnnnnnnnnnnnnnnnnnnnnnnnnnnnnnnnnnnnnnnnnnnnnnnnnnnncaaggtgctcaataaatagatctagctacagtagtgttccccactggtcccctgtaccttgatgccggacaaagcgtacgcgtggt

SEQ ID NO: 134393 - DNA, 489 bp, Homo sapiens
tttgatgtcaccgagttgtgcggccagtggttgagccgtggaggggaaattgagggctttcgccttagcgcccactgctcctgtgacagcagggataacacactgcaagtggacatcaacgggttcactaccggccgccgaggtgacctggccaccattcatggcatgaaccggcctttcctgcttctcatggccaccccgctggagagggcccagcatctgcaaagctcccggcgccgtgctgcgtgccgcaggcgctggagccgctgcccatcgtgtactacgtgggccgcaagcccaaggtggagcagctgtccaacatgatcgtgcgctcctgcaagtgcagctgaggtcccgccccgccccgccccgccccggcaggcccggccccaccccgccccgcccccgctgccttgcccatgggggctgtatttaaggacacccgtgccccaagcccacctggggccccattaaagatggagagaggaa

SEQ ID NO: 134394 - DNA, 711 bp, Homo sapiens
atgcggctgctgccgctgctgctaccgctgctgtggctactggtgctgacgcctggccggccggccgcgggactatccacctgcaagactatcgacatggagctggtgaagcggaagcgcatcgaggccatccgcggccagatcctgtccaagctgcggctcgccagccccccgagccagggggaggtgccgcccggcccgctgcccgaggccgtgctcgccctgtacaacagcacccgcgaccgggtggccggggagagtgcagaaccggagcccgagcctgaggccgactactacgccaaggaggtcacccgcgtgctaatggtggaaacccacaacggtgagctcggaggggcaggggagccgggaggggggcccccagggggcgccggagtgccggggccacgggtaggaagtgactggcagaagaaactggctggaggaagaggacaccccggggcaaagggaacctccacggagaagaactgctgcgtgcggcagctgtacattgacttccgcaaggacctcggctggaagtggatccacgagcccaagggctaccatgccaacttctgcctcgggccctgcccctacatttggagcctggacacgcagtacagcaagccgctgcccatcgtgtactacgtgggccgcaagcccaaggtggagcagctgtccaacatgatcgtgcgctcctgcaagtgcagctga

SEQ ID NO: 134395 - DNA, 2773 bp, Homo sapiens
ctgcagccttgacctcccaggatcaagtgatcctcccaccttagcctccagagtagctgggaccacaggtgtacattttttaaaagtgttttgtagagatagggtctcactatgttacccaggctggtctcaaatgcctggattcaagtatcctcccatctctgcctcccaaaagtgctaggattacaggcgtgagcaccccgcctggcctgaactactatcttttattgtcttcttcactatcccccactaaagcaggttcctggtgggcaggaactcctcccttaacctctctgggcttgtttcctcaacctttaaaatgggtgttatcagagtccctgccatctcagagtgttgctatggtgactgaatgagttcattaatgtaaggcacttcaacagtgcccaaggtgctcaataaatagatctaactacagtagtgttccccactggtcccctgtgccttgatgccgggcaaaggaatagtgcagacaggcaggaggaggcagagagggagagagagggagtgggagtgggggaacgtcagggatggagaccccaggcaggcgcccaatgacacagagatccgcagtcctctctccatctttaatggggccccaggtgggcttggggcacgggtgtccttaaatacagcccccatgggcaaggcagcgggggcggggcggggtggggccgggcctgccggggcggggcggggcggggcgggacctcagctgcacttgcaggagcgcacgatcatgttggacagctgctccaccttgggcttgcggcccacggtagtacacgatgggcagggggttccagcgtctgcggcaacgcaaaagggcgccgccgagccggcggtgtattattctggtttatacaggggccaagaccttgtctatatctgcgtgtcacagtctccaatatataaggggcagggcccgagggcagaagttggcatggtagcccttgggcctcgtggatccactttccagccgagagtccttgcggaagtcaatgtacagctgccgcacggcagcagttcttctccgtggaagctgaagcaatagttggtgtccagggctcggcggtgccgggagctttgcagatgctgggccctctccagcgggggtgggccatgagaagcaggaaagggccgggttcatgccatgaatggtggccaggtcacctcgggcggccggtagtgaacccgttgatgtccacttgcagtgggttatccctgctgtcacaggagcagtggggcgctaaggcgaaagccctcaatttcccctccacggctcaaccactgccgcacaactccggtgacatcaaaagataacccactcttgcgagtccgctggtgccagccagccggtttgctgaggtatcgccaggaattgttgctgtatttctggtacagctccacgtgctgctccacttttaacttgagcctcctcagcagacgcagctctgcccgggagagcaacacgggttcaggtaccgcttctcggagctctgatgtgttgaagaacatatatatgctgtgtgtactctgcttgaacttgtcatagatttcgttgtgggtttccaccattagcacgcgggtgacctccttggcgtagtagtcggcctcaggctcgggctccggttctgcactctccccggccacccggtcgcgggtgctgttgtacagggcgagcacggcctcgggcagcgggccgggcggcacctccccctggctcggggggctggcgagccgcagcttggacaggatctggccgcggatggcctcgatgcgcttccgcttcaccagctccatgtcgatagtcttgcaggtggatagtcccgcggccggcgggccaggcgtcagcaccagtagccacagcagcggtagcagcagcggcagcagccgcagcccggagggcggcatgggggaggcggcgccccccggcactgccgagagcgcgaacagggctggtgtggtggggaggccccgaacctgcaggggctgggggtctcccggcaaaaggtaggagggcctcgagggaaagctgaggctcctcagggagaagggcgcagtggtggaggggaggcttggaccgggggtgtctcagtatcccacggaaataacctagatgggcgcgatctggtaccagaaggtgggtggtcttgaataggggatctgtggcaggtcggagagagatccgtctcctggaggagaaagggtctaggatgcgcgggggctcaggagacaggccggggatgaaggcggcgtgcagggggtgcgcccgaggtctggggaaaagtctttgcgggaggccgggtcggcgactcccgagggctggtccggaatgggggcgcctgagggacgccgtgtagggggcagggagggagcaagcgtccccggcggcaaagggaggcggtctggggtccccaagtcctgcctcctcgcggggcagcgtcgcgccaagaggtccccgcgcctccggctcccagcggcaacggaaaagtctcaaaagtttttttcctcttctcccgaccagctcgtccctcctcccgctcctcctccccctcctccccgcagtggcgggggcggcggcggctcgtctcagactctggggcctcaggctgctcctcggcgactccttcctccgctccgggccgaggccggccccgcgggcggctcagagccggggggggtgccccggacggggcgtcccccctgcccccggccggggccctcgctgtctggctgctccgcggagggaggt

SEQ ID NO: 134396 - DNA, 418 bp, Homo sapiens
  misc_feature (1)...(418): n = a,t,c or g
gatggtccagttccatttcaccaacaaggtgtctggtgtctctcaaaggcctctaccgcatcatgggcaacggcttcgcgggctgcgtgcacttcccccacacggcgccctgtgaggtgcgcgtgctcatgctcctgtactcgtccaagaagaagatcttcatgggcctcatcccctacgaccagagcggcttcgtcaacggcatccggcaggtcatcaccaaccacaagcaggtccagcagcagaagctggagcagcagcagcgaggaatggggggacagcaggcacccccagggctggggcccattctggaggaccaagccaggccctcacagaatctgctccagctccgcccaccgcagccccagcctcagggtaccgtaggggcctctggggccacggngcagccccagcccca

SEQ ID NO: 134397 - DNA, 382 bp, Homo sapiens
ttcgcgggctgcatgctgttcccccacatctccccctgtgaggtgcgcgtgctcatgctcctgtactcgtccaagaagaagatcttcatgggcctcatcccctacgaccagagcggcttcgtcagtgccatccggcaggtcatcaccacccgcaagcaggcagtgggacctggtggtgtcaactcaggcccagtccagatcgtcaacaacaagtttctggcatggagtggtgtcatggagtggcaggagcccaggcctgagcccaacagtcggtccaagaggtggctgccatcccacgtctacgtgaaaccagggggagatcctgaggaccgagcagtggccaaggaagctgtacatgcagcttcatcccgcagcagctgct

SEQ ID NO: 134398 - DNA, 2370 bp, Homo sapiens
tttttttttttttttatcatcaaatcggatctttactcaactatggtgaatgccatggaacataatacaaacatggatgttactggagtttatatttttaaattcaaaattgaaaaaaatacaaattgaaaaatagaaatatttaattattaaaattttctctttcataattctttttgcgcctttgagttgaagccaaaaggctgggcgtcttctttttccacaccgaggatgtcagtgtcagggcctcgggtgggcacggtgggggacggggcagtttaggaattcagccttgaatccttcaactgggaaccgatgtttaatttgattcaggttccgtaacgggaaaacagctgtttcacaagcgtgggggtactccccaaaccacagatattccagggaccaactaactgggagataggttgtagggatcttcaccatctttcacacagacttgtatttagggacccggcgccgtattgcactgtaggttcaattacctatttatgggtctgcattcacacaaggaaaccatctgcccaaccaagggcaaactggacaatgtctgttccttctcatgagtctggattccgagagcctttgggggaatttggtcttcaaccccaggacgtaggtgaatacagtccgggccacctctttcatttctgaaagccgactgcagcacaggaaagagctaaaggttttttttccttgccggtggattccccaggaccaagcatacaccatcatacattcaagtagctgtttgtggacatccacctccaggagagaccaccctgcgtccaagcctgtctggatccccctgccctcgggacgtctctgaggacatcttcaggtccctcaccttgccacgtcccaaacctgttccctgctgggtatctatcctggcagtggagcccgagggggaagttgtgcgggccggactgggcaggtggtggatgcaggagtgggggccccaactggggctgcccaggccctggtgcggcggaggcagcagcgcaggagcccctggtggcggtggtgggttgaggaggaggcttgcagctgagggttggccccagggttctggggccgaaggatgggtccagggggggtgggccagaagctgctccaggagggccttgaggggcacctggcgggggctgggcagtaccttggggctggggctgccccgtggccccagaggcccctacggtaccttgaggctggggctgcggtgggcggagctgaagcagattctgtgagggcctggcttggtcctccagaatgggccccagccctgggggtgcctgctgtccccccattcctcgctgctgctgctccagcttctgctgctggacctgcttgtggttggtgatgacctgccggatgccgttgacgaagccgctctggtcgtaggggatgaggcccatgaagatcttcttcttggacgagtacaggagcatgagcacgcgcacctcacagggcgccgtgtgggggaagtgcacgcagcccgcccctcggccccccatgccctggatcacgaagccgttgcccatgatgcggtagaggcctttgagagactccagtccttgttggtgaaatggaactggaccatccttgagttccggaacaaaggcccagggtggtctacagttctcgccatgattcacgtagacctggcagggcagtgaccgcgtcagcttggtgttggcatccactgaggcaggtttgggtttcatggacggtgccccggctgtgccgtgggagccaggccggagccaggggccacagtggagaccagatgggctgggaagcaggtggtggcttgggggcgccagggggtcctgggggagttggggagctggggcctggctgaaggggggacccactccgggagcagttgttggagaggggtgatgggcgagaagcgagggcccagcccagccttctggttttggcagcctccactgcattctgcgcggccacctgagctgcactcaggtcccgggaaccaggcagcacgagtccccgaaccagcacatgtgcctcgggtcctggctcacatctgtcggaggctgcagcggctccacaaggccgggggggctgccttctcaaacagaagccgaagcgcaggcagctccggggagacacaatggagaagtggatcccccgcacaactgctgtgtggctggacggcaccagccctccccaatctgctgcacaaattctcagttgtgcatccagagtacgtggtgctctcaacagcaggcaacagtatgggggtgagttgcagatgaggaggcagacccggtgcgtctggccctgcaggggcagagcggtcagcccccaggttgccatcatccccat

SEQ ID NO: 134399 - DNA, 1515 bp, Homo sapiens
atgagtttcagtcaagattcttggtgccagcattaccaagctcctctgattgatcgaaggcgaaaagacggagcccgcccggccaggacacgccagccccttcctcggccggtggggcctcgacccccgccgcctcgaggaggcgcggcgcctgcagtccacgcggccgagagcgggttagcggggagggccgtccacgacggaggtttctctgtggttacctcagcggcgctcttcgcaatattgaagttggggcagctgaagagccccaccaccttcacctgcagcggccgctccggcagcgacggcgagccgcacctagcgtgcgggggcccgcacggctgcggccttgccatggccgcgcccggggacgcccggggcattccgtacttgagcaagcaccgggccgaccgcatgaggcgcctgggagactttctgaaccaggagagcttcgacctggctttgctggaggagggcttggctttcagcggaatcattggcagtggcctctgtgtcttctccaaacatccaatccaggagcttacccagcacatctacactctcaatggctacccctacatgatccatcatggtgactggttcagtgggaaggctgtggggctgctggtgctccatctaagtggcatggtgctcaacgcctatgtgacccatctccatgccgaatacaatcgacagaaggacatctacctagcacatcgtgtggcccaagcttgggaattggcccagttcatccagtgtgtgagcctgggcttgaaatgggaagtgggatgggacccaggggctgagggtgaacaaggccccagtcatggggaagagctggtgatggaagaactcccgcctcaccaacctggttcccccagccacacatccaagaaggcagacgtggttctgttgtgtggagacctcaacatgcacccagaagacctgggctgctgcctgctgaaggagtggacagggcttcatgatgcctatcttgaaactcgggacttcaagggctctgaggaaggcaacacaatggtacccaagaactgctacgtcagccagcaggagctgaagccatttccctttggtgtccgcattgactacgtgctttacaaggcagtttctgggttttacatctcctgtaagagttttgaaaccactacaggctttgaccctcacaggggcacccccctctctgatcatgaagccctgatggctactctgtttgtgaggcacagccccccacagcagaaccccagctctacccacggaccagcagagaggtcgccgttgatgtgtgtgctaaaggaggcctggacggagctgggtctgggcatggctcaggctcgctggtgggccaccttcgctagctatgtgattggcctggggctgcttctcctggcactgctgtgtgtcctggcggctggaggaggggccggggaagctgccatactgctctggacccccagtgtagggctggtgctgtgggcaggaggtcaatggcttatatag

SEQ ID NO: 134400 - DNA, 1696 bp, Homo sapiens
agcggccgcgaccgccggggacgagcttggaggaaaaggaaccgggagccgcccacccgggggcgctctccggacccccagggtcctagcgcgcggcccttaccgagcctgggcgcccggatttcggcagcggatcgcctttccgggttggcggcccgcctgattgggaacagccggccggttgccggcgcgaacgcgggagtcgggcccgacctgagccacgcgggcttggtgcccacctgtgcgcgccgcctgcgaagaaagaacggtctagggagaaggcgccgccggccgcccccgtccccaccgcggccgtcgctggagagttcgagccgcctaacgacccttggaacttcccaaccattgaagttcaactttttcccttgcgacttgcggatttttcaaaccttcaactgcttggggcatttccggtactttgagcaaagcaccggggccgaccgcatgaggcgctttgggagacctttctgaacccaggagagcttcgacctggctttgctggaggaggtgtggagtgagcacgacttccagtacctgagacagaagctgtcacctacctacccagctgcacaccacttccggagcggaatcattggcagtggcctctgtgtcttctccaaacatccaatccaggagcttacccagcacatctacactctcaatggctacccctacatgatccatcatggtgactggttcagtgggaaggctgtggggctgctggtgctccatctaaatggcatggagctcaacgcctatgtgacccatctccatgccgaatacaatcgacagaaggacatctacctaacacatttggtggggccaagcttgggaattggcccagttcatccaccacacatccaagaaggcagacgtggttctgttgtgtggagacctcaacatgcacccagaagacctgggctgctgcctgctgaaggagtggacagggcttcatgatgcctatcttgaaactcgggacttcaagggctctgaggaaggcaacacaatggtacccaagaactgctacgtcagccagcaggagctgaagccatttccctttggtgtccgcattgactacgtgctttacaaggcagtttctgggttttacatctcctgtaagagttttgaaaccactacaggctttgaccctcacagtggcacccccctctctgatcatgaagccctgatggctactctgtttgtgaggcacagccccccacagcagaaccccagctctacccacggacccagcagagaggtcgccgttgattgtgtgtgcttaaaggaggccttggacgggagcttgggtctgggcatggcttcaggctcgctggtgggccaaccttcgcatagctatgtgattggcctggggctgcattctcctggcactgctgtgtgtcctggcggctggaggaggggccggggaagctgccatactgctctggacccccagtgtagggctggtgctgtgggcaggtgcattctacctcttccacgtacaggaggtcaatggcttatatagggcccaggctgagctccagcatgtgctaggaagggcaagggaggcccaggatctgggcccagagcctcagctctatgccctactctctggggcagcaggagggggacagaactaaagaacaataaagcttggccctttaaaaaaaaaaaaaaaaaa

SEQ ID NO: 134401 - DNA, 544 bp, Homo sapiens
  misc_feature (1)...(544): n = a,t,c or g
gcgcgcccggccggggaaagcctgtcgggaacccgggagagcctggcccagggcccgacgccgcaaccaccgacgaactcagctctctcgggtctgactcggaggccaacggttcgcnatgcgccgcatcgacaagttcggcttcatcgtgggctcgcaggggccgagcnntntcgtctgcggtgccaaaagggcatcccgccttctctgcggggccgtgcttggcagtacctgtcaggaggcaaggtgaagttacagcagaaccctggaaagtttgacnaagctggacatgtcccctggggacccaangtggctggacgtgattgagcgtgacctgcaccggcagtttcccattccatgagatgtttgtgtcccggggggccacggcagcaggacctattccgtgtgctgaangcctacacgctgtaccggcccgaaggaggntactgcaaggcncaggcgcccattgccgctgtcttgctcatgcatatgncttgctgaacaagccttctggtgcctggtacagatctgtgagaagtacttg

SEQ ID NO: 134402 - DNA, 434 bp, Homo sapiens
tgcgctgcaggaattcggcacgagctcaggcggcgcgcgcggctgggatggcgaacagcaacggagagaatgggccgtgcgtgcccgcggccggggaaagcctgtcgggaacccggcagagcctgagccagggccctgacgccgcaaccaccgacgaactcagctctctcgggtctgactcggaggccaacggcttcgccgagcgccgcatcgacaagttcggcttgatcgtgggctcgcagggcgccaagggcgcgctggaggaagtacccctggaggtgctgaggcagagggagtccaagtggctggacatgctcaagccatggtggtggccgctgcaagagatgcatgtcccccacagcatgtgcccccgaaggactcagcccccaaggactcagcccctcaggatttggctccccaggtctcagcccacc

SEQ ID NO: 134403 - DNA, 510 bp, Homo sapiens
cccacgcgtccgggcggctgacgtggccgctggaagctcatgcggcggccgcggttgggatggctaagagcaacggagagaatgggccgcgcgcgcccgcggccggggaaagcctgtcgggaacccgggagagcctggcccagggccccgacgccgcaaccaccgacgaactcagctctctcgggtctgactcggaggccaacggcttcgccgagcgccgcatcgacaagttcggcttcatcgtgggctcgcagggcgccgagggcgcgctggaggaagtccccctggaggtgctgaggcagagggagtccaagtggctggacatgctcaacaactgggacaaatggatggccaagaagcacaaaaagattcgtctgcggtgccaaaagggcatcccgccttctctgcggggccgtgctttggagtacctggcaggagggcaggtgaagttacagcagaaccctggaaagtttgacgagctggacatgtcccctggggaccccaagtggg

SEQ ID NO: 134404 - DNA, 2086 bp, Homo sapiens
  misc_feature (1)...(2086): n = a,t,c or g
atggcgaagagcaacggagagaatgggccgcgcgcgcccgcggccggggaaagcctgtcgggaacccgggagagcctggcccagggccccgacgccgcaaccaccgacgaactcagctctctcgggtctgactcggaggccaacggcttcgccgagcgccgcatcgacaagttcggcttcatcgtgggctcgcagggcgccgagggcgcctccatcctgggacagacagtcccttctcctcatggaagggtcggagaagggccccctatccgctcatacacagcttcctccactggcactggcaacaggctggaggaagtacccctggaggtgctgaggcagagggagtccaagtggctggacatgctcaacaactgggacaaatggatggccaagaagcacaaaaagattcgtctgcggtgccaaaagggcatcccgccttctctgcggggccgtgcttggcagtacctgtcaggaggcaaggtgaagttacagcagaaccctggaaagtttgacgagctggacatgtcccctggggaccccaagtggctggacgtgattgagcgtgacctgcaccggcagttcccattccatgaaatgtttgtgtcccgggggggccacgggcagcaggacctattccgtgtgctgaaggcctacacgctgtaccggcccgaggagggctactgccaggcccaggcgcccattgccgctgtcttgctcatgcatatgcctgctgagcaagccttctggtgcctggtacagatctgtgagaagtacctgcccggctactacagcgagaaactggaggcgatccagctggacggggagatccttttctcgctgttgcagaaggtgtcgccggtggcccacaagcacctcagccgtcagaagatcgacccgctcctctatatgacagaatggttcatgtgcgccttctcccgaaccttgccctggagctctgtgctgcgtgtctgggacatgttcttctgtgaagagaaaccccaaaaagcttccttgtacttactgcccatcccccatgcaggggtcaagatcatcttccgggtggggctggtgctgctgaagcacgcgctgggctcccctgagaaggtcaaagcctgccagggccagtacgagaccatcgagcgactgcggagcctcagccccaagatcatgcaggaggcctttctggtccaggaggtggtggagttgcccgtgacagagcgccagattgagcgcgaacacctcattcagctgcggcgctggcaggagacccggggtgagctgcagtgccgctccccgcccaggctgcatggtggccaaagctatcttggatgcagaacctggtccccggcctgccctacaaccttcaccatccatccgcctgcccctagatgcccccctccctggctgcaaagccaagcccaagccacccaagcaggcccagatagagcagcggatacagatgaaggggagagggcagctggagaagcccccagccccaaatcaagccatggtggtggccgctgcagggagatgcatgtcccccacagcatgtgcccccgaaggacttcaggcccccaaggacttcaggcccttcaggatttgggttccccagggtcttcagcccaccaccgcttcccagggagagctttgacgtcccaagagagttgagggacacctacttgtaaccctggcagctaaggcctccagggcggggtctcccataataactaccacggttccatgaactgacattccacatcctgccccaccctctgagggccaagctgccctggccactgggctgggctggagtctggctggtccaacacagattctgcctggtccaacacagatatctgcctgagcctccttatttattttctttacaagtggcaactncaaggctggcccagccagggcaggcagaagctaggccctggggggtggggcctccttcagccccctcctcctgggggatgctccccagggttagggtgctggtgtgaggggaaagggtggggtgttctttgtgtaaaatagaaacatggttttgtacagaaataaacagccttgtatagagaaa

SEQ ID NO: 134405 - DNA, 246 bp, Homo sapiens
atgacggtccataataagctcatgaaggggcatttggagcagccacgacactcagtgcacccttgtgtggggcagccctgccctgggccagaccctttgcaagaagtccacttggaggttgggcatggtggctctcgggggctggtccatgggcggctgtggcgtcaggatggagtcctagctgtgacctgtgcccaggagggcgtgatccgagtgaagccccaggtctcagagagcaagctgtag

SEQ ID NO: 134406 - DNA, 382 bp, Homo sapiens
agtcaggttctgtgtatgtctccgcgttttacgctgagcgggtgggcccggcctgcagcattgaactaaatgtcttcccctctggccccaaaaaatgggcagggctgtggcgaccgcggcgatccccctggggacctccgttgcggcttggtcacgaccgtgctcaaccttgagccgatggacgaggatctcttcaaaggaaggcattactgggtaccgggcaagaggctgtttggtggtcatatcgtgggccaagccctggtggctgcagccaagtctgtgagtgaagacgtccacgtgcactccctgcactgctactttgttcgggcaggggacccgaagctgccagtactgtaccaagtggagcggacacgaacagggt

SEQ ID NO: 134407 - DNA, 438 bp, Homo sapiens
agaagatgggcagggctgtgagaccctcattgaccagtatttaagggaccctaacctccaaaagaggtacccattggcgctcaaccgaattgctgctcaggaggtccccattgagatcaagccagtaaacccatcccccctgagccagctgcagagaatggagcccaaacagatgttctgggtgcgagcccggggctatattggtggctctcgggggctggtccatgggcggctgtggcgtcaggatggagtcctagctgtgacctgtgcccaggagggcgtgatccgagtgaagccccaggtctcagagagcaagctgtagccagaggtaccagcttcgcctggggcttcaagaacctcccatctatccccattcctgagacaggagttacagtcccttttggccctcacatccaataaagagactgataccactgg

SEQ ID NO: 134408 - DNA, 406 bp, Homo sapiens
ggcaatctgccggaagagtcaggttctgtgtatgtctccgcgtcttccgcggagcgggtgtgcagggcctgcagcattgaactagatgtcgtccccgcaggccccaaaagatgggcagggctgtggcgaccgcggcgatccccctggggacctccgtagcgtcttggtcacgaccgtgctcaacctcgagccgctggacgaggatctcttcaggtagccggcagctcctgcccagcatcccctcctttagggcagaaacttgatcttgactgccgccgcccggggcccctggctccgggactagtatggctctgcgtgggatgcaccctctgccacgattaggagagaactcgcccccaacagagctggcctctctgctctggcttcctcccttcctctccgagct

SEQ ID NO: 134409 - DNA, 742 bp, Homo sapiens
atgagtgaggccacgtcagtggttgatgtcgaccctggccctaggcccattgatatgactggtcatgtgtctgcagaacggagccccccacctgatgggcagtggggcagtcagctcctggcgcggcagctgcaagatttctggaagaagtcccggaacaccttggcaccccagcggctgctcttcgaagtgaccagcgctaacgttgtcaaggacccgccctccaatacgtggtttgtcgatagcaccgtaatgttgaataccacagacgatcgtttaaggagcaatcttagactcaagtacagaagccatctgacaggaaatagactacagtcgcagaagtgtgaccgccgggggcgatggcgctcccggctcctgcaccggctgcggcacgccttggccggcgacggccccggggaggcggcggccagtccagaggccgagcagtttccggagagctcagagctggaggacgacgacgccgagggcctgtcctcccgactcagcggcaccctcagcttcaccagcgccgaggacgacgaggacgacgaggacgaggacgacgaggaggctggccctgaccagctgcccctcggggatgggacgtcaggagaagacgcagaacggagccccccacctgatgggcagtggggcagtcagctcctggcgcggcagctgcaggatttctggaagaagtcccggaacaccttggcaccccagcggctgctcttcgaagtgaccc

SEQ ID NO: 134410 - DNA, 2807 bp, Homo sapiens
  misc_feature (1)...(2807): n = a,t,c or g
cttcccgggtcgacgatttcgagtcaggttctgtgtatgtctccgcgtcttccgcggagcgggtgtgcagggcctgcagcaattgaactagatgtcgtccccgcaagccccagaagatgggcagggctgtggcgaccgcggcgcttccccctggggacctccgtagcgtcttggtcacgaccgtgctcaacctcgagccgctggacgaggatctcttcagaggaaggcattactgggtaccggccaagaggctgtttggtggtcaagatcgtgggccaggccatgggtggctgcagcaacgtctgtgaagtgaagacgtccacgttgcactcccctgcactgctacttttgttccgggcaggggacccgaaagcttgccagtactgtaccaagtggagcggacacgaacaggggtcgaagcttcttcggttgcgctctgtgaaaggcccgtgaaacatgggaaagcccatcttcaatctgccaaggcctccttccagcaggccccagccaagccccattgcagcaccagttctccatgcccaantgttgccaacaacagaagagctggtttgaattgtgagaaccttatttgaccagtatttaagggaccctaacctccaaaagaggtacccattggcgctcaaccgaatttgctgctcaggaggtccccattgagatcaagccagtaaacccatcccccctgaggccagctgcagaggaatgggagcccaaacagatgttctggggtgcgagcccggggttattattggtaagagtaccccatggaagatggcattgctggcgtgggccgcctatatctccgaactatgccttcttgggcactgcacttgctgccctcacccagtggccaagcacaaggtgccacttccatggtcctccactggacccaatcccatgtgggttccacgcccccttccgagctgacccactggatgctctatgaatgcgagagcccctgggccgggggtttctcgggggttgggtccatgggcggctgtggcgtcaggatggagtcctagctgtgacctgtgcccaggagggcgtgatccgagtgaagccccaggtctcagagagcaagctgtagccagaggtnaccacgtctcgcctggggcttcaagaacctcccctctatccccattcctgagacaggagttacaatcccttttggccctcacatccaataaagagactgataccactggagtggctggcttttaattcccctgggccagacctgcagccttgccttcatcccttaactccaggactccaggggcagagtccctggccttcagccaagaggccttgccagcttgggggcccaccaacaagggaacattgcccccaacctgtgccacagccccccggctgtttataggctggagaggctgtgtcagacttccctgtactacacaagggcaaccccagccaaagctcaccctgagcctagctcaacagaagtttccttgatctgcttcacattctcttttggaacttctaggggctcccagcaccctctgcagcctcccagctattctgttctcatcaggtccttcccctgccttctggggcaacccctctcctcacagtggccttaaatctaggcaagggttagtccagcacctccttgatgagcaattctttgagactggggggtggtgtgggggtaaggcctgcctcctgcagggcttggagccgagcctctgattgacgtttgtccaggcccaggcgccaggagagccggacatgggcctccagaaagggtgccagcaaagggtggaggctcttgtccccaagcagctgcagggccttctcacagcatgcccgggcctctccagggtcttccagctcctggtggcacacggccagcccagccagggtcagcagggggcggtctgggccagagggggtgcccagctgggcttgcagctgccaggcattggcccagagtgccagagcctcacgatagaggccagtacaggtgaggctctgtgcccgccgcagctccggcagcacgaaagaagtcctgcaggtccggggcatggcgcagctcaggcactgcctgcaggtgacccaaaaactgctcaaaggcccggctacggcgggcaatggtctctgcagtaaaattccggcgcagccgcttacgggggaaggagatggcagccattgggccccggaattgccgctgcaggtttcggtgcagccgctcaaagtccgagtaacggcgagagatctgggctggctggcaatctggcggtcctgggccgatcacggcgagggtgtagagctgcagggagggtgggtgtcagggcaaatgcaagttgtccacgggcccgttccctccccatcctggtgccaaggtgttccgggacttcttccagaaatcctgcagctgccgcgccaggagctgactgccccactgcccatcaggtggggggctccgttctgcagacacatgaccagtcatatcaatgggcctagggccagggtcgacatcaaccactgacgtggcctcactcatcctcccagtgtgaggcaggacgtcgtcctcggcgctggtgaagctgagggtgccgctgagtcgggaggacaggccctcggcgtcgtcgtcctccagctctgagctctccggaaactgctcggcctctggactggccgccgcctccccggggccgtcgccggccaaggcgtgccgcagccggtgcaggagccgggaggccatggcaccctggggggagcgcgcgacgctgtgtaccggatcccggaggaggggtaccccagcccgg

SEQ ID NO: 134411 - DNA, 1704 bp, Homo sapiens
  misc_feature (1)...(1704): n = a,t,c or g
agctccgccgccagctccagcctttgctccccctcccaaagtcccctccccggagcggagcgcacctagggtccctcttccggtccccccagcccagctacccggtgagaccaccaggctcggcgggcacccccccgccagcctgcctccctcccgctcagccctgccagggttccccagccatgaatctcttccgattcctgggagacctctcccacctcctcgccatcatcttgctactgctcaaaatctggaagtcccgctcgtgcgccggaatttcagggaagagccaggtcctgtttgctgtggtgttcactgcccgatatctggaacctcttcaccaactacatctcactctacaacacgtgtatgaacgtgggtctacatagcctgctccttcaccacggtctggttgatttatagcaaagttcaaaagctacttacgatggggaaccatggacacgttcaggagtgggagttccngggtcgtttcccacaggccattctgggcgtgtcctggtcaaatcatgacttcacccctctgggagatcctctgggaccttctccatctacctgggagtcagtgggccatctttgccgcagctgtttcatgggtgaggcaagaccgggcgagggcgggagacccattcaccagccacttacttgttttgcgctaaggcgtttaacccgcacgctctatctctttcaaactggaatctggcggctaccatttcggagggcttcttcgaccctcatcgccattgtggcaggccctggtccaagacagtcctcttactgcgatttcttcttacctctattattcaccaaagttcctaaaaggggaaaggaagtttgagttttgccggcataggccccggttcctctccatctcctctcctcgggcagcagcggggagggcaggagggaaggcgggcagaaagatgaagagcttttcccatcccaggggtgacttttttaaaaaccccacctctttgtgctcccccatcccgccctcctgcccgggtttaaaggggaacagtgcgaggatcccaggtctttggggagctcagagacttggggctgtttgtagttttttggccttttagacaaaaaaaaaaaaaatcttttccacctctttagtttttggattctgaatgactcggttttttttctacctctggtggcccccaatttttttataaagtggtttttgagtgtccctatggggcccggggcaagggtcccaagatctttttcccttcccccagggccccctcgggctcccctccccaagatccccaccccccagccccccactgggttgcccaaacacctaaatctgccggacaccccatctgcccccacctccctgcccatgggccattgaacccgcgaccccccactaaaattttttaggattcggggatatggggagaaaagggagggccaaggaaagggctccccctgattttttttcatagtaattttttttccccagagtttgaattttttgggtcttctcctgggttttttggcaaattatgggggggccgggggctcaagtgcgggaagggggctggcccgaaggatcccatggctctcacaccatgtttttgtacagaactgatggttgaatctttggttctcttgaaataaacagaagagaaatgaaacctttaaaaaaaaaaaacaagggcggccgct

SEQ ID NO: 134412 - DNA, 1359 bp, Homo sapiens
atgcccccgcgcgcgccgccggcctcagtttcccgggggcggatgggcgggcgggcgcggcggcggcggcgggagatgttcgcggtacgcggccccggacccgtgggggacgtcgaggggtctcggggcgccgcgctcagctccccggccccgcggccctggacaccgctccaggaccctggcggctgggaccccaggaagaaaaccgtctaccggagtctgtgcctggccctggccctgctcgtggccgtgacggtgttccaacgcagtctcacccctggtcagtttctgcaggagcctccgccacccaccctggagccacagaaggcccagaagccaaatggacagctggtgaaccccaacaacttctggaagaacccgaaagatgtggcccaggcctgggacgtgaccaccactaactgctcagccaatatcaacttgacccaccagccctggttccaggtcctggagccgcagttccggcagtttctcttctaccgccactgccgctacttccccatgctgctgaaccacccggagaagtgcaggggcgatgtctacctgctggtggttgtcaagtcggtcatcacgcagcacgaccgccgcgaggccatccgccagacctgggcgcgagcggcagtccgcgggtgggggccgagcgccgtgcgcaccctcttcctgctgggcacggcctccaagcaggaggagcgcacgcactaccagcagctgctggcctacgaagacgccctctacggcgacatcctgcagtggggctttctcgacaccttcttcaacctgaccctcaaggagatccacttcctcaagtggctggacatctactgcccccacgtccccttcattttcaaaggcgacgatgacgtcttcgtcaaccccaccaacctgctagaatttctggctgaccggcagccacaggaaaacctgttcgtgggcgatgtcctgcagcacgctcggcccattcgcaggaaagacaacaaatactacatcccgggggccctgtacggcaaggccagctatccgccgtatgcaggcggcggtggcttcctcatggccggcagcctggcccggcgcctgcaccatgcctgcgacaccctggagctctacccgatcgacgacgtctttctgggcatgtgcctggaggtgctgggcgtgcagcccacggcccacgagggcttcaagactttcggcatctcccggaaccgcaacagccgcatgaacaaggagccgtgctttttccgcgccatgctcgtggtgcacaagctgctgccccctgagctgctcgccatgtgggggctggtgcacagcaatctcacctgctcccgcaagctccaggtgctctga

SEQ ID NO: 134413 - DNA, 1826 bp, Homo sapiens
gaaatacattgggcttaaagtaaataagttactcctgttgacaacctgttcttgttcccactttaaagtaagactcggctattccctaaaagtacatccaattctatgaaattttagcaaatcattccaaggaaggtcagtctcatagttgtttgcagaatgaggatgagaaatatccatttcataaaaagactttcactctaaggtctaatttaagtagtgctgtgtggatgagggacttgagcccacttgctttgagagaactgaagatattggaggagtgtggaggttcaaagtaagtgagattttcttgggtcttgaacaggttgtgttgttatttcagggtgaatcacagttaatgtcctgtttcagtgactttccaatgcctgaagattttccaaacttcctgcataattctaaacttctggaatatttcaggatttttgctaaaaaatttgatctgctaaaatatattcagttccaggtattgtatttttggggaaatgggtttctctgcattagttcagctcatatttagatagaaaacactcagagcaacggcaaggagcagagtgctgtctttgacgcagttatggtttgcagtggccaccacattctacctcatatcccactgaagtcatttccaggtgagacccgctgggattcccagctttttggagtaggtttccaggtactttatatgtagtttgagggaaaacgcatcctggtgattggaatgggaaactcaggctcagatattgctgttgagctgagtaagaatgctgctcaggtgtgatgctctctgcttaccatgtacctggaggggaggaagtggggatgccatactggagattgggactcagtgttccacacccggtttcgttctatgctccgcaatgtactgccacgaacagctgtaaaatggatgatagaacaacagatgaatcggtggttcaaccatgaaaattatggccttgagcctcaaaacaagtagagttattttgcttttttaatggtatactcgttggtgagcaaagttgtctgaaggtgtctcaaggtgaaatctacagtgaaagagctcacagaaacttctgccatctttgaggatggaacagtggaggagaacattgatgtcatcatttttgcaacaggatatagtttctcttttcccttccttgaagattcactcgttaaagtagagaataatatggtctcactgtataaatacatattccccgctcacctggacaagtcaaccctcgcgtgcattggtctcatccagcccctaggttccattttcccaactgctgaacttcaagctcgttgggtgacaagagttttcaaaggcttgtgtagcctgccctcagagagaactatgatgatggacattatcaaaaggaatgaaaaaagaattgacctgtttggagaaagccagagccagacgttgcagaccaattatgttgactacttggacgagctcgccttagagataggtgcgaagccagatttctgctctctcttgttcaaagatcctaaactggctgtgagactctatttcggacccctgcaactcctattagtatcgccttgttgggcctgggcaatgggaaggagccaggaatgccatcttcacccagaaacaaagaatactgaagccactcaagactcgggccctgaaggattcatctaatttctcagtttcttttctgttgaaaaatcctggcccttcttgctgttgttgtggccttttttttgccaacttcaatggtcctagtcagcataatgctttgggctttattatcttgtcagtcactacctcctaaaaa

SEQ ID NO: 134414 - DNA, 200 bp, Homo sapiens
gacgagagaaaaagcttgctctaatgctttctggactaattgaagaaaaaagtaaactacttgaaaaatttagccttgttcaaaaagaggcaacctgtgaaaagctgaacaggtccaattctgaacttgaggatgaaatactctgtctagaaaaagagttaaaagaagagaaatccaaacattctgaacaagatgaattg

SEQ ID NO: 134415 - DNA, 1845 bp, Homo sapiens
ctagtcccaagcctctccactaccagggctgggtggcttcgccaggtagagcgccggcccctttaagagcaaacgacccggacacgtctgcgaagcttgcgcgaagaaggggaagtttgcggctgtccgcgcctccccgccttctcgcggctgcccggccgaaaccaaaccgaggggtggggtggcgaggacagggtacgtcgcaggcttgtgcgggtcgggctcggacctgcgctgcctcgggatgtaaagtataacaagagggtcgggatgggcagcgtaggcctgtgaggcctgcgggtgcccctgtcccccagctccccccgcagccggctccgcagtggtccactccggttgccgggtgcggattcgggttccggacccgaagctgtgtgttctccgccgtttattgtggcccccacaggccggggttactgtggcgaccacgaaagcagctttggcgcctgtcgtgccagctgcattaatgaatcggccaacgcgcggggagaggcggtttgcgtattgggcgccagggtggtttttcttttcaccagtgagacgggcaacagctgattgcccttcaccgcctggccctgagagagttgcagcaagcggtccacgctggtttgccccagcaggcgaaaatcctgtttgatggtggttccgaaatcggcaaaatccctttataatcaaaagaatagcccgagaataggttgagtgttgttcccatttggaacaaaagtccactattaaagacgtggactcccacgtcaaagggccgaaaaaccctctgtccaggttaagcaccattttatcgcccttatacaatactgtcgctccaggagcaaactgatgtcgtgagcttaaactagttcttgatgcagatgacgttttaagcacagaagttaaaagagtgataacttcttcagcttcaaatatcaccccagcttttttctgctcatgaaggttagatgcctgctgcttaagtaattcctctttatctgtaaaggctttttgaagagcatcacctgaccgggcagatagttcaccggggtgagaaaaaagagcaacaactgatttaggcaatttggcggtgttgatacagcgggtaataatcttacgtgaaatattttccgcatcagccagcgcagaaatatttccagcaaattctttctgcaatcgggttgcataacgctgacccacttcataagcactcgtcctttggatttgaggctggattggggggactctaaaggcttcccttgttattggtctgttcaggacatctaattcttcctgatttacgctaggagggttgtacttttccaggaatttatccatctcttctaggttttctagtttacgtgcataaaggtgttcatagtagctttgaatgctcttttgtattttagtggtgtctgttgaaatatctgctgtttcatttcttaatgaggttattgggtggattttctctcctcttttcttggttaagcttgttaatgctctatcaattttatttatcttttcaaataaccagctttttgtttcatttagcttttgtaatttttttgtttcaatttcatttagttctgctctgatcttgatcatttcctttcttctgctgggtttgggtttggtttgttcttgtttctctagtttcttgaggtatgaccttagaatgtcagtttgtgcttgttcagtctttttgatgtaagcttttaggctatgaactttcctcttagcactgcctttgcctaatggaaaaggaccaacggagaaggggacgaggacgacaagagggggagaggggttcgtattggaaatagagttgaaattaggagacat

SEQ ID NO: 134416 - DNA, 511 bp, Homo sapiens
ccggctccgcagtggtccactccggttgccgggtgcggattcgggttccggaccgaaggctgtgtgttctccgccgtttattgtggccccgacaggccggggttactgtggcgaccacgagagcagctttggcgctatggaggagcccggggttacccctcaaccgtatttggggctgctcctggaggagctacgcagggtgagcccaggcgcgatgagtgttacgtggcccaggggtcgcgggagccgccgggggaaggaagcagtagaccggctttggggtctaagccgccgtggtcagaggtcccgaagccagtcctcgtctgctgcccggctcccgcccgtgttcgaggcagtagttaggctcgtagggcgcttgagtggtttttgtgtgatggaggaggacctggggctctgggaaggacgagagaaaaagcttgctctaatgctttctggactaattgaagaaaaaagtaaactacttgaaaaatttagccttgttcaaaaagag

SEQ ID NO: 134417 - DNA, 3263 bp, Homo sapiens
gttcctttcagacctggaagagaactttgagaacaatatcttctccttccaagtatgtgacgtagtcctgaaccacgccccagacttccgccgggtctacctgccttatgtcaccaaccagacctatcaggaacgcaccttccagagcctgatgaatagcaacagcaatttccgggaggtcttggagaagctggagagcgaccccgtctgccagcgcctttccctcaagtcctttctgattctgcccttccaacgcatcacccgcctcaaactgctgctccagaacattctgaagagaacacagcctggctcctcggaggaggcagaggccacgaaggcacaccacgccctggagcagctgatccgggactgcaataacaatgtccagagtatgcgacggacagaggagctaatctacctgagccagaagattgagtttgagtgcaaaatattcccgctcatttctcagtcacgctggctggtgaaaagtggggagctgacagccttggagttcagtgcttccccagggctacgaaggaagctgaacacgcgtccagtccacctgcacctcttcaatgactgtctgctgctgtctcggccccgagagtcagtgactggagtggcaggccagggcacaagaggggaaggggatgaggaaagaggggggtctgaaagggagagagaaggaagtgaaaagcttcggtggatctcagccttggccatgccaagagaggagttggaccttctggagtgttacactgctgagcatggttcaggtgggctggctacatgtgggaattatgcaagctacaattcaagatgggatctgcgtaaggacacagccaaaccatatcagcaggcattgaagaacattgttgtagcaagtcagtgttactgcggtgaccgccagagcagcctcgacgctatggaggagcctggtgctacccctcagccctacctggggctggtcctggaggagctacgcagagttgtggcagcactacctgagagtatgagaccagatgagaatccttatggttttccatcggaactggtggtatgtgcagctgttattggattttttgttgttctcctttttttgtggagaagttttagatcggttaggagtcggctttacgtgggaagagagaaaaaaacttggtgaaatgctttctggactaattgaagaaaaatgtaaactacttgaaaaatttagccttattccaaaagagtatgaaggctatgaagtacagtcatctttagaggatgccagctttgagaaggcggcagcagaagaagcacgaagtttggaggcaacctgtgaaaagctgaacaggtccaattctgaacttgaggatgaaatcctctgtctagaaaaagacttaaaacaagagaaatctaaacattctcaacaagatgaattgatggcggatatttcaaaaagtatacagtctctagaagatgagtcaaaatccctcaaatccacaaataagcttgaagccaaaatcatctgcaagacatttaaaatgagtgaagaacgacgggctatagcaataaaagatgctttgaatgaaaattctcaacttcagacaagccataaacagctttttcagcaagaagctgaagtatggaaaggacaagtgagtgaacttaataaacagaaaataacatttgaagactccaaagtacacgcagaacaagttctgaatgataaagaaaatcacatcaagaccctgactggacacttgccaatgatgaaagatcaggctgctgtgcttgaagaagacacaacggatgatgataacctggaattagaagtgaacagtcaatgggaaaatggtgctaacttagatgatcctctgaaaggagctttgaagaaactgattcatgctgctaagttaaatgtttctttaaaaagcttagaaggagaaagaaaccacattattattcagttatctgaagtggacaaaacaaaggaagagcttacagagcatattaaaaatcttcagactcaacaagcatctttgcaatcagaaaacatatattttgaaagtgagaatcagaagcttcaacagaaacttaaaataatgactgaattctatcaagaaaatgaaatgaaactctacaggaaattaacagtggaggaaaattaccgaatagaggaagaagagaagctttctagagtggaagaaaagatcagccgtgccactgaagggctggagacctatagaaagctagccaaagatcttgaagaagaattggagagaactgttcatttttatcaaaagcaggttatttcctacgagaaaagaggacatgataattggttggcagctcggactgctgaaagaaacctcagtgatttaaggaaagaaaatgctcacaacaaacaaaaattaactgaaacagagttgaaatttgaacttttagaaaaagatcctaatgcactcgatgtttcaaatacagcatttggcagagagcattccccatgtagtccctcaccattgggtcggccttcatctgaaacgagagcttttccctctcctcaaactttgttggaggatccactcagactctcacctgtgcttccagggggaggaggaagaggcccaagcagcccagggaatcccctggaccatcagattaccaatgaaagaggagaaccaagctatgacaggttaatcgatcctcacagggctccttctgacactgggtccctgtcatctccggtggaacaggaccgtaggatgatgtttcctccaccagggcaatcatatcctgattcaactcttcctccacaaagggaagacagattttattctaattctgaaagactgtctggaccagcagaacccagaagttttaaaatgacttctttggataaaatggataggtcaatgccttcagaaatggaatccagtagaaatgatgccaaagatgatcttggtaatttaaatgtgcctgattcatctctccctgctgaaaatgaagcaactggccctggccttattcctccacctcttgctccaatcagcggtccattgtttccagtggatacaaggggcccgttcatgagaagaggacctcctttccccccacctcctccaggaaccatgtttggagcttctcgaggttattttccaccaagggatttcccaggtccaccacatgctccatttgcaatgagaaacatctatccaccgaggggtttacctccttaccttcatccgagacctggattttaccccaaccccacattctga

SEQ ID NO: 134418 - DNA, 2775 bp, Homo sapiens
gacaggccggggttactgtggcgaccacgagagcagctttggcgctatggaggagcccggggctacccctcaaccgtatttggggctgctcctggaggagctacgcagggttgtggcagcactgcctgaaggtatgagaccagattctaatctttatggttttccatgggaattggtgatatgtgcagctgttgttggattttttgctgttctcttttttttgtggagaagttttagatcggttaggagtcggctttatgtgggacgagagaaaaagcttgctctaatgctttctggactaattgaagaaaaaagtaaactacttgaaaaatttagccttgttcaaaaagagtatgaaggctatgaagtagagtcatctttaaaggatgccagctttgagaaggaggcaacagaagcacaaagtttggaggcaacctgtgaaaagctgaacaggtccaattctgaacttgaggatgaaatactctgtctagaaaaagagttaaaagaagagaaatccaaacattctgaacaagatgaattgatggcggatatttcaaaaaggatacagtctctagaagatgagtcaaaatccctcaaatcacaagtagctgaagccaaaatgaccttccagatatttcaaatgaatgaagaacgactgaagatagcaataaaagatgctttgaatgaaaattctcaacttcaggaaagccagaaacagcttttgcaagaagctgaagtatggaaagaacaagtgagtgaacttaataaacagaaagtaacatttgaagactccaaagtacatgcagaacaagttctaaatgataaagaaagtcacatcaagactctgactgaacgcttgttaaagatgaaagattgggctgctatgcttggagaagacataacggatgatgataacttggaattagaaatgaacagtgaatcggaaaatggtgcttacttagataatcctccaaaaggagctttgaagaaactgattcatgctgctaagttaaatgcttctttaaaaaccttagaaggagaaagaaaccaaatttatattcagttgtctgaagttgataaaacaaaggaagagcttacagagcatattaaaaatcttcagactcaacaagcatctttgcagtcagaaaacacacattttgaaaatgagaatcagaagcttcaacagaaacttaaagtaatgactgaattatatcaagaaaatgaaatgaaactccacaggaaattaacagtagaggaaaattatcggttagagaaagaagagaaactttctaaagtagatgaaaagatcagccatgccactgaagagctggagacctatagaaagcgagccaaagatcttgaagaagaattggagagaactattcattcttatcaagggcagattatttcccatgagaaaaaagcacatgataattggttggcagctcggaatgctgaaagaaacctcaatgatttaaggaaagaaaatgctcacaacagacaaaaattaactgaaacagagcttaaatttgaacttttagaaaaagatccttatgcactcgatgttccaaatacagcatttggcagaggctcacgaggcccagggaatcctctggaccatcagattaccaatgaaagaggagaatcaagctgtgataggttaaccgatcctcatagggctccctctgacactgggtctctgtcacctccatgggaccaggaccgtaggatgatgtttcctccgccaggacaatcatatcctgattcagcccttcctccacaaaggcaagacagattttgttctaattctggtagactgtctggaccagcagaactcagaagttttaatatgccttctttggataaaatggatgggtcaatgccttcagaaatggaatccagtagaaatgataccaaagatgatcttggtaatttaaatgtgcctgattcatcttttccttgctaaaaaagaagccactggccctggctttgttcctccacctcttgctccagtcagaggtccattgtttccagtggatgcaagaggcccattcttgagaagaggacctcctttccccccacctcctccaggagccatgtttggagcttctcgagattattttccaccaagggatttccccaggtccaccacctgctccatttgcaatgagaaatgtctatcccaccgaggggttttccctccttaccttcccccccaagacctgattttttccgccccacccccacattctgaaggtagaagtgagttcccctcaggtttgattccaccttcaaatgagcctgctactgaacatccagaaccacagcaagaaacctgacaatatttttgctctcttcaaaagtaattttgactgatctcattttcagtttaagtaactgctgttaccttaaagtgattacactttttgctccaaattgaagcttaatggaattataattctcaggatagtattttgtaaataaagatgatttaaatatgaatcttatgagtaaattatttcaattttattttagacggtataactatttcaatttggattaatccactattatataaccaatagtgggagttttatatatgtaatctttcaggtggggaggctttaaattttgaagtctgtgtctttatgccaagaactgtatttactgtggttgtggacaaatgtgaaagtaactttatgcttaaataaattatagttgatttaaagatttgtttggcattgataataataaaatcagtagtttttctataaa

SEQ ID NO: 134419 - DNA, 3915 bp, Homo sapiens
  misc_feature (1)...(3915): n = a,t,c or g
tttcgtgccttctcgcggctgcccggccgaaaccaaaccgaggggtggggtggcgaggacagggtacgtcgcaggcttgtgcgggtcgggctcggacctgcgctgcctcgggatgtaaagtataacaagagggtcgggatgggcagcgtaggcctgtgaggcctgcgggtgcccctgtcccccagctccccccgcagccggctccgcagtggtccactccggttgccgggtgcggattcgggttccggaccgaaggctgtgtgttctccgccgtttattgtggccccgacaggccggggttactgtggcgaccacgagagcagctttggcgctatggaggagcccggggctacccctcaaccgtatttggggctgctcctggaggagctacgcagggttgtggcagcactgcctgaaggtatgagaccagattctaatctttatggttttccatgggaattggtgatatgtgcagctgttgttggattttttgctgttctcttttttttgtggagaagttttagatcggttaggagtcggctttatgtgggacgagagaaaaagcttgctctaatgctttctggactaattgaagaaaaaagtaaactacttgaaaaatttagccttgttcaaaaagagtatgaaggctatgaagtagagtcatctttaaaggatgccagctttgagaaggaggctacagaagcacaaagtttggaggcaacctgtgaaaagctgaacaggtccaattctgaacttgaggatgaaatactctgtctagaaaaagagttaaaagaagagaaatccaaacattctgaacaagatgaattgatggcggatatttcaaaaaggatacagtctctagaagatgagtcaaaatccctcaaatcacaagtagctgaagccaaaatgaccttccagatatttccaatgaatgaagaacgactgaagatagcaataaaagatgctttgaatgaaaattctcaacttcaggaaagccagaaacagcttttgcaagaagctgaagtatggaaagaacaagtgagtgaacttaataaacagaaagtaacatttgaagactccaaagtacatgcagaacaagttctaaatgataaagaaagtcacatcaagactctgactgaacgcttgttaaagatgaaagattgggctgctatgcttggagaagacataacggatgatgataacttggaattagaaatgaacagtgaatcggaaaatggtgcttacttagataatcctccaaaaggagctttgaagaaactgattcatgctgctaagttaaatgcttctttaaaaaccttagaaggagaaagaaaccaaatttatattcagttgtctgaagttgataaaacaaaggaagagcttacagagcatattaaaaatcttcagactgaacaagcatctttgcagtcagaaaacacacattttgaaaatgagaatcagaagcttcaacagaaacttaaagtaatgactgaattatatcaagaaaatgaaatgaaactccacaggaaattaacagtagaggaaaattatcggttagagaaagaagagaaactttctaaagtagatgaaaagatcagccatgccactgaagagctggagacctatagaaagcgagccaaagatcttgaagaagaattggagagaactattcattcttatcaagggcagattatttcccatgagaaaaaagcacatgataattggttggcagctcggaatgctgaaagaaacctcaatgatttaaggaaagaaaatgctcacaacagacaaaaattaactgaaacagagcttaaatttgaactgtgtagaagaagatccttatgcactcgatgttccaaatacagcatttggcagagagcattccccatatggtccctcaccattgggttggccttcatctgaaacaagagcttttctctctcctccaactttgttggagggtccactcacactctcacctttgcttccagggggaggaggaagaggctcacgaggcccagggaatcctttggaccatcagattaccaatgaaagaggagaatcaagctgtgataggttaaccgatcctcatagggctctctctgacactgggtttctgtcacctccatgggaccaggaccgtaggatgatgtttcctccgccaggacaatcatatcctgattcagcccttcctccacaaaggcaagacagattttgttctaattctggtagactgtctggaccagcagaactcagaagttttaatatgccttctttggataaaatggatgggtcaatgccttcagaaatggaatccagtagaaatgataccaaagatgatcttggtaatttaaatgtgcctgattcatctctccctgctgaaaatgaagccactggccctggctttgttcctccacctcttgctccagtcagaggtccattgtttccagtggatgcaagcggccccattccttgggaagagaccccctttccccccaacctcctccaggaagccatgtttggagcttctcgagattatttttccaccagggggatttcccagggtccaccaccttgctccatttggcaatgaggaaatgtcttatcccaccgagggggtttttccttccttaacctttcccccaagaactgggggttttttccccccacccccacatttttgaaggtaggaagtgaatttcccttaggttttgattccaacttcaaatgagcctgctactgaacatccagaaccacagcaagaaaacctgacaatatttttggctctcttcaaaagtaattttgactgatctcattttcagtttaagtaactgctgttacttaagtgattacacttttggctcaaattgaagtttaatggaataatagttctcaggatagtattttggtaaataaagatgatttaaatatgaatcttatgagtaaattatttcaattctaattttagacggtataactatttcaatttgattaatccactattatataaacaatagtgggagttttatatatgtaatcttgcaggtggggaggctttaaattctgaagtctgtgtctttatgccaagaactgtatttactgtggttgtggacaaatgtgaaagtaactttatgcttaaataaattatagttgatttaaagatttgtttggcattgataataataaaatcagtagtttttctataactatggctctattaattaacttttttccttttaccaataactttgaggtgcaaaactcaaacttatgtgggtcttttgtgttcaattatgttatgacaaatgtgctctctttcttgtaaatagacatgagtggcccaaagcaacaaattaatacacttttaaaagtcaaaattgattatattttaaagataaccaggggtattatcctaatggggggaattgtagaattttgatcttcttattcactgagtttcttgcacggtttctttattgcttttttttccccgcctgttcttttgtaaggtatttagtattttctgtggaggatattgagatgtactacaggataactgtagtgaatgatgtgtcatcattttgagctttggactcaatatctttagtgtttccctaaatcagatttgtagggtccatgttaagccnccttgcacattaatatgattatggaaggaaaggcagtgaagcataactaataaacatcataatacttaacgttgccccagttggttgttttagtattagacttttttttcaatgccaaaagatagaagattaaatattcttagaataaagcagtgatatatattggaacaattcaccccagcatttccccaggtgttgtttagaacaatagaatactaatgaagtatttttgaacccataatattctaaccctcacctcaaaaaaaaa

SEQ ID NO: 134420 - DNA, 461 bp, Homo sapiens
aggccaatgagacctgaggacgtgcggaggaattcgtcctctttgtctagctatctggcctatctgtcgatccatcttcgtgtctgtcttcagcccccacctgtttgtccatctgtccaattacctgtgactctgtgcatcttcttgtccattcatctgcccacccatccgtccctccgtctgcccaccagccgcccctctcctcctgggctgcagagccatggcccggggctacggggccacggtcagcctagtcctgctgggtctggggctggcgctggctgtcattgtgctggctgtggtcctctctcgacaccaggccccatgtggcccccaggcctttgcccacgctgctgttgccgccgactccaaggtctgctcggatattggacgggagccagctgacgctgcaggacctggccaagttccagcccgaggtggtggatgccctggaggtgcct

SEQ ID NO: 134421 - DNA, 1764 bp, Homo sapiens
atggcccggggctacggggccacggtcagcctagtcctgctgggtctggggctggcgctggctgtcattgtgctggctgtggtcctctctcgacaccaggccccatgtggcccccaggcctttgcccacgctgctgttgccgccgactccaaggtctgctcggatattggacgatgccatcctccagcagcagggctcacccgtggatgcctccatcgcggctctggtctgcaccagcgtcgtcaaccctcagagcatgggcctgggcggaggggtcatcttcaccatctacaatgtgacaacagggaaggtggaggtcatcaatgcccgggagacggtgccggccagccacgccccgagcctgctggaccagtgtgcacaggctctgccactgggcacaggggcccagtggatcggggtgcccggggagctccgtggctatgccgaggcccaccgccgccatggccgcctgccctgggcgcagctgttccagcccaccatcgcgctgctccgaggggggcatgtggaggcccctgtcctcagccgtttcctgcacaacagcatcctgcggccttccttgcaggcgtcaaccctgcgccagctcttcttcaacgggacagaacccctgaggcctcaggacccactcccatggcctgcactggccaccaccctggagaccgtggccacagagggcgtggaggtcttctacacggggaggctgggccagatgctggtggaggacattgccaaggaagggagccagctgacgctgcaggacctggccaagttccagcccgaggtggtggatgccctggaggtgcccctgggggactataccctgtactcaccaccgccgcctgcagggggtgccattctcagctttatcctcaacgtgctaagagggttcaacttctcaacagagtctatggccaggcctgaagggagggtgaacgtgtaccaccaccttgtagagacgctcaagtttgccagggggcagaggtggaggctgggggaccctcgaagccacccgaagctccagaatgcctcccgggacctgctgggggagaccctggcccagctcatccgccaacagatcgatggccggggggaccaccagctcagccactacagcttggccgaggcctggggccacgggacaggcacgtcccatgtgtctgtgctgggggaggatggcagcgccgtggctgccaccagcaccattcaacacaccctttggagcgatggtgtatttcaccacggacaggcatcatcctcaacaacgagctcctggacttatgcgagcgatgcccccggggttccggcaccaccccctcaactgtgagtggagacagggtgggtggagctcccggaaggtgctggcccccagttccaggcgagccgtccccatcctccatggagccctccatcttgatcaacaaagcccaggggtccaatcttgtgattggctgtgctggcggggagctcatcatctctgctgtggcccaggccatcatgagcaagctgtggcttggctttgacctgagagcggccattgcagcccccatcctgcatgtcaacaacaagggctgtgtggagtacgagcccaacttcagccaggaggtgcagaggggactccaagaccgtggccagaaccagacccagaggcccttcttcctgaacgtggtccaggctgtgtcccaggagggggcctgtgtgtacgccgtctcggacctgaggaagagtggggaggccgcaggctactaa

SEQ ID NO: 134422 - DNA, 2537 bp, Homo sapiens
acgctttgctgcctggcctcctgccagcttcaagcaggagctgaaaaccagaagttgaggcgtgagtttggccactccgtagtgtgcacttggtgagggcagcagctcgccacagctggccagccggactgatccatttacccatctgtccatctggcagcccgctgttcagacccgtctgtctgtccgcccatttgtaagccgatctctgtcccgattgtctatctgaccatctttctcttactgtcctctttgtctagctatctggcctatctgtcgatccatcttcgtgtctgtcttcagcccccacctgtttgtccatctgtccaattacctgtgactctgtgcatcttcttgtccattcatctgcccacccatccgtccctccgtctgcccaccagccgcccctctcctcctgggctgcagagccatggcccggggctacggggccacggtcagcctagtcctgctgggtctggggctggcgctggctgtcattgtgctggctgtggtcctctctcgacaccaggccccatgtggcccccaggcctttgcccacgctgctgttgccgccgactccaaggtctgctcggatattggacgagccatcctccagcagcagggctcacccgtggatgccaccatcgcggctctggtctgcaccagcgtcgtcaaccctcagagcatgggcctgggcggaggggtcatcttcaccatctacaatgtgacaacaggggcccagtggatcggggtgcccggggagctccgtggctatgccgaggcccaccgccgccatggccgcctgccctgggcgcagctgttccagcccaccatcgcgctgctccgaggggggcatgtggtggcccctgtcctcagccgtttcctgcacaacagcatcctgcggccttccttgcaggcgtcaaccctgcgccagctcttcttcaacgggacagaacccctgaggcctcaggacccactcccatggcctgcactggccaccaccctggagaccgtggccacagagggcgtggaggtcttctacacggggaggctgggccagatgctggtggaggacattgccaaggaagggagccagctgacgctgcaggacctggccaagttccagcccgaggtggtggatgccctggaggtgcccctgggggactataccctgtactcaccaccgccgcctgcagggggtgccattctcagctttatcctcaacgtgctaagagggttcaacttctcaacagagtctatggccaggcctgaagggagggtgaacgtgtaccaccaccttgtagagacgctcaagtttgccaaggggcagaggtggaggctgggggaccctcgaagccacccgaagctccagaatgcctcccgggacctgctgggggagaccctggcccagctcatccgccaacagatcgatggccggggggaccaccagctcagccactacagcttggccgaggcctggggccacgggacaggcacgtcccatgtgtcagtgctgggggaggatggcagcgccgtggctgccaccagcaccatctacacaccctttggagcgatggtgtattcaccacggacaggcatcatcctcaacaacgagctcctggacttatgcgagcgatgcccccggggttccggcaccaccccctcacctgtgagggagacagggtgggtggagctcccggaaggtgctggcccccagttccaggcgagcgttccccatcctccatggtgccctccatcttgatcaacaaagcccaggggtcgaagctagtgattggcggggctggcggggagctcatcatctctgctgtggcccaggccatcatgagcaagctgtggcttggctttgacctgagagcggccattgcagcccccatcctgcatgtcaacagcaagggctgtgtggagtacgagcccaacttcagccagagacggtgtcttgctttgttgccctggctgttctcaaactcctggcctcaagtgatcctgccaccttggctcccaagtggctaagactgtaggaggtgcagaggggactccaagacccgtggccagaacccagacccagaaggccctttcttcctggacgtggttccagcctgtgtccccaggagggggcctgtgtgtaacgcccgtctcggacctgaaggaagagtggggaggccgcaggcttactaaagacactgctctgcccagaacttgaagtcttggccccaccatgagtcctgttgtccaggccggacattgcttgggggaccaactacttctggcaggatctggacccctggcaggggagtccagcttgagagtggaagaggtggcggggaccagctgggcagatgagaggctgagcctcatcccctaaccccctttcccagagcccctggtggtcctgaaccggcccctctatccctccgcaggcctcttgcctggggccactctcccaccctctcgatctgtatatcctccagtccaagattaaagaagaggcggactatgaaaaaaaaaaaaaaaaaaac

SEQ ID NO: 134423 - DNA, 3420 bp, Homo sapiens
agctggctcagggcgtccgctaggctcggacgacctgctgagcctcccaaaccgcttccataaggctttgctttccaacttcagctacagtgttagctaagtttggaaagaaggaaaaaagaaaatccctgggccccttttcttttgttctttgccaaagtcgtcgttgtagtctttttgcccaaggctgttgtgtttttagaggtgctatctccagttccttgcactcctgttaacaagcacctcagcgagagcagcagcagcgatagcagccgcagaagagccagcggggtcgcctagtgtcatgaccagggcgggagatcacaaccgccagagaggatgctgtggatccttggccgactacctgagctctgcaaaattccatctctaacttggtcattctctctctacttggggagatcggatgtggcactttgcggtgtctgtgtttctggtagagctctatggaaacagcctccttttgacagcagtctacgggctggtggtggcagggtctgttctggtcctgggagccatcatcggtgactgggtggacaagaatgctagacttaaagtggcccagacctcgctggtggtacagaatgtttcagtcatcctgtgtggaatcatcctgatgatggttttcttacataaacatgagcttctgaccatgtaccatggatgggttctcacttcctgctatatcctgatcatcactattgcaaatattgcaaatttggccagtactgctactgcaatcacaatccaaagggattggattgttgttgttgcaggagaagacagaagcaaactagcaaatatgaatgccacaatacgaaggattgaccagttaaccaacatcttagcccccatggctgttggccagattatgacatttggctccccagtcatcggctgtggctttatttcgggatggaacttggtatccatgtgcgtggagtacgttctgctctggaaggtttaccagaaaaccccagctctagctgtgaaagctggtcttaaagaagaggaaactgaattgaaacagctgaatttacacaaagatactgagccaaaacccctggagggaactcatctaatgggtgtgaaagactctaacatccatgagcttgaacatgagcaagagcctacttgtgcctcccagatggctgagcccttccgtaccttccgagatggatgggtctcctactacaaccagcctgtgtttctggctggcatgggtcttgctttcctttatatgactgtcctgggctttgactgcatcaccacagggtacgcctacactcagggactgagtggttccatcctcagtattttgatgggagcatcagctataactggaataatgggaactgtagcttttacttggctacgtcgaaaatgtggtttggttcggacaggtctgatctcaggattggcacagctttcctgtttgatcttgtgtgtgatctctgtattcatgcctggaagccccctggacttgtccgtttctccttttgaagatatccgatcaaggttcattcaaggagagtcaattacacctaccaagatacctgaaattacaactgaaatatacatgtctaatgggtctaattctgctaatattgtcccggagacaagtcctgaatctgtgcccataatctctgtcagtctgctgtttgcaggcgtcattgctgctagaatcggtctttggtcctttgatttaactgtgacacagttgctgcaagaaaatgtaattgaatctgaaagaggcattataaatggtgtacagaactcccatgaactatcttcttgatcttctgcatttcatcatggtcatcctggctccaaatccctgaagccttttgggccttgcctccgtattgatttccagtcctcccttttgtggcaatgggcccacattatgtatttcccgatttgccccaaaatactctgggaaacaagctctttgcttgcggtcctgatgcaaaagaagttaggaaggaaaatcaagcaaatacatctgttgtttgagacagtttaactgttgctatcctgttactagattatatagagcacatgtgcttattttggtactgcagaatttccaataaatggctggggtgttttgctctgtttttaccacagctgtgccttgagaactaaaaagctgtttaaggaaacctaagtcagcaggaaattaactggattaatttcccttatgttgagggccatgggaaaaaaattgggaaaaggaaaaactcagttttaaatacgggagactataatgataacactgaattcccctatttctcatgagtagatacaatcttacgtaaaagagtggttagtcacgtgaattcagttatcatttgacagattcttatctgtactagaattcagatatgtcagttttctgcaaaactcactcttgttcaagactagctaatttatttttttgcatcttagttatttttaaaaacaaattcttcaagtatgaagactaaattttgataactaatattatccttattgatcctattgatcttaaggtatttacatgtatgtggaaaaacaaaacaccttaactagaattctctaataagggtttatggtttagcttaaagagcacctttgtatttttattatcagatgggggccaccatattggtatggaaggcatatgtaggcacttcacagccatggttatccatgtaaggctgcaggtaggaggcaaagctgttaaagtaggattttattcacacatggactgcatacagacttcaaatatgttcattagtttggtcatagaacctagaagccaaaagcccacacagaagggccaaggaatccccaatttaactccatggttatccatcattagtgatctggtgttgtagaaccatgagggtgtaaggccttccagcctggccaggttaccatgtaggaaagcccccacacctggtggaagggttttggttttaccaaatccacttggatttaaccaccactccaggtagaatatttttatttttactggttttataccccaggaagttatttctaccattgttcctacagcaagaatattcataaaaggtatccctttcaaaatgccttttgagaagaatagaagaaaaaaaagtttggtatatattttaaaaaattgttttaaaaaaagtccagtttgcaacatgtctggtacccaagatgggtactttggcccttaaccggtttatatggcacttttcatgggagactgcaataccgttgctatgagcactttctttatcccttggagtttaatcctttgcttcatctttctacagtatcacataatgatttagctatgttgtaaaatctttgtaaaaaatttctatataaaaatattttgaaaatcttaaaaaaaaaaccccaagg

SEQ ID NO: 134424 - DNA, 611 bp, Homo sapiens
gctgcatgcatcactggtgacaacaggtccctcatagctaatcttgctgctgccaattgttataaaaaggaaaaacatcttgatctggagaaaaactggatgttggtagaaaaggcaagagtttgttatatagcagaagctgccacttttgctagagagcaaggctttgagactaaagacattaaagagatagccaaaaagacacaagccctgccaaagatgaactcaaagaggcagcgaatcgtgatcttcacccaagggagagatgacactataatggctacagaaagtgaagtcactgcttttgctgtcttggatcaagaccagaaagaaattattgataccaatggagctggagatgcatttgttggaggttttctgtctcaactggtctctgacaagcctctgactgaatgtatccgtgctggccactatgcagcaagcatcataattagacggactggctgcacctttcctgagaagccagacttccactgatggaagagctgaaaacacaagcccaggagtgcagacactgccctaattgcttcctgagaattcccatattaataaagaagaaaattatctgccattttttcctactataaaaa

SEQ ID NO: 134425 - DNA, 1578 bp, Homo sapiens; identical to SEQ ID NO: 123498

SEQ ID NO: 134426 - DNA, 2223 bp, Homo sapiens
ggcagaggtgggctgtaaagccaaagtggggtgggagcgcgaagatggcagctgctgaggaggagccgaagcccaaaaagctgaaggtggaggcgccgcaagcgctgaggcttgctactcagcctggcccacagaccagaagcaattagtgagacctgggaacataaagaaatgcaaaattttggtcactgatacctgcagtgccaaacctgcattttaacaagatccacgagatttgtatgcatgttaaagtttgaaaagcactgatggtgtgaaatgtggattatctatcaacattttccacaagagaagagaaaatattctctttggaatgggaaatcctctgcttgacatctctgctgtagtggacaaagatttccttgataagtattctctgaaaccaaatgaccaaatcttggctgaagacaaacacaaggaactgtttgatgaacttgtgaaaaaattcaaagtcgaatatcatgctggtggctctacccagaattcaattaaagtggctcagtggatgattcaacagccacacaaagcagcaacattttttggatgcattgggatagataaatttggggagatcctgaagagaaaagctgctgaagcccatgtggatgctcattactacgagcagaatgagcagccaacaggaacttgtgctgcatgcatcactggtgacaacaggtccctcatagctaatcttgctgctgccaattgttataaaaaggaaaaacatcttgatctggagaaaaactggatgttggtagaaaaagcaagagtttgttatatagcaggcttttttcttcacgtttccccagagtcagtattaaaggtggctcaccatgcttctgaaaacaacaggattttcactttgaatctatctgcaccgtttattagccagttctacaaggaatcattgatgaaagttatgccttatgttgatatactttttggaaaatgagacagaagctggcccacttttgctagagagcaaggctttgagactaaagacattaaagagatagcccaaaaagacacaagcccctgcccaaagatgaactcaaaggggcagcgaatccgtgatcttcaccccaaggggagagatgacacctataatggctacagaaagtgaagtcactgcttttgctggtcttgggatcaagacccagaaagaaatttattgataccaatgaagctggagatgcatttgttggaggttttctgtctcaactgggtctctgacaagcctctgactgaatgtatccgtgctggccactatgcagcaagcatcataattagacggactggctgcacctttcctgagaagccagacttccactgatggaagagctgaaaacacaagcccaggagtgcagacactgccctaattgcttcctgacaattcccatattaataaagaagaaaattatctgccattttttcctactataataatgctgaatcttaatttagagggtacaagggtatggtaatgcttgtagaatctttattatctcaacaatctaaaaaaatgatgtttatttcccatagtttgatagtgcccacttaaatgcccaattaaacaagaatataacatttcaatagaaatttttatttcattttcaattactttgtaaattcggtgtgtatttagtacactgatttgtttttttacatttctgctttgaatgcagatgcaatttaatataatagattttttaaatgaattaatcttaacatagtaatctttagctttttatacaaatatatttaatttaggagtatatgtgtgtctatacacacacatacataaatataccacatatacacctgatagtcaaataaggtacagaaattttatcttgtcaattatgccaaataatctctttaatgtgcactcaaacatgtaataaactttggataatcaaataatgtgccaaatttaagttgtaccacaatattcaaatcatagtcttatggaactctgtacttggatacaaacaaaaacttgtcatataggaatttttttctgtcttttccctgtgtacagcaaactgaggcagaaagatcattatttaatactgggccctgaaatgacacccaatttgttaatggaattatgaagaacagcaatataatacactgaagaataacttagtatcagagaccaataaatcacttttttaaggatgacaaaatggtataaaaaaaaaa

SEQ ID NO: 134427 - DNA, 381 bp, Homo sapiens
acattgcagcaggcagagtatgaatttctgtcctttgtacgacagcagactcctccagggctctgtccacttgcaggaaattcagttcatgaagataagaagtttcttgacaaatacatgccccagttcatgaaacatcttcattatagaataattgatgtgagcactgttaaagaactgtgcagacgctggtatccagattgattactcaagcagacagcacacgaaatactatttttctcctaatatgctgtttccattatgacacagcagctcctttgtaagtaccaggtcatgtccatcccttggtacatatatgcatttgcttttaaaccatttcttttgtttaaataaataaataagtaaataaagctaaaaaaa

SEQ ID NO: 134428 - DNA, 377 bp, Homo sapiens
cggcacgaggctgatgttggagcggccggctgcgagactggggccgtggctgctggtcccgggtgatgctaggcggctccctgggctccaggctgttgcggggtgtaggtgggagtcacggacggttcggggcccgaggtgtccgcgaaggtggcgcagccatggcggcaggggagagcatggctcagcggatggtctgggtggacctggagatgacaggattggacattgagaaggaccagattattgagatggcctgtctgataactgactctgatctcaacattttggctgaaggcacttgatgacattagtgaaagcatcaaagagcttcagttttaccgaaataacatcttcaagaaaaaaaaaaaaaaaaa

SEQ ID NO: 134429 - DNA, 379 bp, Homo sapiens
gcctagggattacaagctgaccatgtttgagggaatcccctgttaaataaacctgggtaaaagaggcccagaatgatggcctttgtgtgtgttatatatttatttttaattgccagatgacaggattggacattgagaaggacccagattattgagatggcctgtctgataactgactctgatctcaacattttggctgaagtacgtgatgcccatgtaatacagtcatactttttaaagggcactggaaatataaccatcattttttccagcttctttatttaaaaaataagaaagttgaggtctatatgggttaaggtaatgtgctaggtcatggtaggggtggtactagaaccaaagtaatccatctcacagccta

SEQ ID NO: 134430 - DNA, 520 bp, Homo sapiens
ccagcgccggctgcgagactggggccgtggctgctggtcccgggtgatgctaggcggctccctgggctccaggctgttgcggggtgtaggtgggagtcacggacggttcggggcccgaggtgtccgcgaaggtggcgcagccatggcggcaggggagagcatggctcagcggatggtctgggtggacctggagatgacaggattggacattgagaaggaccagattattgagatggcctgtctgataactgactctgatctcaacattttggctgaagaaattcagttcatgaagataagaagtttcttgacaaatacatgccccagttcatgaaacatcttcattatagaataattgatgtgagcactgttaaagaactgtgcagacgctggtatccagaagaatatgaatttgcaccaaagaaggctgcttctcatagggcacttgatgacattagtgaaagcatcaaagagcttcagttttaccgaaataacatcttcaaaaaaaaaatctcgtgcc

SEQ ID NO: 134431 - DNA, 502 bp, Homo sapiens
agaattcggcacgaggagacatgtgccaccatgcctgataaatttttttaaagaccagggttcaccataattggccaggctggtctcgaactcctggcctcaagtgatccacccaccttggccccccacagtgctgggattacgaggtgtgggccactgcccctggcctagactgggcaattctagctgggtttggggaggccattgaggaggctggcattggaaacctgagccagggaagggcccggaggctggagtccagtatgtttagtaggtagaatcctcagaatgcggtgcctggcgcttagtactgagcgtgagtccagaggagcacacgaaatactatttttctcctaatatgctgtttccattatgacacagcagctcctttgtaagtaccaggtcatgtccatcccttggtacatatatgcatttgcttttaaaccatttcttttgtttaaataaataaataagtaaataaagctagttctattgaaatgca

SEQ ID NO: 134432 - DNA, 1732 bp, Homo sapiens
atgaggtctcaaaagacgtcattgtatttctcactagaagcaaaattctactgcagcttgagaaacgagagaattgcaagttgtgatatcatcaatgatgctggtatacaaacaaagacgctaatgaagcgaagccatgtggcttatgctttgaaaaagcctgtggaacaaggagacagctttgagttagaaagcaagggctttatggccataaccatagctgtgtgtatagaacaaaacctaaggcattcgtcttccctcttcatttgcatgtcaagtacaggacagtctggaactaccaataatgccagctccctgataccatcatatgttttcaccccacctcattttaatctactggacaagcaaggaaggactgcaggaaagtcccactgtggggaggataggaaagagcataacaatgcctgccaccaggaggaagaggccccagatgtcaacccattgcatggtttgcaggcatcgggatcaccgggaaagactcaaagaatcaagtcacaggcactggagggaacaaggctttactcacatagcgaagagacaagatcaggcttaatacgactattgcgcctgcgccagcgccggctgcgagactggggccgtggctgctggtcccgggatatgctaggcggctccctgggctccaggcatgttgcggggtgtaggtgggagtcacggacggttcggggcccgaggtgtccgcaagcgtggcgcagccatggcggccaggggagagcatggctcagcgcatggtctgggtggacctggagatcacaggattggacatttagaaggtccagattattgagatggcctgtctgataactgactctgatctcatcattttggctgaaggtcctaacctgattataaacacaaccagatgagttgctggacagcatgtccagattggtgtaaaggagcatcacgggaagtctggccttaccaaggcagtgaaggagagtaccaattaccattgccagcaggcagagtaatgaatttcctgccctttggtacgaccagccagactccctcccagggctctgtcccacttgccaggaaattaagttccatgaaagataagaagtttccttgacaaaatacatgcccccagttcatgaaacatcttcattatagaataattggatgtgagccactgttaaaaggaactgtgccagaccgctgggtatccagaagaatatgaatttgccaccaaagaaggctgccttctcaatagggccacttgatgacacttagtgaaaacctccaaaaaggttccgttttttcccgaaaataaccatcttccaagaaaaaaaattaggatgaaaaggaaggagggaaaattatagaaaatgggggaaaatgagaagaccgtgagttgatgcccagttatcatgctgccactacatcggttatctggaggcaacttctggtggttttttttttctcacgctgatgggcttggcagaggcaccttcggttaacttgcatctcccagattgattactcaagcagacagcacacggaaatactatttttctcctaatatgctgtttcccattatgacacaacagctcctttggaagtaccaggtcatgtccatcccttggtacatatatgcatttgcttttaaaccatttcttttggttaaataaaataaactaagtaaataaagctagttctattgaaatgcaaaaaaaaaaaaaaaaaaaaa

SEQ ID NO: 134433 - DNA, 364 bp, Homo sapiens
  misc_feature (1)...(364): n = a,t,c or g
ggggccgggggtttttnnnnnnnnnngtgttttaaannnnnnnnnnnnnnnnnaaaaaaatcccccccccnnnnnnnnnnnnggggggcggccccnnnnnnnnnnnncnnnnnnnnnnnnnnnnnnnnnnnnnnnnnnnnnnnnnnnnngcggtaacagtgtttattgatgttgggctgatgaggtctggttcctctagcttcaccttccagagccgattcctgagtcaggtagtgcagtggttgtaaagtgcagcatattcatttccaagctagagggttttgtgtccggattcaaaggcccaggcttgagctgggtagcaccatttctttcatgttgtgggttctgggagcccagagggcag

SEQ ID NO: 134434 - DNA, 2356 bp, Homo sapiens
  misc_feature (1)...(2356): n = a,t,c or g
tttcgtggaaccgaggggcaaccaggggaagatggggtgctggaggagagcttgtgggagccaaggagcaccttggacatctggagtctggcaggagtgatgacgggtggaggggctagctcgaggcagggctggtggggcctgaggccagtgaggagtgtggagtaggtgcccaggcatcgtgcagacagggcgacatcagctggggacgatgggcctgagctagggctggaaagaagggggagccaggcattcatcccggtcacttttggttacaggacgtggcagctggttggacgaggggagctggtgggcagggtttgatcccagggcctgggcaacggaggtgtagctggcagcagcggtggcaggtgagttccccatctgccgggcaggtgagtcccttccctccccaggcctcgcttccccagccttctgaaagaaggaggtttaggggatcgagggctggcggggagaagcagacaccctcccagcagaggggcaggatgggggcaggagagttagcaaaggtgacatcttctcggggggagccgagactgcgcaaggctggggggttatgggcccgttccaggcagcaccgagcaagagggcagggagggagcacaggggtggccagcgtagggtccagcacgtggggtggtaccccaggcctgggtcagacaaaggacatggcaagggaacacaggacagtagggttccccagcttccacctcacccaccgccaattcatttagttagcaggcacaggggcaagctccggcacggctttctcaggcctatgccggagcctcgagggctggagagcgggaagacaggcaattgcttcggggagttgcagcatgtacgtcaccatgagggcgaagcggcccacgggaggggggcccacggaacattgcacagcaaggaggctgcaggggctcagcctgcgggcgccggtcccacggaggcactgcggcccagggtctggtgcggagagggcccacagtggacttggtgacgctgtatgccctcaaccgctcagcccctggggctggcttggcagacagtacagcatccaggggagtcaagggcatggggcgagaccagactaggcgaggcgggcggggcggagtgaatgagctctcaggagggaggatggtgcaggcaggggtgaggtagtgcatcgggcggcgagcgtttatgcactgggcctccagaagcccgtggccaaggcgggcctcgcgggcggcgacggagccgggatcggcgccttatcgttcgggctggagactaggcctggtctccagctggggtggacgtgcccaccagacttccgaaggccaaggacgcccaggtccggtggacgtgacaagcaggacatgacatggtccgggtgttacggtcgaggacagaggaggcgcgtccggcccttccctgaaaaaccttaaggctggtggggctgcggcaagaaagcgggtctgtttcttttacttcctccacggagtcggtcacactatggcttgnccctcttggttccccaagaaccccacaacatgaaagaaatggtgctacccagctcaagcctggggcctttgaaattccggacacaaaaccctctagccttgggaaatgaatatgcttggcacttttacaaccacttgcacttaccttgacttcaggaattcggctcttgggaaggttgaagcttaggaggaaccagaccttcattcagccccaaccatcaaaggacaccattcgggaacaggcaggcgcccgcaggcaccccacccccgcacccggcgacttcccatctttcatggggccaccccctggcgggcgggacggtttgaaccaccaggccaccacattcattccccaggaggttgaggtttctttcaggcggggattgacggccgttcccccaccacctccctcttttttctttttttcatccttcttgtctctttggttttctggaggctctgagctttcctgtctttccttttttcttgaggaggatttcaaaggctttccaaggattttgtttttcccccgttccctttttggaattttaaattttggcattaagttcattttgcaatgggtttgggagtttgtgggagaagggccttgaagttttcagtaaggagtgtgcgaggcgggcggggcggagtgaatgagctctcaggagggaggatggtgcaggcaggggtgaggagcgccggancggcgagcgggaggcactggcctcgagagcccgagcgcaaggcgggcctcgcgggcggcgacggagccgggatcggtgcctcagcgttcgggctggagacgaggccaggtctccagctggggtggacgt

SEQ ID NO: 134435 - DNA, 448 bp, Homo sapiens
actttaacttcattatgaaggacacctttgtcttgataagccagtctggcaggtgaatattgaattctgatggtgtgtgtttgagaaggtcctatagcacgttcaaagcgacgtctcctaacctgtgtcgtttctccatacgctggataatttagagcaggccttcttccagggcacttctgtacaggttcctgtttataaatatactgctgaatgctgccacctctcttgaaaaaatacacagattcaggccagttcttatatttagctgttgaaagcgctgccactatttgtccagttagtcctccaaatcctttgaaaattggtttgttcataatctcagtggtagtaattgtcttttttgttgtagatactttgggtgcaagagtagttgttttaagagtagtaatttgaatggtgtggtatcttctcgtgccgaatacagcag

SEQ ID NO: 134436 - DNA, 455 bp, Homo sapiens
cacctgcaactgtgattataactgtcaacactacatggagtgctgccctgatttcaagagagtctgcactgcggagctttcctgtaaaggccgctgctttgagtccttccagagagggagggagtgtgactgcgacgcccaatgtaagaagtatgacaagtgctgtcccgattatgagagtttctgtgcagaagtaaaagataaccagaagaacagaactaacaagaaacctacccccaaaccaccagttgtagatgaagctggaagtggattggacaatggtgacttcaagggcacaacttctgacacggctaccacccaacacaataaaggcagcacattttccaagatcacaacaggccaaccaataaataccagacccagtcttccacctaattctgatacatctaaagagacggcttttgccgggaaataagagacaacccgttggacct

SEQ ID NO: 134437 - DNA, 1572 bp, Homo sapiens
atggcggcggtgttgcagcaagtcctggagcgcacggagctgaacaagctgcccaagtctgtccagaacaaacttgaaaagttccttgctgatcagcaatccgagatcgatggcctgaaggggcggcatgagaaatttaaggtggagagcgaacaacagtattttgaaatagaaaagaggttgtcccacagtcaggagagacttgtgaatgaaacccgagagtgtcaaagcttgcggcttgagctagagaaactcaacaatcaactgaaggcactaactgagaaaaacaaagaacttgaaattgctcaggatcgcaatattgccattcagagccaatttacaagaacaaaggaagaattagaagctgagaaaagagacttaattagaaccaatgagagactatctcaagaacttgaatacttaacagatcagtttcctaattcatctcagaacggttcatgccgacaagtgcagtatcctctgacagacatgtcccccatcctaactagtggggactctgatatatccagtccattactgcaaaatactgtccacattgacctcagtgctctaaatccagagctggtccaggcagtgcagcatgtagtgattgggcccagtagcctgattgtgcatttcaatgaagtcataggaagagggcattttggttgtgtatatcatgggactttgttggacaatgatggcaagaaaattcactgtgctgtgaaatccttgaacagaatcactgacataggagaagtttcccaatttctgaccgagggaatcatcatgaaagattttagtcatcccaatgtcctctcgctcctgggaatctgcctgcgaagtgaagggtctccgctggtggtcctaccatacatgaaacatggagatcttcgaaatttcattcgaaatgagactcataatccaactgtaaaagatcttattggctttggtcttcaagtagccaaaggcatgaaatatcttgcaagcaaaaagtttgtccacagagacttggctgcaagaaactgtatgctggatgaaaaattcacagtcaaggttgctgattttggtcttgccagagacatgtatgataaagaatactatagtgtacacaacaaaacaggtgcaaagctgccagtgaagtggatggctttggaaagtctgcaaactcaaaagtttaccaccaagtcagatgtgtggtcctttggcgtgctcctctgggagctgatgacaagaggagccccaccttatcctgacgtaaacacctttgatataactgtttacttgttgcaagggagaagactcctacaacccgaatactgcccagaccccttatatgaagtaatgctaaaatgctggcaccctaaagccgaaatgcgcccatccttttctgaactggtgtcccggatatcagcgatcttctctactttcattggggagcactatgtccatgtgaacgctacttatgtgaacgtaaaatgtgtcgctccgtatccttctctgttgccatcagaagataacgctgatgatgaggtggacacacgaccagcctccttctgggagacatcatag

SEQ ID NO: 134438 - DNA, 1746 bp, Homo sapiens
ctggccccaccgacatggcggcggtgttgcagcaagtcctggagcgcacggagctgaacaagctgcccaagtctgtccagaacaaacttgaaaagttccttgctgatcggcaatccgagatcgatggcctgaaggggcggcatgagaaatttaaggtggagagcgaacaacagtattttgaaatagaaaagaggttgtcccacagtcaggagagacttgtgaatgaaacccgagagtgtcaaagcttgcggcttgagctagagaaactcaacaatcaactgaaggcactaactgagaaaaacaaagaacttgaaattgctcaggatcgcaatattgccattcagagccaatttacaagaacaaaggaagaattagaagctgagaaaagagacttaattagaaccaatgagagactatctcaagaacttgaatacttaacagaggatgttaaacgtctgaatgaaaaacttaaagaaagcaatacaacaaagggtgaacttcagttaaaattggatgaacttcaagcttctgatgtttctgttaagtatcgagaaaaacgcttggagcaagaaaaggaattgctacataggctccaaggccacatcatcgagaacccacaatacttcagtgatgcctgtgttcaccacatcaagcgccgggacatcgtgctcaagtgggagctgggggagggcgcctttgggaaggtcttccttgctgagtgccacaacctcctgcctgagcaggacaagatgctggtggctgtcaaggcactgaaggaggcgtccgagagtgctcggcaggacttccaacgtgaggctgagctgctcaccatgctgcagcaccagcacatcgtgcgcttcttcggcgtctgcaccgagggccgccccctgctcatggtcttcgagtatatgcggcacggggacctcaaccgcttcctccgatcccatggacccgatgccaagctgctggctggtggggaggatgtggctccaggccccctgggtctggggcagctgctggccgtggctagccaggtcgctgcggggatggtgtacctggcgggtctgcattttgtgcaccgggacctggccacacgcaactgtctagtgggccagggactggtggtcaagattggtgattttggcatgagcagggatatctacagcaccgactattaccgtgtgggaggccgcaccatgctgcccattcgctggatgccgcccgagagcatcctgtaccgtaagttcaccaccgagagcgacgtgtggagcttcggcgtggtgctctgggagatcttcacctacggcaagcagccctggtaccagctctccaacacggaggcaatcgactgcatcacgcagggacgtgagttggagcggccacgtgcctgcccaccagaggtctacgccatcatgcggggctgctggcagcgggagccccagcaacgccacagcatcaaggatgtgcacgcccggctgcaagccctggcccaggcacctcctgtctacctggatgtcctgggctagggggccggcccaggggctgggagtggttagccggaatactggggcctgccctcagcatcccccatagctcccagcagccccagggtgatctcgaagtatctaattcgccctcagcatgtgggaagggacaggtgggggctgggagtagaggatgttcctgcttctctaggcaaggtcccgtcatagcaattatatttattatcccttgaaaaaaaaaaaa

SEQ ID NO: 134439 - DNA, 7782 bp, Homo sapiens
ccaggcgtctgggtcctgctggtcttcgcctttcttctccgcttctaccccgtcggccgctgccactggggtccctggccccaccgacatggcggcggtgttgcagcaagtcctggagcgcacggagctgaacaagctgcccaagtctgtccagaacaaacttgaaaagttccttgctgatcagcaatccgagatcgatggcctgaaggggcggcatgagaaatttaaggtggagagcgaacaacagtattttgaaatagaaaagaggttgtcccacagtcaggagagacttgtgaatgaaacccgagagtgtcaaagcttgcggcttgagctagagaaactcaacaatcaactgaaggcactaactgagaaaaacaaagaacttgaaattgctcaggatcgcaatattgccattcagagccaatttacaagaacaaaggaagaattagaagctgagaaaagagacttaattagaaccaatgagagactatctcaagaacttgaatacttaacagaggatgttaaacgtctgaatgaaaaacttaaagaaagcaatacaacaaagggtgaacttcagttaaaattggatgaacttcaagcttctgatgtttctgttaagtatcgagaaaaacgcttggagcaagaaaaggaattgctacatagtcagaatacatggctgaatacagagttgaaaaccaaaactgatgaacttctggctcttggaagagaaaaagggaatgagattctagagcttaaatgtaatcttgaaaataaaaaagaagaggtttctagactggaagaacaaatgaatggcttaaaaacatcaaatgaacatcttcaaaagcatgtggaggatctgttgaccaaattaaaagaggccaaggaacaacaggccagtatggaagagaaattccacaatgaattaaatgcccacataaaactttctaatttgtacaagagtgccgctgatgactcagaagcaaagagcaatgaactaacccgggcagtagaggaactacacaaacttttgaaagaagctggtgaagccaacaaagcaatacaagatcatcttctagaggtggagcaatccaaagatcaaatggaaaaagaaatgcttgagaaaatagggagattggagaaggaattagagaatgcaaatgaccttctttctgccacaaaacgtaaaggagccatattgtctgaagaagagcttgccgccatgtctcctactgcagcagctgtagctaagatagtgaaacctgggatgaaactaactgagctctataatgcttatgtggaaactcaggatcagttgcttttggagaaactagagaacaaaagaattaataagtacctagatgaaatagtgaaagaagtggaagccaaagcaccaattttgaaacgccagcgtgaggaatatgaacgtgcacagaaagctgtagcaagtttatctgttaagcttgaacaagctatgaaggagattcagcgattgcaggaggacactgataaagccaacaagcaatcatctgtacttgagagagataatcgaagaatggaaatacaagtaaaagatctttcacaacagattagagtgcttttgatggaacttgaagaagcaaggggtaaccacgtaattcgtgatgaggaagtaagctctgctgatataagtagttcatctgaggtaatatcacagcatctagtatcttacagaaatattgaagagcttcaacaacaaaatcaacgtctcttagtggcccttagagagcttggggaaaccagagaaagagaagaacaagaaacaacttcatccaaaatcactgagcttcagctcaaacttgagagtgcccttactgaactagaacaactccgcaaatcacgacagcatcaaatgcagcttgttgattccatagttcgtcagcgtgatatgtaccgtattttattgtcacaaacaacaggagttgccattccattacatgcttcaagcttagatgatgtttctcttgcatcaactccaaaacgtccaagtacatcacagactgtttccactcctgctccagtacctgttattgaatcaacagaggctatagaggctaaggctgcccttaaacagttgcaggaaatttttgagaactacaaaaaagaaaaagcagaaaatgaaaaaatacaaaatgagcagcttgagaaacttcaagaacaagttacagatttgcgatcacaaaataccaaaatttctacccagctagattttgcttctaaacgttatgaaatgctgcaagataatgttgaaggatatcgtcgagaaataacatcacttcatgagagaaatcagaaactcactgccacaactcaaaagcaagaacagattatcaatacgatgactcaagatttgagaggagcaaatgagaagctagctgtcgcagaaataagagcagaaaatttgaagaaggaaaaggaaatgcttaaattgtctgaagttcgtctttctcagcaaagagagtctttgttagctgaacaaagggggcaaaacttactgctaactaatctgcaaacaattcagggaatactggagcgatctgaaacagaaaccaaacaaaggcttagtagccagatagaaaaactggaacatgagatctctcatctaaagaagaagttggaaaatgaggtggaacaaaggcatacacttactagaaatctagatgttcaacttttagatacaaagagacaactggatacagagacaaatcttcatcttaacacaaaagaactattaaaaaatgctcaaaaagaaattgccacattgaaacggcacctcagtaatatggaagtccaagttgcttctcagtcttcacagagaactggtaaaggtcagcctagcaacaaagaagatgtggatgatcttgtgagtcagctaagacagacagaagagcaggtgaatgacttaaaggagagactcaaaacaagtacgagcaatgtggaacaatatcaagcaatggttactagtttagaagaatccctgaacaaggaaaaacaggtgacagaagaagtgcgtaagaatattgaagttcgtttaaaagagtcagctgaatttcagacacagttggaaaagaagttgatggaagtagagaaggaaaaacaagaacttcaggatgataaaagaagagccatagagagcatggaacaacagttatctgaattgaagaaaacactttctagtgttcagaatgaagtacaagaagctcttcagagagcaagcacagctttaagtaatgagcagcaagccagacgtgactgtcaggaacaagctaaaatagctgtggaagctcagaataagtatgagagagaattgatgctgcatgctgctgatgttgaagctctacaagctgcgaaggagcaggtttcaaaaatggcatcagtccgtcagcatttggaagaaacaacacagaaagcagaatcacagttgttggagtgtaaagcatcttgggaggaaagagagagaatgttaaaggatgaagtttccaaatgtgtatgtcgctgtgaagatctggagaaacaaaacagattacttcatgatcagatcgaaaaattaagtgacaaggtcgttgcctctgtgaaggaaggtgtacaaggtccactgaatgtatctctcagtgaagaaggaaaatctcaagaacaaattttggaaattctcagatttatacgacgagaaaaagaaattgctgaaactaggtttgaggtggctcaggttgagagtctgcgttatcgacaaagggttgaacttttagaaagagagctgcaggaactgcaagatagtctaaatgctgaaagggagaaagtccaggtaactgcaaaaacaatggctcagcatgaagaactgatgaagaaaactgaaacaatgaatgtagttatggagaccaataaaatgctaagagaagagaaggagagactagaacaggatctacagcaaatgcaagcaaaggtgaggaaactggagttagatattttacccttacaagaagcaaatgctgagctgagtgagaaaagcggtatgttgcaggcagagaagaagctcttagaagaggatgtcaaacgttggaaagcacgtaaccagcatctagtaagtcaacagaaagatccagatacagaagaatatcggaagctcctttctgaaaaggaagttcatactaagcgtattcaacaattgacagaagaaattggtagacttaaagctgaaattgcaagatcaaatgcatctttgactaacaaccagaacttaattcagagtctgaaggaagatctaaataaagtaagaactgaaaaggaaaccatccagaaggacttagatgccaaaataattgatatccaagaaaaagtcaaaactattactcaagttaagaaaattggacgtaggtacaagactcaatatgaagaacttaaagcacaacaggataaggttatggagacatcggctcagtcctctggagaccatcaggagcagcatgtttcagtccaggaaatgcaggaactcaaagaaacgctcaaccaagctgaaacaaaatcaaaatcacttgaaagtcaagtagagaatctgcagaagacattatctgaaaaagagacagaagcaagaaatctccaggaacagactgtgcaacttcagtctgaactttcacgacttcgtcaggatcttcaagatagaaccacacaggaggagcagctccgacaacagataactgaaaaggaagaaaaaaccagaaaggctattgtagcagcaaagtcaaaaattgcacacttagctggtgtaaaagatcagctaactaaagaaaatgaggagcttaaacaaaggaatggagccttagatcagcagaaagatgaattggatgttcgcattactgcgctaaagtcccaatatgaaggtcgaattagtcgcttggaaagagaactcagggagcatcaagagagacaccttgagcagagagatgagcctcaagaaccttctaataaggtccctgaacagcagagacagatcacattgaaaacaactccagcttctggtgaaagaggaattgccagcacatcagacccaccaacagccaatatcaagccaactcctgttgtgtctactccaagtaaagtgacagctgcagctatggctggaaataagtcaacacccagggctagtatccgcccaatggttacacctgcaactgttacaaatcccactactaccccaacagctacagtgatgcccactacacaagtggaatcacaggaagctatgcagtcagaagggcctgtggaacatgttccagtttttggaagcacaagtggatccgttcgttctactagtcctaatgtccagccttctatctctcaacctattttaactgttcagcaacaaacacaggctacagcttttgtgcaacccactcaacagagtcatcctcagattgagcctgccaatcaagagttatcttcaaacatagtagaggttgttcagagttcaccagttgagcggccttctacttccacagcagtatttggcacagtttcggctacccccagttcttctttgccaaagcgtacacgtgaagaggaagaggatagcaccatagaagcatcagaccaagtctctgatgatacagtggaaatgcctcttccaaagaagttgaaaagtgtcacacctgtgggaactgaggaagaagttatggcagaagaaagtactgatggagaggtagagactcaggtatacaaccaggattctcaagattccattggagaaggagttacccagggagattatacacctatggaagacagtgaagaaacctctcagtctctacaaatagatcttgggccacttcaatcagatcagcagacgacaacttcatcccaggatggtcaaggcaaaggagatgatgtcattgtaattgacagtgatgatgaagaagaggatgatgatgaaaatgatggagaacatgaggattatgaagaggatgaggaagatgatgatgatgatgaagatgacacagggatgggagatgagggtgaagatagtaatgaaggaactggtagtgccgatggcaatgatggttatgaagctgatgatgctgagggtggtgatgggactgatccaggtacagaaacagaagaaagtatgggtggaggtgaaggtaatcacagagctgctgattctcaaaacagtggtgaaggaaatacaggtgctgcagaatcttctttttctcaggaggtttctagagaacaacagccatcatcagcatctgaaagacaggccccatcagagcacctcagtcaccgagacgcccaccacatccacttcccccaagactgaccattcatgccccacctcaggagttgggaccaccagttcagagaattcagatgacccgaaggcagtctgtaggacgtgggccttcagttgactccagggaatagggtgggcatgcaacagcatttttttgatggatgaagacagaacagttccaaagtacttccaaactcttgtggtgccacatcgtactgatggatttgctgaagcaattcattcgccgcaggttgctggtgtccctagattccggtttgggccaccctgaagatatgccacaaacaagttctagtcactctgatcttggccagcttgcttctcaaggagaattgtctttaggtttaggaatgtatgaaacacccctgttcctagctcatgaagaagagtcaggtggccgaagtgttcccactactccactacaagtagcagccccagtgactgtatttactgagagcaccacctctgatgcttcggaacatgcctctcaatctgttccaatggtgactacatccactggcactttatctacaacaaatgaaacagcaacaggtgatgatggagatgaagtatttgtggaggcagaatctgaaggtattagttcagaagcaggcctagaaattgatagccagcaggaagaagagccggttcaagcatttgattgagtcagatcttccccccccccacagccagatcttccctttagtcatctgtagatactagtagtagtcaaccaaaaaccttcagacgaggtagacttccagcaacattttaacaaggtgtccgtggtcgtcagtttaacagacagagaggtgtgagccatccaatgggagggagaggaggaataaacagaggaaatattaattaaatggtctgtaaacaataacaactgtgaataagattatcaaatctgttttagtgtaatgattgtcaagtttaaaaacatttttatatataaactggtatactcatgtcaatattctttattaataaaatgtttttcagtgtcaaaatttattattcatttcttcattagttgactcctcctttgctcatcagtctaaggacagttgtaccagactttggataaggtctgcccagaacgagtagtaattgctcttgctgttctactaggcacatcaatgttatagtattgatctaaatggaagagaaaacatttttttagttaaaaagaaaacaatgcccaaactaaaaaataacttatgttgactattatgctcaaagacaatgtttatcattttaatagagatgtttttactaattaatttgaactttataacaaaaagaaaaacaattgcctagacttttcagcttttttgatgtttcacaagattgacatttcaccatctttttgtaaaatcaggttcagctctcctttatgaagtaaacattaaagagtaaccaagtttgaaaaataatttact

SEQ ID NO: 134440 - DNA, 11835 bp, Homo sapiens
gcgcaagaggatcagggatagcctctgagctcgggttcccagggttcgtagcttccaacggctgcgcgcgcacttcggtcgcgggcggtgaggtgctgttgctgaaacgctgccgctgagggtggactcgatttcccagggtcccgccgcgggagtctccggcgggcgggcgcgcgcgagccaccgagcgaggtgatagaggcggcggcccaggcgtctgggtcctgctggtcttcgcctttcttctccgcttctaccccgtcggccgctgccactggggtccctgggccccaccgacatgggcggcggtgttgcagcaagtcctgggagcgcacggagctgaacaagctggcccaagtctgtccagaacaaacttgaaaagttccttgctgatcagcaattccgagatcgatgggccttgaaggggcgggcatggagaaatttaaaggtgggagagcgaacaacagtattttgaaatagaaaagaggttgtcccacagtcaggagagacttgtgaatgaaacccgagagtgtcaaagcttgcggcttgagctagagaaactcaacaatcaactgaaggcccctacctgagaaaaacaaagaacttgaaattgcctcaggatcgcaatattgcccattcagagccaatttacaagaacaaaggaagaattagaagctgagaaaagagacttaattagaacccaatgagagactatctcaagaacttgaatacttaacagaggatgttaaacgtctgaatgaaaaacttaaagaaagcaatacaacaaagggtgaacttcagttaaaattggatgaacttcaagcttctgatgtttctgttaagtatcgagaaaaacgcttggagcaagaaaaggaattgctacatagtcagaatacatggctgaatacagagttgaaaaccaaaactgatgaacttctggctcttggaagagaaaaagggaatgagattctagagcttaaatgtaatcttgaaaataaaaaagaagaggtttctagactggaagaacaaatgaatggcttaaaaacatcaaatgaacatcttcaaaagcatgtggaggatctgttgaccaaattaaaagaggccaaggaacaacaggccagtatggaagagaaattccacaatgaattaaatgcccacataaaactttctaatttgtacaagagtgccgctgatgactcagaagcaaagagcaatgaactaacccgggcagtagaggaactacacaaacttttgaaagaagctggtgaagccaacaaagcaatacaagatcatcttctagaggtggagcaatccaaagatcaaatggaaaaagaaatgcttgagaaaatagggagattggagaaggaattagagaatgcaaatgaccttctttctgccacaaaacgtaaaggagccatattgtctgaagaagagcttgccgccatgtctcctactgcagcagctgtagctaagatagtgaaacctgggatgaaactaactgagctctataatgcttatgtggaaactcaggatcagttgcttttggagaaactagagaacaaaagaattaataagtacctagatgaaatagtgaaagaagtggaagccaaagcaccaattttgaaacgccagcgtgaggaatatgaacgtgcacagaaagctgtagcaagtttatctgttaagcttgaacaagctatgaaggagattcagcgattgcaggaggacactgataaagccaacaagcaatcatctgtacttgagagagataatcgaagaatggaaatacaagtaaaagatctttcacaacagattagagtgcttttgatggaacttgaagaagcaaggggtaaccacgtaattcgtgatgaggaagtaagctctgctgatataagtagttcatctgaggtaatatcacagcatctagtatcttacagaaatattgaagagcttcaacaacaaaatcaacgtctcttagtggcccttagagagcttggggaaaccagagaaagagaagaacaagaaacaacttcatccaaaatcactgagcttcagctcaaacttgagagtgcccttactgaactagaacaactccgcaaatcacgacagcatcaaatgcagcttgttgattccatagttcgtcagcgtgatatgtaccgtattttattgtcacaaacaacaggagttgccattccattacatgcttcaagcttagatgatgtttctcttgcatcaactccaaaacgtccaagtacatcacagactgtttccactcctgctccagtacctgttattgaatcaacagaggctatagaggctaaggctgcccttaaacagttgcaggaaatttttgagaactacaaaaaagaaaaagcagaaaatgaaaaaatacaaaatgagcagcttgagaaacttcaagaacaagttacagatttgcgatcacaaaataccaaaatttctacccagctagattttgcttctaaacgttatgaaatgctgcaagataatgttgaaggatatcgtcgagaaataacatcacttcatgagagaaatcagaaactcactgccacaactcaaaagcaagaacagattatcaatacgatgactcaagatttgagaggagcaaatgagaagctagctgtcgcagaagtaagagcagaaaatttgaagaaggaaaaggaaatgcttaaattgtctgaagttcgtctttctcagcaaagagagtctttgttagctgaacaaagggggcaaaacttactgctaactaatctgcaaacaattcagggaatactggagcgatctgaaacagaaaccaaacaaaggcttagtagccagatagaaaaactggaacatgagatctctcatctaaagaagaagttggaaaatgaggtggaacaaaggcatacacttactagaaatctagatgttcaacttttagatacaaagagacaactggatacagagacaaatcttcatcttaacacaaaagaactattaaaaaatgctcaaaaagaaattgccacattgaaacagcacctcagtaatatggaagtccaagttgcttctcagtcttcacagagaactggtaaaggtcagcctagcaacaaagaagatgtggatgatcttgtgagtcagctaagacagacagaagagcaggtgaatgacttaaaggagagactcaaaacaagtacgagcaatgtggaacaatatcaagcaatggttactagtttagaagaatccctgaacaaggaaaaacaggtgacagaagaagtgcgtaagaatattgaagttcgtttaaaagagtcagctgaatttcagacacagttggaaaagaagttgatggaagtagagaaggaaaaacaagaacttcaggatgataaaagaagagccatagagagcatggaacaacagttatctgaattgaagaaaacactttctagtgttcagaatgaagtacaagaagctcttcagagagcaagcacagctttaagtaatgagcagcaagccagacgtgactgtcaggaacaagctaaaatagctgtggaagctcagaataagtatgagagagaattgatgctgcatgctgctgatgttgaagctctacaagctgcgaaggagcaggtttcaaaaatggcatcagtccgtcagcatttggaagaaacaacacagaaagcagaatcacagttgttggagtgtaaagcatcttgggaggaaagagagagaatgttaaaggatgaagtttccaaatgtgtatgtcgctgtgaagatctggagaaacaaaacagattacttcatgatcagatcgaaaaattaagtgacaaggtcgttgcctctgtgaaggaaggtgtacaaggtccactgaatgtatctctcagtgaagaaggaaaatctcaagaacaaattttggaaattctcagatttatacgacgagaaaaagaaattgctgaaactaggtttgaggtggctcaggttgagagtctgcgttatcgacaaagggttgaacttttagaaagagagctgcaggaactcgaagatagtctaaatgctgaaagggagaaagtccaggtaactgcaaaaacaatggctcagcatgaagaactgatgaagaaaactgaaacaatgaatgtagttatggagaccaataaaatgctaagagaagagaaggagagactagaacaggatctacagcaaatgcaagcaaaggtgaggaaactggagttagatattttacccttacaagaagcaaatgctgagctgagtgagaaaagcggtatgttgcaggcagagaagaagctcttagaagaggatgtcaaacgttggaaagcacgtaaccagcatctagtaagtcaacagaaagatccagatacagaagaatatcggaagctcctttctgaaaaggaagttcatactaagcgtattcaacaattgacagaagaaattggtagacttaaagctgaaattgcaagatcaaatgcatctttgactaacaaccagaacttaattcagagtctgaaggaagatctaaataaagtaagaactgaaaaggaaaccatccagaaggacttagatgccaaaataattgatatccaagaaaaagtcaaaactattactcaagttaagaaaattggacgtaggtacaagactcaatatgaagaacttaaagcacaacaggataaggttatggagacatcggctcagtcctctggagaccatcaggagcagcatgtttcagtccaggaaatgcaggaactcaaagaaacgctcaaccaagctgaaacaaaatcaaaatcacttgaaagtcaagtagagaatctgcagaagacattatctgaaaaagagacagaagcaagaaatctccaggaacagactgtgcaacttcagtctgaactttcacgacttcgtcaggatcttcaagatagaaccacacaggaggagcagctccgacaacagataactgaaaaggaagaaaaaaccagaaaggctattgtagcagcaaagtcaaaaattgcacacttagctggtgtaaaagatcagctaactaaagaaaatgaggagcttaaacaaaggaatggagccttagatcagcagaaagatgaattggatgttcgcattactgcgctaaagtcccaatatgaaggtcgaattagtcgcttggaaagagaactcagggagcatcaagagagacaccttgagcagagagatgagcctcaagaaccttctaataaggtccctgaacagcagagacagatcacattgaaaacaactccagcttctggtgaaagaggaattgccagcacatcagacccaccaacagccaatatcaagccaactcctgttgtgtctactccaagtaaagtgacagctgcagctatggctggaaataagtcaacacccagggctagtatccgcccaatggttacacctgcaactgttacaaatcccactactaccccaacagctacagtgatgcccactacacaagtggaatcacaggaagctatgcagtcagaagggcctgtggaacatgttccagtttttggaagcacaagtggatccgttcgttctactagtcctaatgtccagccttctatctctcaacctattttaactgttcagcaacaaacacaggctacagcttttgtgcaacccactcaacagagtcatcctcagattgagcctgccaatcaagagttatcttcaaacatagtagaggttgttcagagttcaccagttgagcggccttctacttccacagcagtatttggcacagtttcggctacccccagttcttctttgccaaagcgtacacgtgaagaggaagaggatagcaccatagaagcatcagaccaagtctctgatgatacagtggaaatgcctcttccaaagaagttgaaaagtgtcacacctgtaggaactgaggaagaagttatggcagaagaaagtactgatggagaggtagagactcaggtatacaaccaggattctcaagattccattggagaaggagttacccagggagattatacacctatggaagacagtgaagaaacctctcagtctctacaaatagatcttgggccacttcaatcagatcagcagacgacaacttcatcccaggatggtcaaggcaaaggagatgatgtcattgtaattgacagtgatgatgaagaagaggatgaggaagatgatgatgatgatgaagatgacacagggatgggagatgagggtgaagatagtaatgaaggaactggtagtgccgatggcaatgatggttatgaagctgatgatgctgagggtggtgatgggactgatccaggtacagaaacagaagaaagtatgggtggaggtgaaggtaatcacagagctgctgattctcaaaacagtggtgaaggaaatacaggtgctgcagaatcttctttttctcaggaggtttctagagaacaacagccatcatcagcatctgaaagacaggcccctcgagcacctcagtcaccgagacgcccaccacatccacttcccccttgactgtctcattcatgccccacctcaggagttgggaccaccagttcatagaattcagatgacccgaaggcagtctgtaggacgtggccttcaattgactccaggaataggtggcatgcattacagcatttttttgatgatgaagacaggacagttccaagtttctccaacttcttgtggtgccacatcgtactgatggatttgctgaagcaaattcattcgcccgcaggttgctggtgtccctagattccggtttgggccacctggaagatatgccacaaacaagttctagtccactctgatcttgggccagcggctttgctcaaggaggtttaggaatgtatgaaacacccctgttcctagctcatgtaagaagagtcaggtggccgaagtgttcccactactccactacaagtagcagccccaagtgactgtatttactgagagcacccacctctgatgcttcggaacatgccctcctcaatctgttcccaatggtgacctacatcccactggcactttatcctacaacaaatgaaacagcaacaggtgatgatggagatgaagtatttgtggaggcagaatctgaaggtattagttcagaaggcaggccttagaaattgatagccagcaggaagaagagccggttcaagcatctgatgagtcagatctcccctccaccagccaggatcctccttctagctcatctgtagatactagtagtagtcaaccaaagcctttcagacgagtaagacttcagacaacattgagacaaggtgtccgtggtcgtcagtttaacagacagagaggtgtgagccatgcaatgggagggagaggaggaataaacagaggaaatattaattaaatggtctgtaaacaataacaactgtgaataagattatcaaatctgttttagtgtaatgattgtcaagtttaaaaacatttttatatataaactggtatactcatgtcaatattctttattaataaaatgtttttcagtgtcaaaatttattattcatttcttcattagttgactcctcctttgctcatcagtctaaggacagttgtaccagactttggataaggtctgcccagaacgagtagtaattgctcttgctgttctactaggcacatcaatgttatagtattgatctttagaaaaggcatagtaatcatagccgtcaggttttctggatggttggggcagtggatatagccggagggtaaccacatttgggaaggtcctctccacaggtatactcactttaacttcattatggagggacacctttgtcttgataagccagtctggcagggtgaatattgaattctgatgggtgtgtgtttgaggagggtcctataggcacgttcaaagcgacgtcttcctaacctgtgtcggtttctccatacactggataatttagagcaggccttcttccagggcacttctgtacaggttcctgtttataaatatactgctgaatgctgccacctctcttgaaaaaatacacagattcaggccagttcttatatttagctgttgaaagcgctgccactatttgtccagttagtcctccaaatcctttgaaaattggtttggggtaccctgcatcttttatatcattggtaaaacgccagtactgaagaatccctttaaagaagaaagtttttccttccacagttgccacctagtaaaaacagtatccaatgggggaaggaataccccaaacttcagtaattctgcgagctggagatggtggactgaatggacttagcatccagaaataatgacctcggaaatgccaactaaatgtccccattggcgcaaagtaagtcaagtcccatcctactggcttacccattgcatatattggtcctccatcggaaaagcatgggattgaatgaataatgcccttgaattgggtactctcggtaagtaatcccatgtcgggagtaacttcaggcatgaacacatggggcctgagaagcatatgaggtgtttctccttcagcaccacctgcatcttcactctttggatttacttcaactagtttggagtttggagtttggttaggtctggtggtggtttggagcatggcttctgctattcttgaggtagggttcaattctggcattgttgatgtcatcttgcggggagttggtgtcgtctttggttttctcactctaggcattgtttttggctttttggtagaagtgggttttttgggtgctttggttggcttttgaggtttaggagttgtcgctttagaattagtagctctgtcttttggtttagctgtttcttcaggtttgttcataatctcagtggtagtaattgtcttttttgttgtagttactttgggtgcaagagtagttgttttaagagtagtaattttgaatggtgtggtatcttgagttgtggtagatgttacttgtgtggttgtagctgttattttggattcggtagttttttctgttgtagttgctgtctcttttgtcatcttaggtgcagcagttgtagtttcaggtgtagtacgtaagtctctttctgttgtcttgtctttagctgttgtagtcatttcaggtttagtcgctgcaggagtcttagttgtaggtacaccaggttccttgggactgttttcaagagcttttggtgtgggttctgcagaaagctcaggagttgattcatcagggcttttgtggatagtggtaggctccttggtggtagttggagtagagacctctgaagtggttggaggaggtgtctcaggagtagttggagcaggcttcttgggggtagtgggtgcaggctccttgggggtagttggagcagtctccttaggtgtagttggagcaggcttgtcagaggtggtggatgtgggccccttggtggtggtgggtgcaagctccttgggggcaggcttcttgggagtagtgggtgcaggttccttgagggtagttggagcagtccccttaggggtagttggagcaggctccttaggggtagttggagcaggctccttaggggtagttggagcagtccccttaggggtagttggagcgggcttgtcagaggtggtggatgtgggctccttggtggtggtgggtgcaagctccttgggggcaggcttcttgggagtagtgggtgcaggttccttgagggtagttggagcagtccctttaggggtagttggagcagtctccttaggggtagttggagcaggctccttaggggtagttggagcaggctccttaggggtagttggagcaggctccttaggggtgttgggagccgctgccttgggagtggtgggagcaggctcctcaggggtggtgggtgtgggctcctcaggggtggtgggtgcgagctcctcaggggtggtgggtgcgggcttctcaggggtggtgggtgcgagcttctcgggggtggtgggcgtgagcttcttgggggtggtgggtgcagtctccttgggggtagttggggcaggctctttgggagcggtgggtgcaggcttcttggtggtggtgggtgcaggttccttgggagtggtgggtgcaggctccttgggggtagttggggcaggcttcttgggggtggtgggtgcaggctccttgggagtggtgggtgcaggctccttggtggtggtgggtgaaggctccttgggagtggtgggtgcagacttggtagtggtgggtgcaggctccttggtagtggtgggtgcagacttggtggtggtgggtgcaggctccttgggagtggtgggtgaaggctccttggtggtggtgggtgcaggctccttgggagtggtgggtgcaggctccttgggggtagttggggcaggcttcttgggggcagtgggtgcaggctctttgggagtggtgggtgcaggctccttggtggtgggtgcaggctccttgggagtggtgggtgtaggctccttgggagtggtgggtgcaggctccttgggggtagttggggcaggcttcttgggggtggtgggtgcaggctccttgggagtggtgggtgcagacttggtggtggtgggtgcaggctccttggtggtggtgggtgcaggctccttgggagtggtgggtgcaggctccttggtggtggtgggtgcaggctccttgggagtggtgggtgcagacttggtggtggtgggtgcaggctccttgggggtggtgggtgcagacttgatggtggtaggtgtgggctctttgggtgtggtagatgcaggctccttgggagtggtgggcgtgggctccttgggagtggtgagagcagggcctttggttgtaagtttcagctttgggtgtaggtttagccagcactttagatgttgggtcgctaaatctttaagcagatgttttctctatactttgtgtctctttagcggaagtagtcttctcttttccatcagttgaagtctgtttatttgttgtagtagtttctttagtttcaactgttgtctctttattcactgtcaaagacgtctctttagatgtatcagaattaggtggaagactgggtctgggatttattggttttgctgttgtgatcttgggagatgtgctgactttattgtgttgggtggtagacgtgtcaggagttgtgaccttgaagtcaccattgtccaatccacttccagcttcatctacaactggtggtttgggggtaggtttctttttagttctgttcttcttgttatcttttactttgagtttcttctgtaattctctattagcagctgaatttttggaagacttgattttccaaattgttgaagaagaagaggaagaggaggaggaggaggaggactcttgattttcagaaacagaatgttcttctgttatttcctctgattctataactttcttagtcttcttcttgtttggtggtttgggtgaacgtttggttgttgatttgatggtttgagatgctcctgaaggtggaggtgctttctttgaagatggtggtgatgtgggattatgcacttctgcacagaaactctcataatcgggacagcacttgtcatacttcttacattgggcgtcgcagtcacactccctccctctctcgaaggactcaaagcagcggcctttacaggaaagctccgcagtgcagactctcttgaaatcagggcagcactccatgtagtgttgacagttataatcacagttgcaggtggcatctctagaatacccttccccacatctccctgcacagcttgataaatcttgagatgaaacttgctgaatcacgaaaacagacagcagcaacaacaggtaaatgggaagtgttttccatgccat

SEQ ID NO: 134441 - DNA, 433 bp, Homo sapiens
ccagcgtggtggaattcggggcaatggggaccctttcccctgggtcggtctttctgtgggtctgtctgtccctaccacaggcagtgaacggcggctgtcaggggacctcagctccatgccaggccctgggactctgagcgtccgtgtctctcccccgcaacccatcctcagccggggccgtccagacagcaacaagaccgagaaccggcgtatcacacacatctccgcggagcagaagcggcgcttcaacatcaagctggggtttgacacccttcatgggctcgtgagcacactcagtgcccagcccagcctcaaggagcgtgcgggcttgcaggaggaggcccagcagctgcgggatgagattgaggagctcaatgccgccattaacctgtgccagcagcagctgcccgccacaggggtacccatcacacac

SEQ ID NO: 134442 - DNA, 417 bp, Homo sapiens
aggatttcgcagggtgtcacttgagttctagtttcctggggtgaggtgggggatgaggaagctgggtgcccctgacctggcccccttctctcagatgtgaagcggaggaagagccccgtgtgtggcttcgtgacccccctgcaggggcctgaggctgatgcgcaccggaagccggaggtagctgggttctggaccgcctgcccacctgcccacctgcccacccaccaagaccagcccctgcctcctgtagccttgcgctgagcaaacagggatggggtgaagggtgggagatgggtgtgcggtgctcccctctttactgatccccctcccccggcccctaccccaggcctgggtcctggaggggaactacttggagcggtgcatcgggtggtgatgcgggaataccacaagtggcct

SEQ ID NO: 134443 - DNA, 3157 bp, Homo sapiens
atggccggcgcgctggcaggtctggccgcgggcttgcaggtcccgcgggtcgcgcccagcccagactcggactcggacacagactcggaggacccgagtctccggcgcagcgcgggcggcttgctccgctcgcaggtcatccacagcggtcacttcatggtgtcgtcgccgcacagcgactcgctgccccggcggcgcgaccaggaggggtccgtggggccctccgacttcgggccgcgcagtatcgaccccacactcacacgcctcttcgagtgcttgagcctggcctacagtggcaagctggtgtctcccaagtggaagaatttcaaaggcctcaagctgctctgcagagacaagatccgcctgaacaacgccatctggagggcctggtatatccagtatgtgaagcggaggaagagccccgtgtgtggcttcgtgacccccctgcaggggcctgaggctgatgcgcaccggaagccggaggccgtggtcctggaggggaactactggaagcggcgcatcgaggtggtgatgcgggaataccacaagtggcgcatctactacaagaagcgggtcagtgggggagggccagggaggccccagagctttcctcctgcggctgccggctaccgcccgcctcggaagatccctggaaaggggatcctgacccccgagcttgcgcccctcgggccctccattcagtcccgggccgacagcgccaccgtgtggccacagcgtctcctagcggcctccttacctaggggtcggctccgtaagcccagcagggaagatgacctcctggcccctaagcaggcggaaggcaggtggccgccgccggagcaatggtgcaaacagctcttctccagtgtggtccccgtgctgctgggggacccagaggaggagccgggtgggcggcagctcctggacctcaattgctttttgtccgacatctcagacactctcttcaccatgactcagtccggcccttcgcccctgcagctgccgcctgaggatgcctacgtcggcaatgctgacatgatccagccggacctgacgccactgcagccaagcctggatgacttcatggacatctcagatttctttaccaactcccgcctcccacagccgcccatgccttcaaacttcccagagccccccagcttcagccccgtggttgactccctcttcagcagtgggaccctgggcccagaggtgcccccggcttcctcggccatgacccacctctctggacacagccgtctgcaggctcggaacagctgccctggccccttggactccagcgccttcctgagttctgatttcctccttcctgaagaccccaagccccggctcccaccccctcctgtacccccacctctgctgcattaccctccccctgccaagcaggagacagtccctgaattcccctgcacattccttcccccgaccccggcccctacaccgccccggccacctccaggcccggccacattggccccttccaggcccctgcttgtccccaaagcggagcggctctcacccccagcgcccagcggcagtgaacggcggctgtcaggggacctcagctccatgccaggccctgggactctgagcgtccgtgtctctcccccgcaacccatcctcagccggggccgtccagacagcaacaaggccctcctgggctccttcctaggctcacccaactctctgctccccgagaccgagaaccggcgtatcacacacatctccgcggagcaggaagcggcgcttcaacatcaagctggggtttgacacccttcatgggctcgtgagcacactcagtgcccagcccagcctcaaggtgagcaaagctaccacgctgcagaagacagctgagtacatccttatgctaccagcaggagcgtgcgggcttgcaggaggaggcccagcagctgcggggatgagattgaggagcttcaatgccgccattaacctgtgccagcagcagctgcccgccacaggggtacccattcacacaccagcgttttgaccagatgcgagacatgtttgatggactacgtccgaacccgtacgctgcacaactgggaagttctgggtggtatcctccctcaagcccatggctggggggctgcaggggctgtggcagggcagctccttgacctgggcccagttcagcatcctcatccggcctctgtttgagtccttcaacgggatggtgtccacggcaagtgtgcacaccctccgccagacctcactggcctggctggaccagtactgctctctgcccgctctccggccaactgtcctgaaactccctacgtcagctgggcacatcttaccagtatcctgaaccgacccgggccgcattccctgaggcaagccacacgggcagtcacagagggcacccttggcaaacctttatagtcctgggccagaccctggctgctcactcagctgccctgggggctgctttccctggggcacgggctccagggatcatctttggggcactcctttccttgccccaggccctggctctgccctttccctgggggggttggaagcagggtccaggtttcacacttgccacctcctggaggtcaagaagagcagagtccccgtccctgctctgccactgtgctccagcaccgtgaccttgggtgactcgtccgctgtctttggaaccgctgtgtttcaatctgcaaaatgggggatggggaaaggttcaaatcaaacagatgaccccccaggccttggcagctgtgaacattgggggcctaggctggcaactccgggggctcaacggtggaaagaggaggatgctgtttctctgtcaacctcccacttgctccccgacaggtggggcacagactctctgttcctgagcagagaagcagaaaaggaggttccctctctctgctccttcactgctgacccagaggggctgcaggatggtttcccctgggagaggccaggagggcctgatcccaggagacaccagggccagagtgaccacagcagggcaggcatcatcgtgtgtgtgtgtgtgtgtggatgtgtgtgtgtgggttttgtaaagaattcttgaccaataaaagcaaaaactgtctgcgcaaaaaaaaaaaaaaaaaaaaaaaaaaaaaagtcgtatcgatgt

SEQ ID NO: 134444 - DNA, 466 bp, Homo sapiens
gtcttcatccttagcaccacagacttctgaggtcctgtgccctttacttgctggtgaggtgtcataggtagaaaagggctggcccttcagatctgggggtgtggtgagtggcaagtaagggcagaattttaggagaaccagagtcacccgctggctctactgagattgttacacccagaagccttttggttaccgcctcatgaagaatatgcttcccgcattgtcctagtcccagttgtattctcacaggtgttatgtgcaggacacaatccaaatcataaacctgctcatgcccaacacatttctgctaatagggagagggacccaccacacacccacacatgccagaggtccctcctcacagaggagagggcctgtgtctgtagaaggttaaagctgacaacatgtgaaacatcccagaattatgactcttcccaagtttaaaatacattctcctcatgagagc

SEQ ID NO: 134445 - DNA, 1020 bp, Homo sapiens
atgcccttggtccagcccgcctttggtggcttagcacaggcccctgcagccacctggctgcccacagccctgcgcacaggagctctgcacctgctctttctccctggggcagaaggtgttgacttgggaaccagggatgcaaatgttagttttaaaggagacattaaattgagtcttccagtttacataatgaagatcaaaccacctaagcctgttacaggcaccacattcaaaagccccctggaagtctttgcaaagatcaaggactgctacggactgggctccgggcagaatcatttcatcaaggacagtcagtgggagcagcaagctgagatcttcaacgcttcctacaagaagtacctagatagggagtgggaggaagagccactcagctgcctatttgcaatgccaccggaagtcaagggcccctcagaccccgagggtgtgtggccctgtgctgcgcccattgcagtctctcagctcagctgctcctcctcctacctggtgctggcctgcgaggatggtgtgctcacgctgtgggacctggccaaagggtgctcattgcttgattttgccttcacatcctacaagtccctcacacacttgctggtcacagcccctgtgcccatggcctcctcccctaccccgttttctgaccggcttccagaagaaattcaacagcagattgttcgagagactttccatctagtcctcaagcgggatgacaacatctgtaacttcttggagggtggaagtttgattggtggctctgactacaaactgatctaccggcactatgctaccctctactttgtattttgtgtggattcctcagagagtgaacttggaatcttggacctcatccagctggagcagttcaagaaggacaacgaggaaacaggcttcggctcaggcacccgggccctggagcaagccctggagaagacgaaagccaacatcaagtgggtgaaggagaacaaggaggtggtgctccagtggttcacagaaaacagcaaatag

SEQ ID NO: 134446 - DNA, 1131 bp, Homo sapiens
atggcccagcccctgtgcccgccgctctccgagtcctggatgctctctgcggcctggggcccaactcggcggccgccgccctccgacaaggactgcggccgctccctcgtctcgtccccagactcatggggcagcaccccagccgacagccccgtggcgagccccgcgcggccaggcaccctccgggaccccgcgccccctccgcagaagctgacgcacagggaactcgaggaactttccataaggctagtgtgcagcccctggggacgggccaactgtgggctggtggttggtgaagcctgtctttgcaagagccctggcagcaaggtgctcatcttttccaagaatggctctgtgtgccttatggatgtggccaagcgtgaaatcatctgtgcctttgcccctccgggagcctttcctctggaggtcccctggaagccagtgtttgctgtgtctccagaccatccatgtttcctgctccgaggagactattcacatgaaactgcgtccaccgacgatgctggaatccaatattctgttttctattttaattttgaggcctgcccactcctggaaaatatctcaaaaaattgtaccattcctcaaagggacttggataacatggccttcccccaagcactgccactggagaagagatgtgagcgtttcctccagaagaggttgcccgttgcctctgacacgccctgtggcatcaggcaagtcactctttctgagcttcagttttcacagttcctaaaggaggaactatcttgggtggtgctgaggtaccttcttcctctaaccttccagaagtgctctggttctgcccttagggccctgctgtcccgaggggctgtcagccacagctggaaggatgagaaaaatccaggcaaggtgcactacatcctccaggaggtggtgatgggtgggatggtgttggaaacaaacatgaatgaaatcgtggctcagattgaggctcaaaacaggctggagaaatccgagggtggcctttcagcagcccctgcgcgggctgtgtctgctgtgaaaaacatcaacctgccagagattcctcggaacatcaacattggcgatctcaacatcaaagttcccaacctgtcccagtttgtctga

SEQ ID NO: 134447 - DNA, 452 bp, Homo sapiens
tttcgtggaaggaggagctttctgggagtagccggtgctgagagaaccgtggctggcaaagatgattcaggcgattctggttttcaacaaccatgggaagccacggctagtccgcttctaccagcgtttcgtgagtgcggcccggcttcaccacgccccttcagggcgcccactatgtcttccctcctctttggcctctcggcgcccgggggcaccgctcttcggtcagctggctgctcctgcaccgagcatgaccctcgccctacttaagcatttaatctaggcgcaggctggtgccaggccttctgtctcccgccctactgccccgctctcgctgacccttttcttgatcctggcatttctgtgccattttgtgacattttcccgtgggtctctgggaacgagatagaagcgacagtggggagtgtgcctcgatgagaacttgagtgatt

SEQ ID NO: 134448 - DNA, 2711 bp, Homo sapiens
gtgtttgtctcgtgtgatcatgtacgtcgtgttatcgagctctgtccctcatgatgcacgagcggaaggaggagctttctgggagtagccggtgctgagagaaccgtggctggcaaagtatgattcaggcgattctggttgtcaacaaccatgggaagccacggctagtccgctttctaccagcgtttcccagaagaaaattcaacagcagattgttcgagagactttccatctagtcctcaagcgggatgacaacatcctgtaacttcttggagggtggaagttttgattgggtggctctgactacaaacctgatctaccggcactatgctaccctctactttgtattttgtgtggattcctcagagagtgaacttggaatctttggacctcatccaggtttttgttggaaactcctggataagttgtttcgaaaatgttgtgtgaatttggatttgaaccttccataatggataaaggtgcactacatcctccaggaggtggtgatgggtggggatggtgttggaaacaaacatgaatgaaatcgtggctcagattgaggctccaaacaggctggagaaatccgaggggtggcctttcagcagccccctgcgcgggctgtgtctgctgtgaaaaacatcaacctgccagagattcctcggaacatcaacattggcgatctcaacatcaaagttcccaacctgtcccagtttgtctgaggatcaagtattggcctgaaatagagtccttaagacaagcaaagacaagtcaaggcaagcacgtctggaaacagaacccttttggagcctttagaagagtcaagcctcaggacctggaaaggggtgcgtctggggaagactgtttggcatggaatagggaagggattcctattgacactgctcgggtgcacccagttctccacatgtgcagtcatgccgttctctgatgcatacggccactgcagatgtgaggggccctgccttcctcagtagggagtcaacatgcccaagtcatttgcacctttacctctcacatggatgctcccaagggttagggactgcattgagcaggcccacctgcttcccagaacctcctcactagggctgagcaccttctctgagtagagtcttcatccttagcaccacagacttctgaggtcctgtgccctttacttgctggtgaggtgtcataggtagaaaagggctggcccttcagatctgggggtgtggtgagtggcaagtaagggcagaattttaggagaaccagagtcacccgctggctctactgagattgttacacccagaatccttttgtgtttttttgtggttttttttttttgaggtggagtcttgctctgtcacccaggctggagtgctgtggtgcaatctcggctcactgcaacctctgcttcccgggttcaagcaatttctccgtgtctcagccgtccccacgtagcgtgggattacaggcacccaccaccatgcccagctaattgttgtatgtttagtagagacaggggtttcacccatgttgggccaggctgggctcgaactccgtggacctcaagtgatctaccccgccttggcctccccaaagtgcctggcattacaggtgtgaagccacccgtgcccggcccacccagaatcctttggtataagccaagccttttggttacccgccctcatgaaagaatatgcttcccgcattgtcctagtccccagttggtattctcacagggtgttatgtggcagggacacaattccaaattcataaaccggggttcatggcccaacacatttctgctaattaggggagaggggacccaccacacacccacacatggccagaggtccctccttcacagtggagaggggcctgtgtctgtagtaaggtttaaagtttgacaacatgttgaaacatcccagaattatgactcttcccaagtttaaaatacattctcctcatgagagcagaaggtttgttgctgtgttgtgaatgatgagctgcctccatagggaacccactgccacctgggccagcttctggagcatgagaacctgagccagggtcacccttgtggggcctggacatgacgcacgctggctgcgactaggagcagggctgcctcttctccctccccaaggtctgcttgtgggcacgctctgttccctcaggtgccattctcccagggcttaggcgcccataaatgttctttctgtggtggagtagggcctcctgcttccatactgtcgcatgggctagatctcaggtgtggtgttgagccaccttaagatgagggctgcttcgcagtaaagtttccagcctgggcccctcttgggccttctggctggggaccctcagcctcctgatgctgttgcagggcaggtctgagagggtgcccagcagcacccggtgtcagggccaccttgttttccatttttgaacagcgctccctgtggtttgtgcccactgctcaatacagcctccgatcctcactcttgaaagctccatgataagcacagagatgggcagtgtgggtcagaaggtgggccgcttcctgtggaagagggaagtgtaggtgaatagatatcaaaacccctgatgtcattcttttgaggggttggattttcttttttctggcagacatttcagtacattcacatttctctcacatttgctgaatgtgagatcagaataaaggagatcggcgt

SEQ ID NO: 134449 - DNA, 370 bp, Homo sapiens
acagcctgcacctggcagccatcctgggggagacatccacggtggagaagctgtcgcagcaggcgccgggctgtgtgtggcggagcgtaggggccacacggcgtgcacctggcctgccgtgtgggggcacacgcctgtgcccgtgccctgctcagccccgcccccggcgccccagggaagcccccgacacctacctcgctcgggccctgaccgtactcccgacaccaaccatacccctgtcgccttgtacccgattccgacttggagaaggaagaagaggagagccacaccccactccacgtggccgttatccacaaagtgtggagatggtccggctgctccgagatgctggagctgaccttgacaaacg

SEQ ID NO: 134450 - DNA, 1266 bp, Homo sapiens
  misc_feature (1)...(1266): n = a,t,c or g
ttcccggcaaagcccagctacaggcgggcgactgcggtgggcccctgatgcggcgttggccatggctgtagtcgcgtgcttgggacaagctgccgactcagataaatggggcgacagccgcctgagctccctgggtccggacgcagcggcccccggaggacctgggttgggcgcggagttgggcccggggctgtcgtgggctcccctcgtcttcggctacgtcactgaggatggggacacgcttctcggccggcactgagtacatggacctgcagaatgacctangccaggtgagccacgagggatggtgtagggcttggggtccagggttcccagtgtgactccctaccgcctgtcctctgcttctgcagacagccctgcacctggcagccatcctgggggagacatccacggtggagaagctgtacgcagcaggcgccgggctgtgtgtggcggagcgtaggggccacacggcgctgcacctggcctgccgtgtgggggcacacgcctgtgcccgtgccctgcttcagccccgcccccggcgccccagggaagcccccgacacctacctcgctcagggccctgaccgtactcccgacaccaaccatacccctgtcgccttgtaccccgattccgacttggagaaggaagaagaggagagtgaggaggactggaagctgcagttggaggttgaaaattacgagggccacaccccactccacgtggccgttatccacaaagatgtggagatggtccggctgctccgagatgctggagcctgaccttgacaaaccggagcccacgtgcggccggagcccccttcatttggcagtggaaggccccaggcaagccgatgtgctggagcttctccctgagggcaggcgcgaacccctgctgccccgcatgtacggtggccgcacccccactcggcagtgccatgctccggcccaacccccatcctcgcccgctctcctccgtgcacaacggagcccctgagcccgagggcgaggacgagaaatccggccccctgcagcagcagtagcgacagtgacagccgcctgagcccctctgcctggtcccctttgcccccaggatgaatacgacgacattgtggttcacagcagccgcagccaaacccggctgcctcccaccccagcctcaaaacctcttcctgacgacccccgccccgtgtgatttgtttcattgttaatataatttccagtttaataaacaaaaccctagttctgacaaccaaaaaaaaaaaaa

SEQ ID NO: 134451 - DNA, 801 bp, Homo sapiens
cccggcgaccacgcgtcgaagacagacaggatggtgaggaggctgacttcggctgcggaaactgaaggcaataatgttggcttttggaaggggcaagacgagaaactctgaagaaagctctgactctcaggaagttatctggaaagatacctggatgtttactgccttgggacactgtgggatctccatgtttggactatgggacagagaattgaccctaactaactatgaactatttatttcctcctcccctacccctagttaagtgccacaaagactgtgttatgtagtcagtacttttctcatgtatctttctctagaccatttatatacgggtgaaatgaaagcttttttgcatgtacttgatactcagtctgtaaactcagacttcgctttttttgtgagactatcctttcaatatttttataaacttttgtgtgtgctgtggcagggaacagttaacaaggagtttatttagaggggtttttttcattttttgtttttcttgttttgttttgttttgttttgttcttcttggtgtgctttttggatgggaccagaacttaacattttcctgaggactaggaagctcatcagacactgggaatgcagtgattcttctaatgatggtcaactgcaaggagaaactgtttacatccttcccactacacagttgctatgatatgtaacaagtcacacatgtatatatcacacaagtcttaccaattctgcgtcactaggaagctatagcatggtcgtgaaagctctcctaatacttacttacttaaatagccatggaag

SEQ ID NO: 134452 - DNA, 1995 bp, Homo sapiens
atggagacttttgtgatcggatggcagccagccgtcactgtgtggaccattggcgtggctccacctccaacactggaaattacatctcaacatgagatttgggtggcacaacatccaaactacatcataagtgtaaagcaggagtccccagcccccatgccatggacagctgtggcattagattcccataggagcatgaacactattgtgaactgtgcacgcgagggatctacactgcatgctccttatgagagtctaatgcctgatgatctgaggtggaacagtttcatcctgaaatcatctccatcccctcattcccggtccatggaaaaattgtcttccatgaaactggtccctggtgccaaatacattagggaccactgtttagtaaaggaggccctgaccatccataaaagccccatcctgctggcagctattgatctactagggaatctcagtgggttcactgattaccaaagctatgtcatccatggctgcctggagaataatccaaccttggaaagatcgattgctttatttaatggaatctctaagtgggtccagttgatggttcttagcaaaccaaccccccagcaaagggcagaagtcatcacaaagtttatcaatgttgcaaagggtgctactgcagagttaaacctttggcaacacccaaaaatcattatgctatctcaggtggtgccaggggtattttcccaagaacactccctaattcgatccctacatgctaatctccatttcacagtctgctttccagaagacccacttgcaatggtggcaggaatggtccaagaaagcacgtgcccatgtgagattctgcagctgccaaccaccggccagctagcaaactggaatgaaatgacagagttggtctcctccaacggcaattactgcaattaccgcaagccctttccgacctgcgatgggctcaaaatccccatccttggagtacacttgaaagactggatagctgtccatgtcaatttcccagactggacagaggagatcaaagtgaacattgtgaaaatgcaccagctctccgttaccctgagtgaactagtctccctgcagaatgcgtctcaccacttagaacccaacatggatttgatcaacctgctcacggtggtgggctgcaaccggcagatcttatgcacgccatttcccttttcagaacttctcatcggccccagggattgttcctgtgaattaagggcacttctccagcagagcacagtgatagaagctgccaacacttcagagtatgaaaatgcagctcttgggaaagttggcatggtggttgttatccttggaagaataaatgtcaagtttcttactgagatccttctaaaagatttatgctccagaaaaaatgttgcatgccagactcgtgctgtttgcactaaccttgatgctttgctgtcaagcagtcagatgtcaaataatcaccaccctttttcacttccagcgcaggatgaggtgtttgagttccctggagtcactgctggacacagggatttagacagcagagccatcacactggttacaggctcttctcgcaagatctctgtgaggctacagagggccaccaccagccaggccacccagactgaacctgtctggtcagaggctggctggggggactcggggtcccacaccttccctaaaatgaaatccaagttccatgacaaagcagcaaaggacaaaggctttgccaaatgggaaaatgagaagcccagggtgcatgctggtgtggatgttgtagaccggggcacggagtttgaacttgaccaggatgaaggagaagagaccagacaggatggtgagcctgcagaggctgtttccgtgggtgctgtagctgcccctggaatgtcagaaaaagagcttctccaggtagatggtaggacgcctaccagagtgctcaggatggccgaccttgtgggcatctctgaattcagaggagaacctgcttttgtttaa

SEQ ID NO: 134453 - DNA, 4485 bp, Homo sapiens
ccatactgcagtgtcgtggaattcggacaggcagagtgctgatgtgaaaaataccacgacaaaaccaccctagttctccaaaatacttatcattcaggttgaataaaccagttctacagactgcttcttccatgcatttcccaatgatgctaactgcccttaaaattctttcagatttggaactgtatctgtatggaaacaacagagttttcttgaagtacaactaaggacaggtcaccactaggcactaacatcgctgacttgcatgattatggagatggtctatctgatgctgaaaatgtctctagttttttgacaacggctaaataaccatgggatcaagtggccttgggaaagcagcaacattagatgaactgctgtgcacttgcattgagatgtttgatgacaatggagagctggataatagttatttgccaagaatagttctactgatgcaccgatggtatttatcttccactgaattggcagaaaaacttctctgcatgtatcgaaatgccactggagaaagctgcaatgaatttcgattaaagatctgctacttcatgaggtactggattctgaagtttcctgcagagtttaatttggatcttggtttgattcgtatgactgaggaatttcgggaagtagctagtcaactaggatatgaaaaacacgtcagcctcatcgacatatccagcattccttcctatgactggatgagaagagtcacacagaggaaaaaagtatccaagaagggaaaagcctgtctgctgtttgaccatctggagcccattgaattggctgagcacctcacttttctggagcataaatcttttagaaggatctcattcactgattaccaaagctatgtcatccatggctgcctggagaataatccaaccttggaaagatcgattgctttatttaatggaatctctaagtgggtccagttgatggttcttagcaaaccaaccccccagcaaagggcagaagtcatcacaaagtttatcaatgttgcaaagaagctccttcagctcaaaaattttaacaaccttattgcaattgtgggagccctcaagtcataggtccatttcaggcttcaaagggacccattcctcatctttcctcagaagtttacaaagaactggaatgtgaaatgacagaagtgggtctcctccaacgggcaattactgcaattaccgcaagccctttgccgactgcgatggcttcaaaatccccatccttggagtacacttgaaagacttgatagctgtccatgtcattttcccagactggacagaggagaacaaagtgaacatttgtgaaaatgcaccagctctccgttaccctgagtgaactagtctccctgcagaatgcctctcaccacttagaacccaacatggatttgatcaacctgctcacgctttccctggacctctatcacactgaagatgatatttacaaactgtcactggtgctggagcctagaaattctaaatcgcagcctacctcccctacgacgcccaacaagcctgtggtacccctggagtgggcattaggggtgatgccaaagccagaccccacggtcatcaacaagcacataaggaaattagtggagtctgtatttagaaactatgatcacgaccatgatgggtacatttcccaagaggactttgaaagtatagctgccaattttcccttcttggattccttctgtgttctggacaaagatcaggatggcctaattagtaaagatgaaatgatggcttacttcctgagagctaaatcccaactacactgtcaaatcgcgcaccaggatttatccacaattttcaggagatgactctatctcaagccagaccttctgcgaacactgtgcgggatttattctgtggcataatcaagcaaggatacaaatgcaaagactgtggagccaattgtcacaaacagtgcaaagacctcctggttctggcctgcaggagaatttgcccgggcgccctccttgagcagtggtcatgggtcactgcctggaagcccctcgctgcccccagcgcagggattaggtgtttaagttccctggagtcactgctgacaacagcgattttagacagcagagccatcacactggttacaggctcttctcgcaagaacttctgtgaggctacagagggccaccaccagccaggccaccccagactggaacctgtctggtcagaggctggctgggggggactcggggtcccacacccttccctataatagatattcaggttccttgcacaagccaccaaaaggcacaagggctttgcaatatgggaaaaatgaaaaagcccagggtggcatggctggtggggatgtttaaaacccgggcaccggagtttgaaccttgccccggatgaaggagagaagaccacacacggatgggtgaggatgggctgacttcaaggctggcggaaaacttgaaggccaataatggttggcttttgggagggggcaagaacaagaaactcttgaggaaagctcttgcctctcaggaagttatcttggaaagaaccccctgatgttaacttgccttggggacactgtgggatctccatgtttggactatgggacagagaattgaccctaactaaactatgaattattatgtgcctcctcccctacccctagttaagtgccacaaagactgtgttatgtagtcagtacttttttctcatggatctttctctagaccatttatatacgggctgaaatgaaagcctttttgcatgtacttgatactcagtctgtaaactcagacttcgctttttttgtgagactatcctttcaatatttttataaacttttgtgtgtgctgtggcagggggacagttaacaagggagtttatttagaggggtttttttcattttttgtttttcttgttttgttttgttttgttttgttcttcttggtgtgctttttggatgggaccagaacttaacattttcctgaggactaggaagctcatcagacactggaatgcagtgattcttctaatgatggtcaactgcaaggagaaactgtttacatccttcccactacacagttgctatgatatgtaacaaagtcaccacaatttttgtatatatcacacaagtcttacccaattctgcgtcactagggaagctatagcatggtcgagaaagctctcctaatacttacttacttaaatagccatggaagaaaattatgcttgtcccttctgactgggttaagccatctttcttaaagattcctgaagtagaaatagcaattaagaaattaattcaagttttgacggttaacaaacatttagcagaaaaacaaaccattgaataagctactaggtgaaatgcaaaacaaccatcaatttttttaaactcaataattttgtgaaaaaaaaaaccaccaccaaacttttggttgtaaaagagaacccttgttcccttcctaagaaactgccttccacaattaaagaatactcatagaaagaaaataatcataaatcatatttgattaacatttcatttaagcttttaaaatatcaattttttaaatagctcccatttacccaaaataactagttatgggtctatttcttccatgattagaggagagagaacttgattcaagatactgaaaaatagagctgggactgagcctgtgaatgacaggaatgatctattaccaggtgactagtcggaaactacacagaccgtgcactggtctgcatttgggggctaaagtgtatatattccatttaaaatggaatttgtttgtatttggggcagtcttcagtaaagcctttctcctttcttttctccattgaggaccagttctgctcagccaaaattgttgagtccctgttctgggccaggtcccacgctatatgcaccaaagttaggaaaaacttgggtcttaagcccttggggagcttgaccagcccatgggcattaaggcaaagtagttcccagtgatttaaaatacgggttccaaatacgctaaaaccaaacttgtgccaacccagatttacagattgggaaatactgcagatgatgtgaagttatcagttgaaggagctgtgatttaggctggataataagagaacgtgcccatctgtaaagcacctcagaaggcagccatcccctagatgttggtttcgatgtatattacactatctactactatccataaatgcaataatatgcatgttaacaacattaaaaacagcaaacagcaatctaagtacagaaaagctttttgtgtgtttaaaaaaattgaagaaaattcaggaagaaacgtgttaataaacattgtactgttcttttgcttctcaaaggaattattcacttgccactttggttatttttgagttttcgtacataggaagttttatattgccagccttcctgtgataaagatattaaatgtaacttgagtaaaaaataaaaaagaataactatgta

SEQ ID NO: 134454 - DNA, 420 bp, Homo sapiens
atgggcaaagacttcatgactaaaacaccaaaagcaattgcaacaaaagccaaaattaacaaatgggatctaattaacctaaggagcttctgcacagcaaaagaaattagcattggaatgaacaggcaacctgcagaaggggagaaaatttttgcaatctacccatctgacaaaggacaagaattccggcaaaggcgccactggccacagaggtttccaggaagaaaattgacaccccaaagatctcgtaacagtaccccacaattatgtacgatctcaggagatgtgtatgagttcaagttgacaaggggtggacttgagatggttaatactgagtgtgaacttgatcggattgaaggatgcaaagtattgattctgggtgtgtctgtgagggtgttgccaaaggagattaacatttga

SEQ ID NO: 134455 - DNA, 906 bp, Homo sapiens; identical to SEQ ID NO: 126974

SEQ ID NO: 134456 - DNA, 3835 bp, Homo sapiens
gagcccaggagctggcggagggcgttcgtcctgggactgcacttgctcccgtcgggtcgcccggcttcaccggacccgcaggctcccggggcagggccggggccagagctcgcgtgtcggcgggacatgcgctgcgtcgcctctaacctcgggctgtgctctttttccaggtggcccgccggtttctgagccttctgccctgcggggacacggtctgcaccctgcccgcggccacggaccatgaccatgaccctccacaccaaagcatccgggatggccctactgcatcagatccaagggaacgagctggagcccctgaaccgtccgcagctcaagatccccctggagcggcccctgggcgaggtgtacctggacagcagcaagcccgccgtgtacaactaccccgagggcgccgcctacgagttcaacgccgcggccgccgccaacgcgcaggtctacggtcagaccggcctcccctacggccccgggtctgaggctgcggcgttcggctccaacggcctggggggtttccccccactcaacagcgtgtctccgagcccgctgatgctactgcacccgccgccgcagctgtcgcctttcctgcagccccacggccagcaggtgccctactacctggagaacgagcccagcggctacacggtgcgcgaggccggcccgccggcattctacaggccaaattcagataatcgacgccagggtggcagagaaagattggccagtaccaatgacaagggaagtatggctatggaatctgccaaggagactcgctactgtgcagtgtgcaatgactatgcttcaggctaccattatggagtctggtcctgtgagggctgcaaggccttcttcaagagaagtattcaagaacttccaacactatgttgaataggatggtactggtaccaaaacagagatatagaccaatggaacagaacagagccctcagaaataataccacacatctacaaccatctgatctttgacaaacgtgacaaaaacaagaaatggggaaaggattccctatttaataaatagtgctgggaaaactggctagccatatgtagaaagctgaaactggatcacttccttacaccttatacaaaaattaattcaagatggattaaagacttaaatgttagaactaaaaccataaaaaccctagaagaaaacctaggcaataccattcaggacataggcatgggcaaggacttcatgtctaaaacaccaaaagcaatggcaacaaaagccaaaattgacaaatgggatctaattaaactaaagagcttctgttctttgctggggtatctgaagactgaaaacacagcaaaagaaactaccatcagactgaacaggcaacctacagaatgggagaaaatttttgcaatctactcatctgacaaagggctaatatccagaatctacaaagaactcaaacaaatttacaagaaaaaaggaaccccatcaacaagtgggtgaaggatatgaacagacacttctcaaaagaagacatttatgcagccaacagacacatgaaaaaatgctcatcatcattggccatcagagaaatgcaaatcaaaaccacaatgagataccatctcacaccagttagaatggtgatcattagaaagtcaggaaacgacaggtgctggagaggatgtggagaaataggaacacttttacactgttggtgggactgtaaactggttcaaccattgtggaagacagtgtggcgattcctcagggatctacaactagaaataccatttgacccagccatcccattactgggtatatacccaaaggattataaatcatgctgctataaagacacatgcacacgtatgtttattgcggcactattcacaatagcaaagacttggaaccaacctaaatatccaacaacaataggctagattaagaaaatgtggcacatatacaccatggaatactatgcagccataaaaaaggatgagttcatatacttgtagggacatggatgaagctggaaaccatcattctcagcaaactaacacaggaacagaaaaccaaacaccacatgttctcattcataactgggagtcgaacaatgagaacacatggatgcagggaggggaacatcacacactggggtctgttgagggattctgtaaacatggtgactcaagcacactgagtatacaggagccactgcgtaacattgaatgtgtttcccaaacatggaaggggaaagaaagagaagaagaggcagccacacctaatggaaatgaaccagatggttatcaaaagcatacagcactttcaagaggcagaaaaagagaaaatacagaagaggatcagtgggagggaagatgggtgctaaagctgagcaagggaactgcttgttacaatggcttaaacccattttggccgctgcaagatggagtggcactaatgagagccagtttagcagggaaatatgatccattacaagattcacagtgtcctgctggtgacataaaacaaaaacaggtgctcaagagcacagcttttattgatactgagaccagaggaaaagttctcctaagaggatcatctcctggtatgatgtgcaagtctgtgggtgcgatggttaatactaagtgtcaacttgattggactgaaggacgcaaagtattgttcctgggtgtgtctgtgagggtgttgccaaaggagattaacattttgagtcagtggactgggagaggcagaccaacccttaatcagctgccagcactatctaatcagctgccagggtggctaggataaaagcaggaggaggaaagtggaaggactagactggcttagtcttctggcctccatctttctcctgtactggatgtttcctgcccttgaacatcagattccagggtcttcagcttttggactcttggacttacaccagttggtttgccaggggcttttgggcctttggccacagactgaaggctgcactgtcagcttccctacttttgaggttttgggactcagactggctctccttgctcctcaagcttgcagacagcctattgtgggaccttgtgatcgtgacacattttctagcaaaggatgtgtgtcagcgagaagggtatgtgactgtaacatccgtgtatcctaccataaaccacctcacccagaagcagcagatctgatagaatgtttgaacagactattaaaacattcgaataagatgtccgtccagagacaaaaccctctaggttggagagctctctcggatgcaccgaaccaaccactgatacacggtgctgcatctaccatcgctaaaatacacagtgtgatggttaatattgagtgtcaacttgattggattgaaggatgcaaagtattgttcctgcgtgtgtctgggcagggaggagcatgcctggaactcaggaaattcactgaggtgtctcttggtgtttccattgctaatgataatggtgaaccagaaattgcagcaatcatggcctcacaagggcatgatctctgtaaaagacatgtgagaaatacaggcaagagagaaagactagaggtagtgacccagggcagagctggtgatggcctgtactgtggtggccgtgaaatgaatgcagatcggtgtcgctctgggagtgaacagaaacagatggggcctttatgcaaagcacagatagcacagcgtgggggccctgagcaacggagggattcaggttaccacagcatccccatcctacactcaagcacaagaggagagaaaaagggagcctgcggaggcagagaaggaccagcccgcagcatcaccattgctcagggccctgactga

SEQ ID NO: 134457 - DNA, 908 bp, Homo sapiens
ccgcgtcccagccatggcgacatcctcgttcgcgctgccccgaatactcggcgcgggtgcccgggccccgtcgcgctggttgggctttctcgggaaggcgaccccccggcctgctcggccgagccgcaggacgcttggaagcgcgacggcccttatgatccgcgagtcggaggacagcaccgatttcaacgacaagattttgaatgagcccctcaagcactctgacttcttcaatgtcaaggaactgttttccgtgagaagcctcttcgatgcccgagtccatctgggacacaaagctggctgtcggcacaggtttatggagccgtacatctttgggagccgcctgggaccacgacatcatcgacctgggaacagacagccacgcacctccagctggccttgaacttcaccgcccacatggcctaccgtaagggcatcatcttgtttataagccgcaaccggcagttctcgtacctgattgagaacatggcccgtgactgtggcgaagtacgcccacactcgctacttcatgggcggcatgctgaccaacgcgcgcctactctatggccccacggtccgcctgccggaccttcatcatcttcctgcacacgctcaacaacatctttgagccacacgtggccgtgagagacgcagccaagatgaacatccccacagtgggcatcgtggacaccaactgcaacccctgcctcatcacctaccctgtacccggcaatgacgactctccgctggctgtgcacctctactgcaggctcttccagacggccatcacccgggccaaggagaagcggcagcaggttgaggctctctatcgcctgcagggccagaaggagcccggggaccaggggccagcccaccctcctggggctgacatgagccattccctgtga

SEQ ID NO: 134458 - DNA, 1569 bp, Homo sapiens
atggcgacggaaggggaggccgctcggcctggcctggagggagacctcgctctgccccgcgtcccagccatggcgacatcctcggccgcgctgccccgaatactcggcgcgggtgcccgggccccgtcgcgctggttgggctttctcgggaaggcgacccccccggcctgctcggccgagccgcaggacgcttggaagcgcgacggcccttatgatccgcgagtcggaggacagcaccggtctttcctggggctgctgggctcccggctccccacctcggtgtcacagaaggcacttgggagcagggatttcaacgacaagattttgaatgagcccctcaagcactctgacttcttcaatgtcaaggaactgttttccgtgagaagcctcttcgatgcccgagtccatctgggacacaaagctggctgtcggcacaggtatgaaccctttgctgccccagtggagaggtcacacggttaccaggagggatgggcctgggcccagggagccatcagcatcgggggctggcaggtgtttccagagcatcggaaaaggaggtccaaggtggagccctgggtgctccagtgtttggagtcagtgaagagggacagccgggggtttatggagccgtacatctttgggagccgcctggaccacgacatcatcgacctggaacagacagccacgcacctccagctggccttgaacttcaccgcccacatggcctaccgcaagggcatcatcttgtttataagccgcaaccggcagttctcgtacctgattgagaacatggcccgtgactgtggcgagtacgcccacactcgctacttcaggggcggcatgctgaccaacgcgcgcctcctctttggccccacggtccgcctgccggacctcatcatcttcctgcacacgctcaacaacatctttgagccacacgtggccgtgaggagacgcagccaagatgaacatccccacagtgggcatcgtggacaccaactgcaacccctgcctcatcacctaccctgtacccggcaatgacggactctccgctggctgtgcacctctactgcaggctcttccagacggccatcacccgggccaaggagaagcggcacatggtttgaggctctcctaatcgcctgcagggccagaaggagcccggggaccagtgggccaggccaccctcctggggctgacatgagccattccctgagatgttcactctcctaccaaagcaaaccacagccaagcctgtctggagctgggagtcccctttccccagccctggggtcagcgggcatcctcagtcgttggttacttaattcaggtggatgtcacagtgcagacatccaccgttccaccacagaaccagtgggctgagcggaccaacgttgccatgtgcgattgctctgtggggaacaagagcacaagaagggtgaacgacatgtgcaagaacggccccttggcttgcaattaaggacctcagtggctggtatgggccgaggttgttagaaggttgttgctgttccctgttgattccaagcaagccctccctttcaccgtgacccc

SEQ ID NO: 134459 - DNA, 688 bp, Homo sapiens
ggagcgataccatttcacacgggaacagctttgacatgttccgaattaatccgactcctctaggaatcttggccttcgagcccaagattcggcacgagcgcggtcgtgaagggctgaggattttttggttccgcaacgctcctgcttcctgagctcacccgctgcttcgctcatcgcccgaggaaacaagtcggtccaggaagccccgctgcgcaacaaccaatggctttctaaggataccggaaaaaacaactccgtggagcccggaggtcgcaattcaccgaaatcgcaatcacccctaacaagccgccaacggtaaaatccttggaaaaagttttttgctgacttgataaggaggcgcaaaaagaaaaggaatctcaaaagtgaaagggaccagttcgaatgcctaccaagacttttgagaatcactacaaagaaaaactcctttgtggtgaaaggttctaaagaccgttgggatcgttttccagattgagatttcacaaagccgactccattgactttgcacaagtcctttctgagatttgtttaagcagattactttccatcagtatttgagcccaggagtttgaggtgagaagtcaccatttgcagatgctttaagtcaaatatctatacatacaattgatgaccagtttgttaaaaaaaaaaaaaaaaaaaaaaaatggtt

SEQ ID NO: 134460 - DNA, 683 bp, Homo sapiens
  misc_feature (1)...(683): n = a,t,c or g
cgaacgcggaagagcacgccactgaaggcctcggggcacgctacgagagtacaaggtagtgggtcgctgccctgcccattcccataaatgccacacgccgccccttttaccggcatgcgaaactttgcgccctaatcaatgtcgtcgccaagtccccgctttctggtactttgtatctcagttaaagaaagatgaagaaagtcttccaggggagattgtctactgtgggcaaggtgtttgagaaagctccccctgcgggtcgaagaacttcgggatctggctgcgctactgactcccggagcgggcacccacaacattgtaccgggaataaccgggaccctgaccaaccgcaggcggctgttcacccagttgctacccgagacatggggttgcccggcacgncggccccgaagcccacttccatttcagattcattgaaaggttggaggaaattcgccggccagcaaaattgccgccggccgggttgttcaaagcagtttccacgaatttcaagattcaagtttcccgcttgccccaccgggttccttgcgccgtcaagacaagccacgctttcacgaccaagaggcccaacaccttcttctaggtgcagtggccctcgctccggggtgtgcccccaaaataaaactcaggaaacgcccccggtaaaaaaaaaaaaaaaaaaa

SEQ ID NO: 134461 - DNA, 418 bp, Homo sapiens
tttcgtgtagctcccgacctgctgtccgcaaataaccccatgctgggaaaggcaaaggcgccttggtctctgtggaccctggccaggccccaggctccagactgtgccctgtccacggtgcctcctgcatgtcctgctgccctgagctgtcccgagctaggtgacagcgtaccacgctgccaccatgaatgaggtgtctgtcatcaaagaaggctggctccacaagcgtggtgaatacatcaagacctggaggccacggtacttcctgctgaagagcgacggctccttcattgggtacaaggagaggcccgaggcccctgatcagactctaccccccttaaacaacttctccgtagcagaatgccagctgatgaagaccgagaggccgcgacccaacacctttgtcatacgctgcctg

SEQ ID NO: 134462 - DNA, 2583 bp, Homo sapiens
atggggtttcaccatgttggccaggctggtcttgaactcctgacctcaggtgaatacatcaagacctggaggccacggtacttcctgctgaagagcgacggctccttcattgggtacaaggagaggcccgaggcccctgatcagactctaccccccttaaacaacttctccgtagcagggcttagttcagagaagctgcttcctctgggaagccccccaaccccccaggctgggttggatgctacctctgagcttctgcacacctctaggcttgtccccatcgcggccctgtctatggagccatcactctctgaatgccagctgatgaagaccgagaggccgcgacccaacacctttgtcatacgctgcctgcagtggaccacagtcatcgagaggaccttccacgtggattctccagacgagagggaggagtggatgcgggccatccagatggtcgccaacagcctcaagcagcgggccccaggcgaggaccccatggactacaagtgtggctcccccagtgactcctccacgactgaggagatggaagtggcggtcagcaaggcacgggctaaagtgaccatgaatgacttcgactatctcaaactccttggcaagggaacctttggcaaagtcatcctggtgcgggagaaggccactggccgctactacgccatgaagatcctgcggaaggaagtcatcattgccaaggcgctgaagtatgccttccagacccacgaccgcctgtgctttgtgatggagtatgccaacgggggtgagctgttcttccacctgtcccgggagcgtgtcttcacagaggagcgggcccggttttatggtgcagagattgtctcggctcttgagtacttgcactcgcgggacgtggtataccgcgacatcaagctggaaaacctcatgctggacaaagatggccacatcaagatcactgactttggcctctgcaaagagggcatcagtgacggggccaccatgaaaaccttctgtgggaccccggagtacctggcgcctgaggtgctggaggacaatgactatggccgggccgtggactggtgggggctgggtgtggtcatgtacgagatgatgtgcggccgcctgcccttctacaaccaggaccacgagcgcctcttcgagctcatcctcatggaagagatccgcttcccgcgcacgctcagccccgaggccaagtccctgcttgctgggctgcttaagaaggaccccaagcagaggcttggtggggggcccagcgatgccaaggaggtcatggagcacaggttcttcctcagcatcaactggcaggacgtggtccagaagaagctcctgccacccttcaaacctcaggtcacgtccgaggtcgacacaaggtacttcgatgatgaatttaccgcccagtccatcacaatcacaccccctgaccgctatgacagcctgggcttactggagctggaccagcggacccacttcccccagttctcctactcggccagcatccgcgaggccccacgttctgcagccttaaggttgaacatgagtgcacgtccatgtcagtgctgtgggactcctgtgcgtgcctcggactgcgtgtgtcggcgggacgcaggcacacgtggctgcaagggtcggtgcttggcctcgcccgcaacaccctcctggaggatgctgagtctcgctgcctccctcgacgcagagccttcaagcgccgcagtccccgacggcttccccgcgggccccactgtctccccaagacgcctggcgaggccgccggggctggaggaggcgctgagcgcgctggggctgcagggagaacgcgagtacgccggggacatcttcgccgaagtcatggtgtgccgcgtgctgcccctgagagccctgccccgcgctgtgaccccggagatgcgcgccctggtggtagactggctggtccaggtgcacgagtacctgggtctggctggtgacacactttatctggcggttcacctgcttgattcctacctgagcgctggccgcgtgcgtctacatcgcctgcagctgctgggcgtggcttgcctgtttgtggcgtgcaaaatggaagagtgcgtgcttcccgagcccgccttcctctgcctcctgagcgcggactccttctcacgggcggagctgctgcgcgccgagcgtcgcatcctgagccgcctggatttccggctgcaccaccccggcccgctgctgtgcctcgggctgctggccgcgctggcagggagcagcccccaggtgatgttacttgccacctacttcctggagctgtctttgctggaggccgaggcggcgggatgggagccgggtcgtcgtgcggctgcggctctgagcctggcgcaccgcttgctcgacggggcgggctccaggctccagccagaactttacagccccgaggaactgggcaccctcgagccgtgcatggcccgcgctgcgctccgaggtcccgcgccgggtcgcgccgcagtcttcctcaagtatgcgcggccccagcgccaggggaccagccttgccgccgcctgcctgctccgccgcctccagtctgagcctccctga

SEQ ID NO: 134463 - DNA, 264 bp, Homo sapiens
gtgaatacatcaagacctggaggccacggtacttcctgctgaagagcgacggctccttcattgggtacaaggagaggcccgaggcccctgatcagactctaccccccttaaacaacttctccgtagcagggcttagttcagagaagctgcttcctctgggaagccccccaaccccccaggctgggttggatgctacctctgagcttctgcacacctctaggcttgtccccatcgcggccctgtctatggagccatcactctctg

SEQ ID NO: 134464 - DNA, 687 bp, Homo sapiens
atgcactcgcactcctcagcccttgggtggtcgatgggactaggcaccgtggagcagggggcggcgctcatccgggaggctcgggccgcacaggagcccaccgagggggtgggaggctcaggcatggcgggctgcaggtcccgagccctgccccgcgggaaggcagctaaggcccggcgagaaatcgagcacagcgccgggcagttgacagaacacaatgagaatgttccagcaaagaagtgtatacctaaaggctggtcccaccgcccccgcttggccactcccactcatctcctgaatgaggggctctatggccgcggtccccccgccgggcacgggtggtacagcccatcgctgcaccgcggggggcccgtacgcgaccatcgtggggggggcgttcggggacacgcgctgtgcgcactcacctgtcaccggcagccgcccagcctctccggcggggctctacccccgcccatggccacgctgcgctggttccctttccttgtgtttcccggcagcggcaacggcgccggcagcggcagcggcggcggcgacgcctcctccgaggcaggcccaacggctagcacggcgcggccccccccgccccctccccccagcccccgcttaccgccccctcccaccctctggacggaaataccgccctctcgcgccacaaacaggaagtga

SEQ ID NO: 134465 - DNA, 513 bp, Homo sapiens
ggaccgcctgcccttctacaaccaggaccacgagcgcctcttcgagctcatcctcatggaagagatccgcttcccgcgcacgctcagccccgaggccaagtccctgcttgctgggctgcttaagaaggaccccaagcagaggcttggtggggggcccagcgatgccaaggaggtcatggagcacaggttcttcctcagcagccttaaggttgaacatgagtgcacgtccatgtcagtgctgtgggactcctgtgcgtgcctcggactgcgtgtgtcggcgggacgcaggcacacgtgggctgtgtgtgcatgtgtgttctgtgtgagggcagcgtgtcctccagtgtgcatggtgtgtgggcttgggccccatccctggcccgagcatttcatccctgtgggggaggggtgctgacctagtgggaggagccccactgtgatccatgagctgccctgcccacgcctcccctccctgtagcaaccctctgggtgtttggagtttagcttttgtgg

SEQ ID NO: 134466 - DNA, 1230 bp, Homo sapiens
atggctcgcgccaccggcacagctttccaggaggagccagcgtgggagaaagaatctggcgggcaaaagcggcctcttaccacgcttgtggagccagccttctttgatgacagacacctcattcatggtggcagcgtggtacgctgtcacctagctcgggacagctcagggcagcaggacatgcaggaggcaccgtggacagggcacagtctgcaagacaagagaggagctgatgacagagaaaagacaggtctcagacaatccgggatcttgaacaagaaagcaacctactgcgtatgcacggtctggggcctagaagccagtcctgggggcttgaccgaggccctgatccctaccccaagaccttcacttctgtcctcagggaccagcaaccaacagactgagggacgccgaggccactgcttcgtctcaggttcccagaacggaggggaggagggcgcgaggcagcgccagctgggcccctacctggagcctggggcctggccagggtccacagagaccaaggcgcctttgcctttcccagcctggggttatttgcggacagcaggtcgggagctacggtggcgcccagagaagtggcagctggctctagggacaccatgggcatcagctttctctcgtgccccaggggagctggtgggccggacacgctactgcctggcatgtgacagtggcaggctgcccaggtcccggcagaaagaagggagaacctttgtggctccctggtgttcccagcaaaaaagccaaactcctcagctgaggatccaaggcccttcaggacctcgcctctgctgccctgcgttccagcggcccagggacatcgcctctcagggcccttgtaatgcagcagcactaaagtacccactgtgggcccagggctcggcctactgcctagcgcccagtgaacagccaaacacatggctgccattattccagagagaagcaaaggcagccagggctcgggacctgcggcccgccgtgcctgagcctcccaccccctcggtgggctcctgtgcggcccgagcctcccggatgagcgccgccccctgctccacggtgcctagtcccatcgaccacccaagggctgaggagtgcgagtgcatggcgcgggactggcaggcagctccacctgcagccccagtgcgggatccactgggtgaagccagttgggctcctgaggctggtggggatgtgaacctttatgtctag

SEQ ID NO: 134467 - DNA, 2073 bp, Homo sapiens
cgctcagcttggcacgaggtagccgttgggcctgcctcggaggaggcgtcgccgccgccgctgccgttgccggcgccgttgccgctgccgggaaacacaaggaaagggaaccagcgcagcgtggcgatgggcgggggtagagccccgccggagaggctgggcggctgccggtgacagactgtgccctgtccacggtgcctcctgcatgtcctgctgccctgagctgtcccgagctaggtgacagcgtaccacgctgccaccatgaatgaggtgtctgtcatcaaagaaggctggctccacaagcgtggtgaatacatcaagacctggaggccacggtacttcctgctgaagagcgacggctccttcattgggtacaaggagaggcccgaggcccctgatcagactctaccccccttaaacaacttctccgtagcagaatgccagctgattgaagaccgagaggccgcgacccaaacacctttgtcataccctgccctcaattgaccaacatcatacgagggacccttcaaccttggtttctccaaaccaaagggaaggagtggaatccgccctatcaagttgttccccaacaaccctcaagaggcgggcccaaggcgaggaccccttggaacaacaagtgtggctcccccaagtaactctcccacgactgagagaatggaagtggcggttcagcaagccacgggctaaagttaccatgaatgactcgacttatctcaacctcttgggcaagggaacctttggcaaagtcaatcttgttccggaagaaggccactggccggtaattcgcccatgaaggatcttccgaaagaaagtcatcaatgccaaggattaagtcgctcacaacattcaaccgagagccggggtccttccagaacacccaggcaacccgttccttcaactgcgctgaaagtatgccttcccagaccccacgacccgccctgtgcctttgtgaatggagtatgcccaacgggggtgagctgttcttcccacctgtccccgggagcgtgtcgttcacagaggagcgggccccgtttttatggtgcagagattgtttcggcttctgaggttacttggcactcgcggggacgtggtaatacccgcgacaatcaaagctggaaaaccctcatgctggaacaaaagatggcccacatcaaagatcactgactttggccttctgcaaaagaggggcatcaagtgacggggccaccattgaaaaccttctgtgagaccccgagagtacctggcgcatgagatgactggaggacaatgactatggccgggccgtggactggtgggggctgggtgtggtcatgtacgagatgatgtgcggccgcctgcccttctacaaccaggaccacgagcgcctcttcgagctcatcctcatggaagagatccgcttcccgcgcacgctcagccccgaggccaagtccctgcttgctgggctgctataagaaggaccccaagcagaggcttggtgcgggggcccagcgatgccaaggaggtcatggagcacaggttcttcctcagcatcaactggcaggacgtggtccagaagaagctcctgccacccttcaaacctcaggtcacgtccgaggtcgacacaaggtacttcgatgatgaatttaccgcccagtccatcacaatcacaccccctgaccgctatgacagcctgggcttactggaggctggaccagcggacccagcttccccgcagttctcatactcggccagcatccgcgagtgagcagtctgcccacgcagaggacgcacgctcgctgccatcaccgctgggtggttttttccccctaactttttacttagcctttttggtttgtgtccccacccccacctcctcaccccctttccagttcttcttcaggcccctcccagacgcaccccagcggcccctgcagcccctgcctccagcctccagcctcacctttgtgcccagactcgcatttggaagactccacctcccgcccaggcctgggctgttgggctggtggagattcagggtttaatccacacaagccccagtgaggggtgaagcat

SEQ ID NO: 134468 - DNA, 868 bp, Homo sapiens
tcgggattttaactcgggccggctggctccggaatgcaccgtcttaaccatttttaggttctgctgcctcaaagacgtaagaatagcacactctccttgttgtaaggaagggcttggttggttttggagtccaggttctaactcgccctgtgaccttgggcaaggcattttccctctctggccgacgttaacttagctgtagaatgaggatgttggtgctggggcagaacccaacacttgactctattgataggtctggggtgaggtccaagtgccgcatttttaacaaactcagagaatcttttcactataactcagctgaactcaccatctccgtcaacatgtcctacaactgctgctctggaaacttctcctcccgctcctgtggtgactacctgcgctacccagcatcctcacgtggcttttcctaccccagcaatctggtctacagcactgacctctgctctcccagcacctgccagctgggttcctctctctataggggctgtcaggagatctgctgggagcccaccagctgccagacgtcctatgtggaagtccaagcccctgccaagacctcctgctaccgccccaagaacctcccttgctctgcaagtccttgcaagacgacttactcttgggtctctaggctttggatccagcagctgccgctccctgggctatggatcgaggaagctgctactcagtgggctgtgggtccagtggcttcagatccctgggttatggaggctgtggcttcccttccctgggctatggcgttggattctgccgcccaacctacttggcttctaggagctgccagtcttcttgctacagaccaacttgtggatcaggcttctactattga

SEQ ID NO: 134469 - DNA, 1497 bp, Homo sapiens
aactccagctccttacaaagaaaaccttctgatggttaggaatggcccatgagctcctgtttcctggaggcgtgtgtcaggcaggggctgcacgccagcccagcccccagtgctgagagggaattcctgcactgaatgcccagacatgttctgcctttttcatgggaagagatactcccccggcgagagctggcacccctacttggagccacaaggcctgatgtactgcctgcgctgtacctgctcagagggcgcccatgtgagttgttaccgcctccactgtccgcctgtccactgtccccagcctgtgacggagccacagcaatgctgtcccaagtgtgtggaacctcacactccctctggactccgggccccaccaaagtcctgccagcacaacgggaccatgtaccaacacggagagatcttcagtgcccatgagctgttcccctcccgcctgcccaacccagtgtgtcctctgcagctgcacagagggccagatctactgcggcctcacaacctgccccgaaccaggctgcccagcacccctcccgctgccagactcctgctgccaagcctgcaaagatgaggcaagtgagcaatcggatgaagaggacagtgtgcagccgctccatgtggtgagacatcctcaggatccatgttccagtgatgctgggagaaaaagaggcccgggcaccccagcccccactggcctcagcgcccctctgagcttcatccctcgccacttcagacccaagggagcaggcagcacaactgtcaagatcgtcctgaaggagaaacataagaaagcctgtgtgcatggcgggaagacgtactcccacggggaggtgtggcacccggccttccgtgccttcggccccttgccctgcatcctatgcacctgtgaggatggccgccaggactgccagcgtgtgacctgtcccaccgagtaccccctgcccgtcacccccgagaaaagtggcctgggaagtgctgcaagatttgcccagaggacaaagcagaccctggccacagtgagatcagttctaccaggtgtcccaaggcaccgggccgggtcctcgtccacacatcggtatccccaagcccagacaacctgcgtcgctttgccctggaacacgaggcctcggacttggtggagatctacctctggaagctggtaaaagatgaggaaacttgaggctcaggagaggtgaagtacctggcccaaggccacacagccagaatcttccacttgactcagatcaagaaagtcaggaagcaagacttcccagaaagaggcacagcacttccgactgctcgctggcccccacgaaggtcactggaacgtcttcctagcccagaccctggagctgaaggtcacggccagtccagacaaagtgaccaagacataacaaagacctaacagttgcagatatgagctgtataattgttgttattatatattaataaataagaagttgcattaccctcaaaaaaaaa

SEQ ID NO: 134470 - DNA, 1055 bp, Homo sapiens
ctgggcggacagctgaaaatccggcgcgcgcagtctccagccccaatttctacgcgcaccggaagacggaggtcctctttccttgcctaacgcagccatggctcgtggtcccaagaagcatctgaagcgggtggcagctcactaagcattggatgctggataaattgaccggtgtgtttgctcctcgtccatccaccggtccccacaagttagagagagtgtctccccctcatcatttttcctgaaggaccagactttaagtaatgccctgacaggagactgaagtaaagaagattttgcatgcagcggttcattaaaatccgatggcaaggtccgaactgatataacctacccctgctggattcatggatgtcatcaagcattgacaagaccgggagagaatttcccgtcttgatctaattgacacccaaggggtccgcttttgcctgtaacatcgtatttacaccttgagggagggccaaagtacaagtttgtgcaaagtgagaaagattcttttgtgggcaccaaaaggaatcccttcatctgggtgactcatgaatgcccgcaaccatccggtaaccccgatccccctcatccaaggtgaaatgaatacccattccagattgatttaaaagactggcaaagattacttgatttccatcaaagttcgaccacttggtaacctgtgtaatggtgacctggaggtgcctaacctaggaagaaattgggtgttgatcacccaacagagacgaagcaccctgggatctttttgaccgttggttcacgtgaaaagatgccaatggcaacaagcttttggccacttcggacttttccaacattttttggttattggcaagggcaacaaaccatgggatttctctttccccgaggaaagggtattccgcctcaccatttgcttgaagagagagacaaaagactggcggccaaacagagcagttgggtgaaatggggtccctgggtgacatggtcagatcttttggtaccgtaattaaaaaatattggtggcagattaatagcaaaaaaaaaaaaaaaaa

SEQ ID NO: 134471 - DNA, 1380 bp, Homo sapiens
atgcgtaatgtgtgtattgccgttgctgtctttgccgcacttgcggtgacagtcactccggcccgtgcggaaggtggacatggtacgtttacggtgggctattttcaagtgaaaccgggtacattgccgtcgttgtcgggcggggataccggtgtgagtcatctgaaagggattaacgtgaagtaccgttatgagctgacggacagtgtgggggtgatggcttccctggggttcgccgcgtcgaaaaagagcagcacagtgatgaccggggaggatacgtttcactatgagagcctgcgtggacgttatgtgagcgtgatggccggaccggttttacaaatcagtaagcaggtcagtgcgtacgccatggccggagtggctcacagtcggtggtccggcagtacaatggattaccgtaagacggaaatcactcccgggtatatgaaagagacgaccactgccagggacgaaagtgcaatgcggcatacctcagtggcgtggagtgcaggtatacagattaatccggcagcgtccgtcgttgttgatattgcttatgaaggctccggcagtggcgactggcgtactgacggattcatcgttgggatttcaggagtcctgaaagacggcacaggaaaaccggtacagaactgcaccattcagctgaaagccagacgtaacagcaccacggtggtggtgaacacggtgggctcagagaatccggatgaagccgggcgttacagcatggatgtggagtacggtcagtacagtgtcatcctgcaggttgacggttttccaccatcgcacgccgggaccatcaccgtgtatgaagattcacaaccggggacgctgaatgattttctctgtgccatgacggaggatgatgcccggccggaggtgctgcgtcgtcttgaactgatggtggaagaggtggcgcgtaacgcgtccgtggtggcacagagtacggcagacgcgaagaaatcagccggcgatgccagtgcatcagctgctcaggtcgcggcccttgtgactgatgcaactgactcagcacgcgccgccagcacgtccgccggacaggctgcatcgtcagctcaggaagcgtcctccggcgcagaagcggcatcagcaaaggccactgaagcggaaaaaagtgccgcagccgcagagtcctcaaaaaacgcggcggccaccagtgccggtgcggcgaaaacgtcagaaacgaatgctgcagcgtcacaacaatcagccgccacgtctgcctccaccgcggccacgaaagcgtcagaggccgccacttcagcacgagatgcggtggcctcaaaagaggcagcaaaatcatcagaaacgaacgcatcatcaagtgccgattatgcagcatcatag

SEQ ID NO: 134472 - DNA, 2181 bp, Homo sapiens
atgcaaatgactaagcaaccaccaatcgcaaaagccgatctgcaaaaaactcagggaaaccgtgcaccagcagcagttaaaaatagcgacgtgattagttttattaaccagccatcaatgaaagagcaactggcagcagctcttccacgccatatgacggctgaacgtatgatccgtatcgccaccacagaaattcgtaaagttccggcgttaggaaactgtgacactatgagttttgtcagtgcgatcgtacagtgttcacagctcggacttgagccaggtagcgccctcggtcatgcatatttactgccttttggtaataaaaacgaaaagagcggtaaaaagaacgttcagctaatcattggctatcgcggcatgattgatttagagacatcgcaattaaaacaagggcaacggatacatatgccgatgcggatggtggcgttccatgaaatgccgaatctggcgcttacaatgtcacccgctctggcgacagctatattctggttaacttctataccgatgcggaatgtgccggaccctgcagatgaaggcgcattacagaaatggtggtctgttctaccagacggttatggttttgaggaagactgggcagaagtttatacctcgaaaaatcttccaccagaaagctacccagtcggcgcaccaatcccgtggccatcagataccgttccgtctggttatgccctgatgcaggggcaggcttttgacaaatctgcttacccgaaacttgcagccgcttatccgtcaggcgtgatccctgatatgcgtggctggacgattaagggcaaacctgccagtggtcgggccgtattgtctcaggaacaggacggcattaaatcgcatacccacagcgccagcgcatccagtacagatttggggacgaaaaccacatcgtcgtttgattacggcactaaatccacgaataacaccggggcacatacacacagtgtgagcggctctacaaactcggctggagcacacacacactcactagccaacgtgaacacggctagtgctaactccggtgctggtagtgcatcaacaagattgtctgttgtgcataatcaaaactatgcaacatcatctgctggcgcacatacccactcactgtccggcactgctgcaagcgcaggtgcacacgcgcatactgtcggtattggtgctcatacgcactccgttgcgattggttcacatggacacaccatcaccgttaacgctgctggtaacgcggaaaacaccgtcaaaaacatcgcatttaactatatttaccgatattgcaccgccagatattccggctggcttcgtggctgttttaacagtgatgagtcatcgtggcatctcgttgaagatcatcgggaacttataaccgacacccacgatgaaaccgtcagtgcgccagtcgccactgccggggccttcataagcaatatcaatggccacggattcggtcgggttaaactgcacgccagctccccacgccagagacgtgttgctgtggcgaccgtcatcacttccggtcagcacgtcgtgcgttttccccttgggaagaatatgaccgctgtcatcgagccgttttatcccaaggcgggcaatggccgacggccctatccgctggagaccatgctgcgtattcactgcatgcagcattggtacaacctgagcgacggtgccatggaagatgccctgtacgaaatcgcctccatgcgcctgtttgcccgattatccctggatagcgccctgccggatcgcaccaccatcatgaatttccgccacctgctcgagcagcatcaactggcccgtcaattgttcaagaccatcaatcgctggctggccgaagcaggcgtcatgatgacccaaggcactttggtggatgccaccatcattgaggcacccagctctaccaagaacaaagagcagcaacgcgatccggagatgcatcagaccaagaaaggcaatcagtggcactttggcatgaaggcccacattggtgtcgatgccaagagtggcctgacccacagcctggtcaccaccgcggccaacgagcatgacctcaatcagctgggtaatctgcttcatggagagaagcaatttgtctcagccgatgccggctaccaaggagcgccacagcgcgaggagctggccgaggtggatgcttag

SEQ ID NO: 134473 - DNA, 669 bp, Homo sapiens
ggctagtaacatcagttttattgggttggggtggcaaccatagcctggctgggggtggggctggccctcacaggttgttgagttccagcagggtctggtccaaggtctggtgaatctcgacgttctcctccttggcactggccaaggtctcttctaggtcatcgatggttttcctccaactttgccacagacctctcggcaaactctgctcgggtctcagcctccttcagcttctcctccaacagtttgatctcctcttcatatttatcttctttggtggaatacttttggggacacacacacgccatcagtacagcgctaccacagatccttcatttctccattgtaccccgtaggctcctggtcatcttgcctccgttgaacacccagcccctccctgccttgggcccctcacctccctcccctgtgggaccccatcctcactgcccctctgctcccctctaccttgtccgcctgggcctccagggatttcaagttgttggtaacaattttcagctcctcctctaggtccccacatttactgcagggggtgtgtggcggggggggcagggtgtgagggcacagcgaagccagacagtggagatggcacagcaggggacgggtggaggagagaaaagaagagcaaagttgtgagagtgacagacagca

SEQ ID NO: 134474 - DNA, 1382 bp, Homo sapiens
  misc_feature (1)...(1382): n = a,t,c or g
atggaccagaccgtcaagtccctgatggcctcagaggaggagtattccaccaaagaagagaaatatgaaaaggagatgaaactgctggaggagaaactgaaggaggctgagaccagagcagagtttgtcgaaaggtctgtggcaaagttggagaaaaccaccgatgacctagaagagacgttggccagtgccaaggaggaaacgtggagattcatcagacctgggaccagaccctactggaactcagcaacctgtttcttacttcctggtcacaaaatggctgccgaagtccataagctaaatcctaatgtgagtgaacatgatcaagaaagatggcatgatgcttttgggaacggtggtgcagataatcactcaaagctccaagcaagcaccagaagaggaggacccttgagtcaggagctgctgcaatccctggcagctagcctagcagcaggaggtctgacggcgcttagtgctgaattcactatcggcaaaggtgagttgatggctcatgatgtcctctggggatgcgctccggatgaatatgatgatctcatatcaggaacttgttcgcaccttcccaaggggaaaacgcacgacgtgctgaccggaagtgatgacggtcgccacagcaacacgtctctggcgtggggagctggcgtgcagtttaacccgaccgaatccgtggccattgatattgcttatgaaggccccggcagtggcgactggcgcactgacggtttcatcgtgggcgggcttttttgtggggtgaatatggcagtaaagatttcagagagtcctgaaagacggaacaggaaaaccggtccagaactgaacaatccagctgaaagcaaaacgtaacagcaccacggtggtggtgaacacgctggcctcagaaaatccggatgaagccgggcgttacagcatggacgttgagtacggtcagtacagcgttattctgttggtggaaggattcccgccgtcacatgccgggaccattaccgtgtatgaagattcacaaccggggacgctgaatgattttctctgtgccatgacggagggntgatgcccgtccggaggcactgggccgttttggactttattggtggaaggaggtggcgcgtaacgcgtcccgcggtgggacagaacacggcagccgcgaagaagtcagccagtgatgccagcacatcagcccgtgaggcggcaacccatgcggttgatgctgggggcttcaagaacgcgcaggccaggacgtcaagcccggacaaggccgggtcggccgggttcaagcaagggtttcccaggggagggaacgggatcaacaaaagggccacttgaaggatcaaaaaagttgnttgccgttgaggngtccncaaaaaccc

SEQ ID NO: 134475 - DNA, 1070 bp, Homo sapiens
tttttttgagaggctagtaacatcaagttttattgggttggggtggcaaccatagcctggctgggggtggggctggccctcacaggttgttgagttccagcagggtctggtccaaggtctggtgaatctcgacgttctccatccttggcactggccaaggtctcttctaggtcatcgatggttttctccaactttgccacagcacctctcggcaaactctgctcgggtctcagcctccttcagcttctcctccaacaagtttgatctcctcttcatatttatcttctttggtggaatactcctcctctgaggccatcagggacttgagggcctggtccatgggttcgaagttcctcctccagctgtctggctcggctctcgggcacctcagccctctcctccgaggggctccagctctccttccaggatcaccagcttcctggccacctcttcatatttggcggtctgaatcctcatcgatgtgctttgcctccttcagctgcatctccctgcagttccatcttctcctcatcctttcatggccacggttatcgatgaccttcgattctctctcgctctcatcaacccgcttctcggggctcctccagcttctgcaaggctgtagccaggcgctcctggggcccggtccagctccatcctcaaaccagctgaatgcggcgggtcagggaaggcaacatctgcctcagcatcaatgggctttcttctcgggcctgttcaagttcctccggggcctccttcacggattcagaatacttttccacctcatcctctgtccccttcagcttcttctggagggcctgctgctcctcctccagcttggcttgcagcggtcctcagcttgcttcttgtcggcttcggcctgctcggcgcggtcgatggcgttctccttgtccagcttcagcatctgcatcttcttcttgatggcgtccatggcctgcggtggggggtgggccggccggcaggcggtgaggaccggacggactgggctgggtgagcggactgggtgcaccggtggcaggcgaggaggacggagcgggaggagagcagca

SEQ ID NO: 134476 - DNA, 400 bp, Homo sapiens
atatttatataaatgtttagattttgtactattttttaatataaatatgtgggggcttgcttgatggaaacttgtcttgtgtctgttgagactttaagggagaaatgtcggaatttcatagtcgcctgacgacaggttatcaccacgttatatattccctaccgaaggagacacctttccccccctgacccagaacagcctttaaatcacaagcaaaataggaaagttaaccacggaggcaccgagtttcaggtagtggttttgcctttcccaaaaatgaaaataaactgttaccgaaggaatcagtttttcctcttctttttttcaactgtgaaggtccccgtggggtggagcatggtgcccttacaagccgcaacggctggtgcccggctaacaagaa

SEQ ID NO: 134477 - DNA, 426 bp, Homo sapiens
  misc_feature (1)...(426): n = a,t,c or g
cccacgcgtccggccatctggagcaaagagaaggataaacataaaggacaccctctctagggtccccaggggggccgggctggggctgcgtaggtgaaaaggcagaacactccgcgcttcttataaaaggagtgagaggaaggcggggggcgcaccaacgcatcgtgtggccctcccctcccacctccctgtgtataaatatttacatgtgatgtctggtctgaatgcacaagctaagagagcttgcataataaaaaataaaaatataaaaaataggggggggcccctttaaaaagaataattttttcccccnnnnnnnnnnnnntaaaannnnnnnnnngggggccccaaaaaatatatctcgggggcgggttttaaaaannnnnnnnnnnnnaaaacccggggggaccccaaatatttcgtctc

SEQ ID NO: 134478 - DNA, 1879 bp, Homo sapiens
cgctggaactgaaagtggacagcagcgggccgtgcagcctggcctgccgtgtaaaggacctggggctcgggctgagcttgttgaggccccagggggctggtcagcatggctggtgggagtgtggaggtgacacccagcacattcacatgctacctgagacctccctcggcctcccctccaacacccccatcccaccctgggctgctcccgcgcagcccagctctctgctctctgcacacgggagcacggacgctgccactgtttggaggagggcggtgcagctctgcagtgctgccccccaggccagggcccccgcgggatcaggctctgggcagcgggagcgcttccaccgcttccagcccacctatccgtacctgcagcacgagatcgacctgccacccaccatctcgctgtcagacggggaggagcccccaccctgacaagtgccctgccacctacaagttaggggaccccaagcagcagcttggaactgaaccgggagttcggtgggcgcacccccaaacagaaccatcttcgacagtgacctgatggatagtgccaggctgggcggcccctgcccccccagcagtaactcgggcattcagcgcccacgtgctacggccagcggcgggcgcatggaggggccgccgccccacctacagcgaggtcatcggccacttacccgggggtccttccttccagcacccaggcagagcagtgggccgccctccttgctggaggggacccgggctccacccacacacacattcgcgcccttagagaagcgcagccatctggagcaaagagaaggataaacagaaaggacacccctctctagggtccccaggggggcccgggctggggctgcgtaggtgaaaaggcagaacactccgcgcttcttagaagaggagtgagaggaaggcggggggcgcagcaatcgcatgcgtgtggccctcccctcccacctccctgtgtataaatatttacatgtgatgtctggtctgaatgcccaagctaagagagctttgcaaaaaaaaaaagaaaaaagaaaaaaaaaaaaccacgtttctttgttgagctgtgtcttgaaggcaaaagaaaaaaaatttctacagtagtctttcttgtttctagttgagctgcgtgcgtgaatgcttattttcttttgtttatgataatttcacttaactttaaagacatatttgcaccaaaccctttggtttaaaagatcctgccaatattaatatatataaaatatatataaggataagagaaacctgtaatgtgcgagggcagggagtatttttgtattagaagacggcctattaaaaaaaaaagttgttttctgaactagaagaggaaaaaaatggcaatttttgagtgccaagctcagaaagtgggtattacccttgtaaagaaaaaaaattacaaagcagggggttagagttattgatataaatgttgagattttgcactattttttaatataaatatgtccagtgcttgcttgatggaaacttctcttgtgtctgttgagacttttaagggagaaatgtcgggaattgtcagcagtcgcctgacggcaagagggtgagcccccgtggagtctgcagagaggccttggcagggagcggcgggctttcccgaggggccactgtccctgcagagtggatgcttctgcctagtgacaggttatcaccacgttatatattccctaccgaagtagacaccttttcccccctgacccagaacagcctttaaatcacaagcaaaataggaaagttaaccacggaggcaacgagttccaggtagtggttttgcctttcccaaaaatgaaaataaactgttaccgaagaataaaaaaaaaaaaaagtcgacg

SEQ ID NO: 134479 - DNA, 250 bp, Homo sapiens
gtgaatctgtctcagcaactgaagatctggcacctgatgcagcccaaggggaagacaattctgagatcaaggagctcttatagagagaatgagcctctaccagcctgcaatggccccgcccaggcccagccctctcctaccactgaaagggccaagtcccaggaggaagttctccccagctccacaactccatcaccaggcggagccctgagcccttcagggcagccttcatcatctgtcgacgcggccg

SEQ ID NO: 134480 - DNA, 393 bp, Homo sapiens
gatggcagagggcaaggcaggcggcgcggccgttctcttttccaagcaggtgcagaaaaagttgagcagggcccaggagaaggcagaaggccacaagctgtacaaggacctgaagaacttccttagtgcagtcaaagtgatgcatgaaagttcaaaaagagtgtcagaaaccctgcaggagatctacagcagcgagtgggacggtcatgaggagctgaaggccatcgtatggaataatgatctcctttgggaagactacgaggagaaactggctgaccaggctgtaaggaccatggaaatctatgttgcccagttcagtgaaattaaggagagaattgccaagcggggtcggaaactcgtggactatgacagtgcccgacaccacctggaggt

SEQ ID NO: 134481 - DNA, 1827 bp, Homo sapiens
  misc_feature (1)...(1827): n = a,t,c or g
atgaacatgaacatcaaaaaaattgtaaaacaagccacagttctgacttttacgactgcacttctggcaggaggagcgactcaagccttcgcgaaagaaaataaccaaaaagcatacaaagaaacgtacggcgtctctcatattacacgccatgatatgctgcagatccctaaacagcagcaaaacgaaaaataccaagtgcctcaattcgatcaatcaacgattaaaaatattgagtctgcaaaaggacttgatgtgtgggacagctggccgctgcaaaacgctgacggaacagtagctgaatacaacggctatcacgttgtgtttgctcttgcgggaagcccgaaagacgctgatgacacatcaatctacatgttttatcaaaaggtcggcgacaactcaatcgacagctggaaaaacgcgggccgtgtctttaaagacagcgataagttcgacgccaacgatccgatcctgaaagatcagacgcaagaatggtccggttctgcaacctttacatctgacggaaaaatccgtttattctacactgactattccggtaaacattacggcaaacaaagcctgacaacagcgcaggtaaatgtgtcaaaatctgatgacacactcaaaatcaacggagtggaagatcacaaaacgatttttgacggagacggaaaaacatatcagaacgttcagcagtttatcgatgaaggcaattatacatccggcgacaaccatacgctgagagaccctcactacgttgaagacaaaggccataaataccttgtattcgaagccaacacgggaacagaaaacggataccaaggcgaagaatctttatttaacaaagcgtactacggcggcggcacgaacttcttccgtaaagaaagccagaagcttcagcagagcgctaaaaaacgcgatgctgagttagcgaacggcgccctcggtatcatagagttaaataatgattacacattgaaaaaagtaatgaagccgctgatcacttcaaacacggtaactgatgaaaatcgagcgcgcgaatgttttcaaaatgaacggcaanatgtgccgcaagccaaaggcaacaatgtggttatcacaagctacatgacaaacagaggcttcttcgaggataaaaaggcaacatttgcgccaagcttcttaatgaacatcaaaggcaataaaacatccgttgtcaaaaacagcatcctggagcaaggacagctgacatggctccaagtagcgaagcgagcaggactgggcggcggccaaagcggtcggacagtgctccgagaacgggtgcgcatagaaattgcatcaacgcatatagcgctacagcacgccatagtgactggcgatgctgtcggaatggacgatatcccgcaagaggcccggcagtaccggcataaccaagcctatgcctacagcatccagggtgacggtgccgaggatgacgatgagcgcattgcttttgctagtcatacaatccaagaatgtcgttctcaaggacctggaggctatccctttaaaatatattcatcaagaaaagacagaatccctatctcccagtctttgttggagagtcacttcactgttcatgaagagactgccccggacttagagaccacaggtttcctaactctcctaagtatccttggaaagaataatgatctcctttgggaagactacgaggagaaactggctgaccaggctgtaaggaccatggaaatctatgttgcccagttcagtgaaattaaggtactcaatgtacagaatcaaggctgggttgtggatgacccatccaggttagagaacatattgggttaa

SEQ ID NO: 134482 - DNA, 902 bp, Homo sapiens
tgatgcatgaaagttcaaaaagagtgtcagaaaccctgcaggagatctacagcagcgagtgggacggtcatgaggagctgaaggccatcgtatgggtattcagaaatcccaagaaacaagggcgactaccgcacccggatatggaaattcgaggacgggttgagcaacgtgttggttatacaattgaacaaattaatcatatgcgtgatgtgtttggtacgcgattgcgacgtgctgaagacgtatttccaccggtgatcggggttgctgcccataaaggtggcgtttacaaaacctcagtttctgttcatcttgctcaggatctggctctgaaggggctacgtgttttgctcgtggaaggtaacgacccccagggaacagcctcaatgtatcacggatgggtaccagatcttcatattcatgcagaagacactctcctgcctttctatcttggggaaaaggacgatgtcacttatgcaataaagcccacttgctggccggggcttgacattattccttcctgtctggctctgcaccgtattgaaactgagttaatgggcaaatttgatgaaggtaaactgcccaccgatccacacctgatgctccgactggccattgaaactgttgctcatgactatgatgtcatagttattgacagcgcgcctaacctgggtatcggcacgattaatgtcgtatgtgctgctgatgtgctgattgttcccacgcctgctgagttgtttgactacacctccgcactgcagtttttcgataggaactcctttcccatgccttactcgtatgtgtttgtggttttgcttcctaatagtcgtattggctgctatgtgaccatcttccaaaacatttccaacttgagggatgtcttctacagggaaatgagcaag

SEQ ID NO: 134483 - DNA, 2166 bp, Homo sapiens
atgagcaaactgaaccacaatctctccgaggtgatgagcaaactggagaagcaacattccagtaaagtctttgtggtgaagagactatcaagcagcagcaggcgctctttagtcatttctcccccagttcgaacatctacagtctccagtccacttacctcacctactagtccctctacactttcctcgaagagtaagagtgaatctgtctcagcaactgaagatctggcacctgatgcagcccagggggaagacaattctgagatcaaggagctcttagaagatgaggaaatagggaaggaaggatctgaagcaagctcctctgaggaagaagagcctctactaacctgcaacggcccctcccaggcccagccctctcctatcattgagagtgccaggtcccaggaagaagttccccccagctcccctgctctatcaccaggtggagccctaagcccttcaggacaccctttatcatctgccgcagaagtagtcctccgaacccgcaccgcaggtgatgcacttcaaaaagcctttacagataaagaggaattacttaagcagcaggcatctaaccttcatgagcagaaaaaagctggggtgatatttgaagctgaagaagttatcactcttttaacttctgtgcttaaaacgtcatctgcatcaagaactagtttaagctcacgacatcagtttgctcctggagcgacagtattgtataagggcgataaaagggtgcttaacctggacagtccctcttcgcgcctgcgcacgcaccgccctctcccgaagccccgccccggtcaccgccccgaggctgtcccggacggttgggtccagaggagcctttccttcactggcccgcctgctatgacgatcatgtacagctgcattgctaatggccgagcggtcctagcggagctgacactgactggaggttcttaccaggtacctccggatccacgccaccgcccccacgggttccgcccctcgagggtggtgccccccgagcccgcccctaaggacgcggcgctgcgaggtggtccggaacctgctcgggggacacaagctcccgccccgcgagagatcccgcccccacgagagaccccgcccccgcaagaggccccgccccagcgagaggctggcgtcccggcggctgccgcacttcgaacatctacagtctccagtccacttacctcacctactagtccctctacactttcctcgaagagtaagagtgaatctgtctcagcaactgaagatctggcgcctgatgcagcccagggggaagacaattctgagatcaaggagctcttagaagatgaggaaatagggaaggaaggatctgaagcaagctcctctgaggaagaagagcctctactaacctgcaacggcccctcccaggcccagccctctcctatcattgagagtgccaggagtttatcgatgaagaaaaccacctccggcgacaaccatacgctgagagaccctcactacgttgaagacaaaggccataaataccttgtattcgaagccaacacgggaacagaaaacggataccaaggcgaagaatctttatttaacaaagcgtactacggcggcggcacgaacttggtgcgtaaagaaagccagaagcttcagcagagcgctaaaaaacgcgatgctgagttagcgaacggcgccctcggtatcatagagttaaataatgattacacattgaaaaaagtaatgaagccgctgatcacttcaaacacggtaactgatgaaatcgagcgcgcgaatgttttcaaaatgaacggcaaatggtacttgttcactgattcacgcggttcaaaaatgacgatcgatggtattaactcaaacgatatttacatgcttggttatgtatcaaactctttaaccggcccttacaagccgctgaacaaaacagggcttgtgctgcaaatgggtcttgatccaaacgatgtgacattcacttactctcacttcgcagtgccgcaagccaaaggcaacaatgtggttatcacaagctacatgacaaacagaggcttcttcgaggataaaaaggcaacatttgcgccaagcttcttaatgaacatcaaaggcaataaaacatccgttgtcaaaaacagcatcctggagcaaggacagctgacagtcaactaa

SEQ ID NO: 134484 - DNA, 1893 bp, Homo sapiens
atgttgggtcgcaagctgaaagatcaatatccgcacttggacaaagcgccgggagatatccgcctgaaagtcgataatctctgcggacctggcgttaacgatgtctcttttactttacgcaaaggcgaaattcttggcgtctctggtttgatgggcgcaggtcgtaccgaactgatgaaagtgctctacggcgcactaccgcgcaccagcggttacgtcaccctggatgggcatgaagtcgttacccgttcaccgcaggatggcctggcaaacggcattgtgtatatctccgaagaccgtaaacgtgacggtttagtgttgggcatgtcagtaaaagagaacatgtcgctgacagcgctgcgctacttcagccgcgctggcggcagtttgaagcatgccgatgaacagcaggctgtgagtgatttcattcgtctgtttaatgtgaaaactccgtcgatggaacaggcaattggtctgctttccggtggcaatcagcaaaaagtggcgattgcccgcggtctgatgacacgccccaaagtgttgatccttgatgaacctacccgtggcgtagatgtcggcgcgaaaaaagagatctatcaactgattaaccagttcaaagccgatggcttgagcatcattctggtgtcatcggagatgccagtgctgcagaaattggggaaagctgtagaaaccaaagatgaacgatttgaacaaagcgctagcaacttctaccaacaacagggtgaaaaggagaacgcttgctttgtccgctggcttggttggccactattatgtcgagtaggtccgttaatcatttcgattgcaactggcttcttcctgaaatcccttctcagcccccggtcagcgggatgcattgggcgtccactaaactggttccccaggggcctaaatggttgtctggtgttccctggaagcctgggtccactttctcagaccaaaagtgaggcagatgccagcccttgttcagagaaagtcagctcaggcagccctgtggataatgtggtggagtgggtggctcccatcggtggggctgagggcgtgagagaaggatcaagggtgtatgcccaacaaatggatgcagagggcacgaccaggagccagaagcccccagcatggcctgaaactagaggggcccccagaaaaacttttgccgcatttttaaatattccccggaaaggggggggggcccgagggtttcccggaattgccccccctgtggccacacaaaggaggggtgctccttggtgtccaaagaagaggccgccacattcttccagagctgcaattccacagctccattgccggtttgtttcccagtgtctaggattccctgtctcccaggctcttcacgggaagcagacatgtgaagacacagtgcgacagggaaaacaccatatgaggatggagaattggagtgctgcctgcacaggccaaggaacacaaaaaattgccagccagccaccaggcgccaggaagagaaccctttttggaagccagaatgtcctcttaatgggccccagccttgcagggcctcacctggtcccctttgtgcttccaattggcaagagcacagagccagaggccagggggatgtcaccactgcatcccaagcctctcatgaataaaacatacgactactttacatttgaaaaagcaaacatcaccaagcgatggagcatcccttcctgctggccccagaagcatctacacaccccttatcaatgccacactccaggtggccactaccaagcaatcagtagcaattggcagatttccctccagtaccggtctggaggttcccggtatcacacctgtggagggacccttatcagacagaactgggtgatgacagctgctcactgcgtggattag

SEQ ID NO: 134485 - DNA, 2884 bp, Homo sapiens
atgaagcaacaacttcctgtatcctaccttcaagttatcttcaatcactgggcgtcgaggatctccggggcgcggggcgcgggctggggcccagtgaggcttggcaggctgtgcgcggaccgcgccctggacggcgaaagcaggcccggagggggcggccagtccggcgtcccagcgtccgaggcgagccagaaggcggcccacggccgtcgcctcccggtcccggcccggctactgcgctgcgcccactccgctctggagcctgggcgcggatctgcctcttctccaagaaactcaaccactagtgacaatgaccagcctcctgactactccttctccaagagatgtgactctcatagtcttgggttctcgcttgtctgggagtcaagaaacttgactttaccaccaactagcaagttactccacttctctgccttccatttcttcatctataaatgcagggcagaaggccacaagctgtacaaggacctgaagaacttccttagtgcagtcaaagtgatgcatgaaagttcaaaaagagtgtcagaaaccctgcagtttatctactattagcgagtggtacggccatgaggagctgaaggccatcgtatggaataatgatctcctttgggaagactacgaggagaaactggctgaccaggctgtaaggaccatggaaatctatgttgcccagttcagtgaaattaaggagagaattgccaagcggggtcggaaactcgtggactatgacagtgcccgacaccacctggaggcagtgcagaatgccacgaagaaagatgaggccaagactgccaaggcagaggaagagttcaacaaagcccagactgtgtttgaagatctgaaccaagaactactagaggagctgcctattctttataatagtcgtattggctgctatgtgaccatcttccaaaacatttccaacttgagggatgtcttctacagggaaatgagcaagctgaaccacaatctctacgaggtgatgagcaaactggagaagcaacattccaataaagtctttgtggtgaagggactgtcaagtccctctacactttccttgaagagtgagagtgaatctgtctcagcaactgaagatctggcacctgatgcagcccaaggggaagacaattctgagatcaaggagctcttagaagaggaggaaatagagaaggaaggatctgaagcaagctcctctgaggaagatgagcctctaccagcctgcaatggccccgcccaggcccagccctctcctaccactgaaagggccaagtcccaggaggaagttctccccagctccacaactccatcaccaggcggagccctgagcccttcagggcagccttcatcatctgccacagaagtagtcctccgaacccgcaccgcaagtgaaggatctgaacaaccaaagaagagagcctctatccagaggacctcagcaccccctaaaccaccagagaagccagtaagaactcctgaggccaaagaaaatgaaaacatccacaatcagaaccctgaagaactttgtacttcccccaccttaatgacatctcaggtcacgctgatgcaagaggtgggctcccgtagccttggacgtgggggttctaaactgttaacttttcaccctaaactttgtgactctgtgagctgcaagtgcccagagcacctaaaggagaagctggagcagtacgtgaagcagctgcaggtggtgagggtggtgcggcaggaggagcggaaggggctgatcaccgcccggctgctgggggccagcgtggcacaggcggaggtgctcacgttcctggatgcccactgtgagtgcttccacggctggctggagcccctcctggctcgaatcgctgaggacaagacagtggtggtgagcccagacatcgtcaccatcgaccttaatacttttgagttcgccaagcccgtccagaggggcagagtccatagccgaggcaactttgactggagcctgaccttcggctgggaaacacttcctccacatgagaagcagaggcgcaaggatgaaacctaccccatcaaatccccgacgtttgctggtggcctcttctccatctccaagtcctactttgagcacatcggtacctatgataatcagatggagatctggggaggggagaacgtggaaatgtccttccgggtgtggcagtgtgggggccagctggagatcatcccctgctctgtcgtaggccatgtgttccggaccaagagcccccacaccttccccaagggcactagtgtcattgctcgcaatcaagtgcgcctggcagaggtctggatggacagctacaagaagattttctataggagaaatctgcaggcagcaaagatggcccaagagaaatccttcggtgacatttcggaacgactgcagctgagggaacaactgcactgtcacaacttttcctggtacctgcacaatgtctacccagagatgtttgttcctgacctgacgcccaccttctatggtgccatcaagaacctcggcaccaaccaatgcctggatgtgggtgagaacaaccgcggggggaagcccctcatcatgtactcctgccacggccttggcggcaaccagtactttgagtacacaactcagagggaccttcgccacaacatcgcaaagcagctgtgtctacatgtcagcaagggtgctctgggccttgggagctgtcacttcactggcaagaatagccaggtccccaaggacgaggaatgggaattggcccaggatcagctcatcaggaactcaggatctggtacctgcctgacatcccaggacaaaaagccagccatggccccctgcaatcccagtgacccccatcagttgtggctctttgtctag

SEQ ID NO: 134486 - DNA, 2258 bp, Homo sapiens
atgccgggagcccgcacttcctcctcgggggcctcagaaaaccacagggcgcggggccagggcggcggcccccagggagttggcaggatggcagagggcaaggcaggcggcgcggccggcctcttcgccaagcaggtgcagaagaagtttagcagggcccaggagaaggtgctgcagaaattggggaaagctgtagaaaccaaagatgaacgatttgaacaaagcgctaacaacttctaccaacaacaggcagaaggccacaagctgtacaaggacctgaagaacttccttagtgcagtcaaagtgatgcatgaaagttcaaaaagagtgtcagaaaccctgcaggagatctacagcagcgagtgggatggtcatgaggagctgaaggccatcgtatggaataatgatctcctttgggaagactacgaggagaaacttgtctgaccaggctgtaaggaccatggaaatctatgttgcccagttcagtgaaattaaggagaagaattgccaagcggggtcggaaactcgtggactatgacagtgcccgacaccacctggaggcagtgcagaatgccaagaagaaagatgaggccaagactgccaaggcagaggaagagttcaacaaagcccagactgtgtttgaagatctgaaccaagaactactagaggagctgcctattctttataatagtcgtattggctgctatgtgaccatcttccaaaacatttccaacttgagggatgtcttctacagggaaatgagcaagctgaaccacaatctctacgaggtgatgagcaaactggagaagcaacattccaataaagtctttgtggtgaagggactgtcaagcagcagcaggcgctctttagtcatttctcccccagttcgaacagctacagtctccagtcctcttacctcacctactagtccctctacactttccttgaagagtgagagtgaatctgtctcagcaactgaagatctggcacctgatgcagcccaaggggaagacaattctgagatcaaggagctcttagaagaggaggaaatagagaaggaaggatctgaagcaagctcctctgaggaagatgagcctctaccagcctgcaatggccccgcccaggcccagccctctcctaccactgaaagggccaagttcccaggaggaagttctccccagctccacaactccatcaccaggcggagccctgagcccttcagggcagctttcatcatctgccacagaagtagtcctccgaacccgcaccgcaagtgaaggatctgaggcgaccaaaaaagacagcctctatccagaggacctcagcaccccctaggaggcctcctccacccagagccactgcaagccccaggccctgctcagggaacataccttccagccctacagcctctggaggggggtcagcgcaccagccctagggcctccttggggactgggactgcaagtcctaggacctccctagagatctatacctaatccagaacgcaccagagaagccagtaagaactcctgaggccaaagaaaatgaaaacatccacaatcagaaccctgaagaactttgtacttcccccaccttaatgacatctcaggttgcttcagagcctggagaggcaaagaagatggaagacaaggaaaaggataataagcttatctcagctgactcctcggagggccaagaccagcttcaagtctccatggtaccagaaaacaacaacctcacagcacctgaacctcaagaagaggtatccacaagtgaaaatccacaactctgaagagaaactaccaagactcctcctgccccaaacctcgccagagaagctcttcaaccagaggggtataggtcagagggatataagagccagcatccatccctgggttctcagtaggaatgctggtgctgtctaaagacctggcattaatggaggccggaggagcagccttacgggagggatggagggaggcaggctggggagaagagaacattagacctcagggaaatatttaattctggttttagcattattagaataagactttatacattaactaaagtggagctttaatcactataaaaagcaaaagtatctatagacacagacacttgcctatacagagacataacccacacacactcagaggatagtgaacaaatctgtctttgacttacgaccccattttgcaagacttaaagccggaagaacacattttcagattgttaaataaagtctgattctgact

SEQ ID NO: 134487 - DNA, 1908 bp, Homo sapiens
  misc_feature (1)...(1908): n = a,t,c or g
tgtcggtctgtcagggttggaaagtccaagccataggacccagtttcctttcttagcttacgttatctaccagagcaccgtgggctgttacttgccttgagttggaagcggttcgcatttataccggaatataaatagtttctggaaaggacactgacaacttcaaagcaaaatgaagctcttttggttgcttttcaccattgggttctgctgggctcagtattcctcaaatacacaaccaagggacgaacatctattgttcatctgtttgaatggcgatgggttgatattgctcttgaatgtgagcgatatttagctcccaagggatttggaggggttcaggtctctccaccaaatgaaaatgttgcaatttacaaccctttcagaccttggtgggaaagataccaaccacgttagctataaattatgcacaagatctgggaaatgaagatgaatttagaaacatggtgactagatgtaacaatgtttggggttcgtattttatgtggatgctgtaattaatcatatgtgtgggtaacgctgtgagtgcaggaacaagcagtacctgtggaagttacttcaacccctggaaattaaggactttcccagcaatccccatatcctggatgggatttcaatgatggtaaatgttaaaactggaagtggagatatcgagaactacaatgatgctactcaggtcagagattgtccgtctgactggtcttcttgatcttgcactggagaaggattaccgtgcgttctaagattgcccgaatatatgaaccatctccattgacattggtgttgcagggttcagacttgatgcttccaagcacatgttggcctggagacataaaggccattttgggacaaactgcataatcctaaacagtaactggttccctgcaggaagtaaacctttcattttaccaggaggtaattgatcttngggtgggtgagcccaatttaaaagccagtgactactttggaaatggccgggtgacagaattcaagtatggtgcaaaactcggcacagttattcgccaagtgggatggagagaagatgtcttacctaaagaaatggggaagaagggtgggggtttcatgccttctgacagagcgcttgtctttgtggataaccatgacaatcaacgaggaccatggcgctggaggagcctctatacttaccttctggggatgctaggctgtacaaaatggcaagttggatttatgcttgctcatccttatggttttacccgagttatgttccagctaccgttggccaagcacagtttcaaaaagggaaacgatgttaatgattggggttgggcccacccaaataaataatggcagtaattaaagaagttactattaatcccagacactaacttgtgggcaatgacctgggtcttgtgaacatccgatggcgcccaaataaggaacatgggttaatttccgcaatggaagtgggatggcccagccctttttacaaaattggtatgataatgggagcaaccaagtggctttttgggagaggaaacagaaggattcattgttttcaacaaatgatggccggtcatctttatttaactttgcaaacctggtcttcctgctggctcatactgtgatgtcatttctggagataaagttattggcaattgctcagccattaaaatccccgtgtctgttgatggcaaggctcatttttctatgagtaactctgctgaagatccatttcttgcaattcatgctgaatctaaaattgtaaaatttaaaattaaatgcaaatccgcaaagcaaaaaaaaaaaaaaaaaaagggccgcccgttttaaagaatcaaagttaacgtccccgggcatgcaaggaaatactttttttatggggcccccaaaatcaaattcccggcc

SEQ ID NO: 134488 - DNA, 383 bp, Homo sapiens
gctacgtgctggagctcctgcagacccgtcgcttctgccgcctgcgtgtggtgggcaccatctttgacagcgctcctggtgacagcaacctggctacaggacgcgggtctcgctggcccgagctctacctctactcgagggctgacgaagtagtcctggccagagacatagaacgcatggtggaggcacgcctggcacgccgggtcctggcgcgttctgtggatttcgtgtcatctgcacacgtcagccacctccgtgactaccctacttactacacaagcctctgtgtcgacttcatgcgcaactggtccgctgctgaggccattgctccatctcacctctgctccagaaataaatgcctgacacctccccacaaaaaaaaa

SEQ ID NO: 134489 - DNA, 512 bp, Homo sapiens
tgcgcaagcgggagttccggctggagacccgtgctctgggccggcgccttcaccatggcctcggcagagctggactacaccatcgagatcccggatcagccctgctggagccagaagaacagccccagcccaggtgggaaggaggcagaaactcggcagcctgtggtgattctcttgggctggggtggctagcaaggacaagaaccttgtcaagtacagtgccatctaccacaaaaggaagctgctcgagctgctctttgattatgagattgagaaggagccccctgctttttcattgtcttcagcaacggtggcgtcatgctgtaccgctacgtgctggagctcctgcagacccgtcgcttctgccgcctgcgtgtaggtgggcaccatctttgacagcgctcctggtgacagcaacctggtaggggctctgcgggccctggcagccatcctggagcgccgggccgccatgctgcgcctgttgctgctgggggcctttgccctggtggacg

SEQ ID NO: 134490 - DNA, 589 bp, Homo sapiens
  misc_feature (1)...(589): n = a,t,c or g
tgcgcaagcgggagttccggctggagacccgtgctctgggccggcgccttcaccatggcctcggcagagctggactacaccatcgagatcccggatcagccctgctggagccagaagaacagccccagcccaggtgggaaggaggcagaaactcggcagcctgtggtgattctcttgggctggggtggctgcaaggacaagaaccttgccaagtacagtgccatctaccacaaaaggggctgcatcgtaatccgatacacagccccgtggcacatggtcttcttctccgagtcactgggtatcccttcacttcgtgttttggcccagaagctgctcgagctgctctttgattatgagattgagaaggagcccctgctcttccatgtcttcagcaacggtggcgtcatgctgtaccgcttacgtgctgggagctcctgcagacccgtcgcttctgccgcctgcgtgtggtgggcaccatctttgacagcgctcctggtgacagcaacctggtagggggctctgcgggcctgggcagccatcctggagcgcggggccgncatgctgcgcctgttgnttgctggtgggattt

SEQ ID NO: 134491 - DNA, 1585 bp, Homo sapiens
  misc_feature (1)...(1585): n = a,t,c or g
atggcttcccaagtgggctttaccgttcaacagacacatggacgtgtcatggaacagctcttctggaatggccctagtgctggagccacagcgacacctactggccacggacacctaggccaccccctccaggacgcccgggccctgtggtccatctggcccagccagtcctgcaccctgaagctggcattcctgagttctgggaatctggctccccgggacagactaggggagcagctctggtgttgacagtccacatctgtgtttcagagaacagccccagcccaggtgggaaggaggcagaaactcggcagcctgtggtgattctcttgggctggggtggctgcaaggacaagaaccttgccaagtacagtgccatctaccacaaaaggaatacagcaactcttcagccgcctctcacctacatgagagggtggggactcttcctgaccggcgccccggctgaccaatacctgatccagatcaagcgaattagccaatggctgcggggctgcatcgtaatccgatacacagccccgtggcacatggtcttcttctccgagtcactgggtatcccttcacttcgtgttttggcccagaagctgctcgagctgctctttgattatgagattgagaaggagcccctgctcttccatgtcttcagcaacggtggcgtcatgctgtaccgctacgtgctggagctcctgcagacccgtcgcttctgccgcctgcgtgtggtgggcaccatctttgacagcgctcctgggtgacagcaacctgggtaggggctctgcgggccctgggcagccatcctgggagcgccgggcccgcccaatgctgcgcctgttgctgctggtggcctttgccctgggtggttcgtcctgtttccacgtcctgcttgctcccatcacagccctcttccacacccacttctatggacaggcttacaggacgcgggctctcgcttggcccgagctctacctctactcgagggctgacgaagtagtcctggccagagacatagaacgcatggtggaggcacgcctggcacgccgggtcctggcgcgttctgtggatttcgtgtcatctgcacacgtcagccacctccgtgactaccctacttactacacaagccttctgtgtcgaacttcaatgcgcaaactgcgtccgctgctgaaggccattgctccatctcacctctgctcccagaaaataaatgccctgaaaccctccccccanaacctgcaatctgtcgggcactccttcctcgttcaactcccctgtagccctttgggactttgcggtccccctaagtagaaaattccctatgggccctgtctccctgggggcctctgtctgctggtggtctgcttaccacagaatcctaaggggcaggagtgcctgggcatgtgtctgtgggagccttgcagtcagttgtgtttggacaagtgcaacagtcaggctgctgattcctgtggcatgcaggctgtagaggttgacaaatggagggggtgtgttgaggtgtgacgccctagtgtgattttttaaaatttaaactctggtaagaacatttaatatgaaacct

SEQ ID NO: 134492 - DNA, 428 bp, Homo sapiens
  misc_feature (1)...(428): n = a,t,c or g
tttcgtcaaagctggggtcccctcaggtgtggatagatgcggggacccagattttcttttcttacgccattggcctgggggccctcacagccctgggcagctacaaccgcttcaacaacaactgctacaatgggaccagcttctttgctggcttcgaggtcttctccatcctgggcttcatggctgcagagcagggcgtgcacatctccaaggtggcagagtcagggccgggcctggccttcatcgcctacccgcgggctgtcacgctgatgccagaggccccactctgggctgccctgttcttcttcatgctgttgctgcttggtctcgacagccagtttgtaggtgtggagggcttcatcaccggcctcctcgacctcctcccggcctcctactacttccgtttccaaagggagatctctgtggcn

SEQ ID NO: 134493 - DNA, 1143 bp, Homo sapiens
gcctggtgctcaggacaggaaaagatttctcaagtgggagccagctgggaaaagggggcagtccctgaggctggccaagggctgctcacctttgaacaagggacagatgttccagacattgatgctgccggccttcatgaactggcccagcgagatctccaagaagaaaatggggattcctccgaccagggctatcaggatgcagggaataaggaacacacctggggggagatctctgtggccctctgttgtgccctccgctttgtcattgatctctccatggtgactgatggtgggatgtatgtcttccagctgtttgactactactcagccagtggcaccaccctgctctggcaggccttttgggagtgcgtggtggtggtctgggtgtatggagctgaccgcttcacggacgacattgcctgtatgatcgggtaccgaccttgtccctggatgaaatggtgctggtcctcttcacccgctggtttgatgaagcttagagagccagccagcagtggaaccttctgggttattcacaatagactgaacccaaaagtccaaaccgccaaaagccaccccagagtcagtccacattggtgtgcagcttgggtgcgagtgcacgctggtgcgtacaaaactacaatgttcaaaacagtgtggtacctgcataattatcaacatatagaatgtaataatgtaattgagagtccagaaataaacctaaatatctacagccaactgatctttgccaagggtaccgagaacttcagggaaagaatagtcctcaacaagtgctcagttgttgcttccacaagtcccctggtcgtgctgcttgtgcttggagtgctgctgcctggcgccctggacagcatcatttactatctcaagcctgactggtcaagctggggtccctcaggttggatagatgtggggacccagattttcttttcttatgccattggcctgggggccctcacagccctgggcagctacaaccgcttcaacaacaactgctacaaatgcctggtgactctcatcttgcagcaggccacactgttggcctccaatgaagcctttaaaaagcagatggagagtgctagtgaggcggccaagaagtacacggagaatgaccagctcaagaag

SEQ ID NO: 134494 - DNA, 2426 bp, Homo sapiens
tcagctggaattccggctgaaagcaagcaatgctccccaccctgcaaatccagggcccagcagcctttgctcctggggatagaggccctggcaggcactgtcccttccctgtgcccatcacccccactggtgccctcctgccagtctctgactcttgtgacagtctggtggacctggtctggccatctgttacctatcttgccttggggacccagagcagagtctggccacatcccttgggggctcctggtcaggctggggagtcacctgaacaaagaagacagtgtctagagctgtgggacatggccagctccctgggggacaaggtccccagagcagcatgtgggaagagggggcagacagtgtggcagctgcatctcgcctgcctctgcctggcccagttccactctccacctgctcaacccccacctctctccagaagaggagggggacccgacccggatccaatatcccgctccctgcctgggcctcccacacctgcactgcccacacactcatacagctctcactccccacgtgctccacgcctcctgtccccactgaggagagctcccagaggctcgcctgctccccaccgacacgcgtccctgcagacaaacgaggcgcccagggagcttccccactgcacttggccagggctgccggggcgcagccttgcccctagcttcctctggcgggagccatggctcggaggacaatggggacctctgaacatacctgcccgcaagggggaccggaggcgctgggagtgggggtgtgagggaggtggtgccacagcctccgctgagcagcctggccccccagatcgtgtacttcactgctacattcccctacgtggtcctggtcgtgctgctggtgcgtggagtgctgctgcctggcgccctggatggcatcatttactatctcaagcctgactggtcaaagctggggtcccctcaggtgtggatagatgcggggacccagattttcttttcttacgccattggcctgggggccctcacagccctgggcagctacaaccgcttcaacaacaactgctacaaggacgccatcatcctggctctcatcaacagtgggaccagcttctttgctggcttcgtggtcttctccatcctgggcttcatggctgcagagcagggcgtgcacatctccaaggtggcagagtcagggccgggcctggccttcatcgcctacccgcgggctgtcacgctgatgccagtggccccactctgggctgccctgttcttcttcatgctgttgctgcttggtctcgacagccaggtttgcatggggctctgggacagggagccaggaggggggcggagggagggctgcaggcaaggaaaggggtggaggaggtgcggggatcggcctgagctgccctggccacagtttgtaggtgtggagggcttcatcaccggcctcctcgacctcctcccggcctcctactacttccgtttccaaagggagatctctgtggccctctgttgtgccctctgctttgtcatcgatctctccatggtgactgatgtgagtggggtggggggtctgcctgtgacctctggtggccgtctgccatcctccctgactgggctctgtccccagggcgggatgtacgtcttccagctgtttgactactactcggccagcggcaccaccctgctctggcaggccttttgggagtgcgtggtggtggcctgggtgtacggtaggtcatggctgagggctgggctgggggatggtggcggggaaggcaggtctccagcttggccctcccgcctcacctcgccgcagggagctgaccgcttcatggacgacattgcctgtatgatcgggtaccgaccttgcccctggatgaaatggtgctggtccttcttcaccccgctggtctgcatgggcatcttcatcttcaacgttgtgtactacgagccgctggtctacaacaacacctacgtgtacccgtggtggggtgaggccatgggctgggccttcgccctgtcctccatgctgtgcgtgccgctgcacctcctgggctgcctcctcagggcaaagggcaccatggctgagcgctggcagcacctgacccagcccatctggggcctccaccacttggagtaccgagctcaggacgcagatgtcaggggcctgaccaccctgaccccagtgtccgagagcagcaaggtcgtcgtggtggagagtgtcatgtgacaactcagctcacatcaccagctcacctctggtagccatagcagcccctgcttcagccccaccgcacccctccagggggcctgcctttccctgacacttttggggtctgcctgggggaggaggggagaaagcaccatgagtgctcactaaaacaactttttccatttttaataaaacgcccggaattccgccgatac

SEQ ID NO: 134495 - DNA, 4000 bp, Homo sapiens
  misc_feature (1)...(4000): n = a,t,c or g
tagtcggagcgaggtggcgagtcgctgagcccgccgcggccccgagagcggctgcagccgccgccgccgggaaggagagggcgaggcgcgcccgagccgccgccgccgccgccaccgccgccgccgccaccaccgccaccggagtcgcgggccagccgggcagcctccgcgggccccggccggggcggggggcgcgggccacaggcccctgctccggccgtcgtttgcagaccgcgggcgccgatgtcgcccgcgccccgttaggatgagtctcgggtcgggcgaggagccgccgcagccgccgccgcccgagccgcgggcaggagcctcgggagccgccgccgccgccgccgccgcccggccgggccccgacgccgcccgcgcgcccccgggcccccgacacacatgagattcttcaggctcactttcaagtgcttcgtggactgcttctgactgcgccgcccgcgccccgcaccccgccgtccgcccgccgccccgtcccccggcccggccgccccccggcccccggccggcccgcgccctcggggccctccccggtgccgccggtgccccccgcctgaccgccgccccccgtgaggcgccgcgaccccggcccggccgtgcggcccgccggggccatggcgaagaagagcgccgagaacggcatctatagcgtgtccggcgacgagaagaagggccccctcatcgcgcccgggcccgacggggccccggccaagggcgacggccccgtgggcctggggacacccggcggccgcctggccgtgccgccgcgcgcagacctggacgcgccagatggacttcatcatgtcgtgcgtgggcttcgccgtgggcttggggcaacgtgtggcgcttcccctacctgtgctacaagaacggcggaggtgtgttccttattccctacgtcctgatcgccctggttggaggaatccccattttcttcttagagatctcgctgggccagttcatgaaggccggcagcatcaatgtctggaacatctgtcccctgttcaaaggcctgggctacgcctccatggtgatcgtcttctactgcaacacctactacatcatggtgctggcctggggcttctattacctggtcaagtccttttaccagcacgctgccctgggccacatgtggcaactatcctggaaacactccccgacttgcgtggagatctttccgccatgaagactgtggccaatgccagcctggccaacctcacctgtgaccagcttgctaaccgcccggtcccctggtcatcgagttctgggagaacaaagtcttgaagctgtctgggggactggaaggtgccaggggccctcaattgggaangtgacccttggtctgctggcctgctgggtgctggtctacttctgtgtctggaagggggtcaaatccacgggaaaaaatcgtgtacttcactgctaacattacccctacgtggtcctggtcgtgctgctggtgcgtggagtgctgctgcctggcgccctggatggcatcatttactatctcaagcctgactggtcaaagctggggtcccctcaggtgtggatagatgcggggacccagattttcttttcttacgccattggcctgggggccctcacagttctgggcagctacaaccgcttcaacaacaactgctacaaggacgccatcatcctggctctcatcaacagtgggaccagcttctttgctggcttcgtggtcttctccatcctgggcttcatggctgcagagcagggcgtgcacatctccaaggtggcagagtcagggccgggcctggccttcatcgcctacccgcgggctgtcacgctgatgccagtggcccccattttgggctgccctgtttttcttcatgctgttgctgcttggtctcgacagccagtttgtaggtgtggagggtttcatcaccggcctcctggacctcctcccggcctcctactacttccgtttccaaagggagatctctgtggccctctgttgtgccctctgctttgtcatcgatctcttcatggggaactgatggcgggatgtacgtcttccagctgtttgactactactcggccagcggcaccaccctgctctggcaggcccttttgggagtgcgtggtggtggcctgggtgtacggagctgaccgcttcatggacgacattgcctgtatgatcgggtaccgaccttgcccctggatgaagagggtgctggtccttcttcaccccgctggtctgcaatgggcatcttcatcttaaacgttgtgtactacgagccgctggtctacaaacaaaaccctacgtgtacccgtggtggggtgagcgccatgggcctggcctttcgccctgtccttccatgctgttcgtgccgctgcaacctcctggggctgccctccctcagggccaaagggcacccatggctgaagcgctggcagcaccctgaccccagcccatctggggcctccacccacttgggagttaccgaggttcagggacgcagatgttcagggggcnttgacccacccttgaaccccagtgtccgagagcagcaaggtcgtccgtggtggagagtgtcatgtgacaactcagctcacatcaccagctcacctctggtagccatagcagcccctgcttcagccccaccgcacccctccagggggcctgcctttccctgacacttttggggtctgcctgggggaggaggggagaaagcaccatgagtgctcactaaaaacaactttttccatttttaataaaacgaccaaaaatatcacaacccaccaaaaatagatgcctctccccctccagccctagccgagctggtcctaggccccgcctagtgccccacccccacccacagtgctgcactcctcctgcccctgccacgcccaccccctgcccacctcttccaggctctgctctgcagcacacccgtgggtgacccctcaccccagaagcagcagtggcagcttgggaaatgtgaggaagggaaggagggagagacgggagggaggagagagaggagaagggaggcaggggaggggcagcagaaccaaggcaaatatttcagctgggctatacccctctccccatccctgttattagaagcttagagagccagccagcaatggaaccttctggttcctgcgccaatcgccaccagtatcaattgtgtgagcttgggtgcgagtgcacgcgtgcgtgagtacggagagtatatatagatctctatctcttatcaaaggtgaatgccagatgtaaatggcgcctctgggcaaaggaggcttgtattttgcacattttataaaaaccttgagagaatgagatttctgcttgtatatttctaaaaagaggaaggagcccaaaccatcctctccttaccactcccatccctgtgagccctaccttaccccttctgcccctagcccaaggagttgaaatttatagatctaactttcatgggcaaaacaaaggctttcgagctgttgcgtgtgtgagtctgttgtgtggatgtgcgtgtgtggtccccagccccagactggattggaaaagtgcatggtgggggcctcggggctgtcccccacgctgtccccttttgccaaaattctgtggggcaaagaggctgcaatattccgtcctggggtgtctggggctgctaaccctggccttgctcaggcttccccaaccctgtgccgggggcaaaacccccagggaagggaaccctgggaacaagggctcccaacatcccagggcttaaaggtgggatgcacttccccgcacctccagtcttctgtgtagcagctttaacccacgtttgtctgtcacgtccagtcccgagacggctgagtgaccccaagaaaggcttccccgacacccagacagaggctgcagggctggggctgggtgagggtggcgggcctgcggggacattctactgtgctaaaaagccactgcagacatagcaataaaaacatgtcattttccaaa

SEQ ID NO: 134496 - DNA, 363 bp, Homo sapiens
atgggcaagcggggcctcatcctcctgatagaagcttgtattgctattgcacaaccactccaaagatggtttgtggtcccaccaagagctggcatgccagtgacctatgacccagcaattctgctgctggaagtccacccgtgtgaaatgcacgcttgtgttcaccaggagagaaggttctttgtagatctcaaacagggaactttccacacacccctcaagagcaggctgttccctctgcctggaatgctcttccggttcaaccttgatcccacgacccagccccatgctggtgccctgcaggtgtgtttgtccgatggagacacgtgttcagggctcagccagcccagggggtcaagggca

SEQ ID NO: 134497 - DNA, 1389 bp, Homo sapiens
tcaggcgacggtttccgcggacaggacagacggggtggccggatcccctgcacagctccaagtttgggtgacggtttccgtggacagggcggacagggtggccgggtcccctgcacagctccaagtttgggtgacggtttccgtggacaggacagacggggtggccgggtcccctgcgcagctccaagcttgagtgatggtttctccctcgctagccttgcgggggttgctggacaggaccacaaaagctggtgcccagctccgtccccagcacgcctgccccgacacggtgaggggctttgtaacacgcccagctctgtcgctccagaccctgggtgcacagctagaggcgccactggcaagcctgcacgtcgagcccagggatgccgtggccagcagtggttgggatttcacgaactttagacagctgccggtgtcagggtcccggggcttttcccggccgccaccccccccgccaaatgagccatcagctccctctccccagtcatggagaccgcactgctgtccttcttccaggccaggagcagcccccgccatgtgatgagctccgccacgccagcttctgtcttcctcccggtgacggcaccacagctcccccggcaccgcgtacattcctgttttggggtattttattcgcatctgcagagtagagaggaacattccagaatgtgaagacttcagaacgtggaccctgggttctggagagaaggtggcctgacttttagctgggagctgtgcagctgtgtccccctccctgccgcccttgccacagagcagcgcttcctggtggccttttccccccaccacgccccccacactcccctcaggccggacccctccatccacagtggacacagtagcctgggagcgttggatcccccactcagctttccccagaagcctcaagaccacagtggcctcccacggcggagcagtcccagggctggtgttcatccagggcacggacaggcctgaagtgcagacatttcctctgccaagcagtggacgcaggtcggccccgctggccagggcggctctaagtttggaaaaacgaaagtcccgtggcagagtgggcccctggggtgggatcctggagccagggctgggcaaggtgtgggttgagagacccgggggccttccctgcagctggcatggagtgatggggagggggtgctgggtggagagggagctatagaggccacaggaggggtccctagcctccagcaccatggccgtggtctggggggcatcctggcagccccatggagtggccgtgtccagggactgagctccaaatgaggaaccgtgcggggtccagagacctgcactcactcggccgggccccacctgctgccacagccccctcat

SEQ ID NO: 134498 - DNA, 2541 bp, Homo sapiens
tcaaagacgcatggctgctcggaaggcagggagagcactgccgaagctactacgagtcttctgaatttctgcgcgacagtccaaagtgacgtgctgagccgcatctgcaggtgcccggtgtgccagggtcagcccagaagccacaggggacccagatggccccagtctccccacgacggggaccacagcggggctggcatacactgggcgctcaacgattgctcccacaagctgccctaagcagcccagcatttccccagcatccaggaggccgctgggctcctcggagaagggggcagtcttcacaggggcatagtccagaatcactgccttcagaaagggctcagcctcactggaaccatccccaacttctgtcaccatgcactccgctctcttgcccttgagggggccccaggcaggctggcaggctggggacagcgggtcgggcacgtgggtgggtctgggcgcggcgccctctgaacggggagccccgatgtccgcgcggcactggctccgggctcccgggcgccggcctattttcttgctgtccgctctgtggtagaccccagcttggggtgggggtcctgccgccagcaggagtccagggggtccctcgtcgagagtcgttgggtgcccactctgtcccctggcacctggaccagtgcccagtgtggagtgacgtcccatgagcaccaaagacctgccccctcccagccccaggtagaagccactgccgggcctgcacctgtgtgatgccaaaggctgtcggcattcctgcgtgggagcggccaccaactcgtccagagacagagggagctgggggtagctgtgccgaacgcctattggctccagtggagatggcgccagtctcacgaggccagagaagagacccagagccaggatccagacatggggtcctcccacggacacggcagcgttggggggtccgaggcccccacagcacctcccacggacacgacagcattgggagatctgaggccccggagcacctcctacggacacggcagcgttgggggatctgaggccccagagcccagggctgctcatggaattgggcgccaatttcccgggacccacatggcagaggcccgtggcaggggccggtggggaaactgtggcccggaggtcaggggtcctgtccacagtcaccgcctgtgtgagtctcccggggctgccataacaaagagccacgaactgggagctaaagccacggaaacgcgacccctccagcccgctgtccctgtagggcggggctgtggcaacaccacatttgcccagggcctgcgaacccgcccgcgctgtctgaggagtggccaccgacggcaccagatggaggctctccagccctccctcccgagccccggtagtgagagtgggtgctgaaaccccatcccgggccccaaaggacactggccgattctcgcgcagaaagccacaggccttgtcgcactccctcccggctggaggcgcggaatccggcctggttgttggcggtccgatctggggaccggctcttcgaggtctgtcctgttcagccccgcctggggcatagggtcttctaggtctcgggttgtggtgcggggttgccagataaatgcagtaatggcagcaaggagaaccggcatttccactgggccttttacgtctaccatgcctgttttcccatgtggccctccgactcagggcgctcacgttcaccttgggaaaaataacaggttttggttttgttttctttttctttttcttaaccacaaaacactcatcaatggttgttccgcggtatggatgagccacgtccgtgggttccttcacccggggagggacatcggggctgcggcaggtgcacatgtgcgggtcccccaggggccaggacatgactagtgcgtctccagactctggcccaaaacccagcctccatccacccctcagtggcttgaagcagctcagctggtcatgggggctggtgagcagctccgtgtgcctggcatgaggcaccagggtcagttgtgacctcacggaggaacagcctccgccacgccagcttctgtcttcctcccggtgacggcaccacagctcccccggcaccgcgtacattcctgttttggggtattttattcgcatctgcagagtagagaggaacattccagaatgtgaagacttcagaacgtggaccctgggttctggagagcaggtggcctgacttttagctgggagctggctttccagtaggtctgcatagctctgaattgattttggaagaaaccgccctgaactgtttttctcactgccctgtctgctcttgaggggtgtgtggaaagttccctgtttgagatctacaaagaaccttctctcctggtgaacacaagcgtgcatttcacacgggtggacttccagcagcagaattgctgggtcataggtcactggcatgccagctcttggtgggaccacaaaccatctttggagtggttgtgcaatagcaatacaagcttctatcaggaggatgaggccccgcttgcccat

SEQ ID NO: 134499 - DNA, 957 bp, Homo sapiens
aattccttctaggaaggaccatgaaaaagctgaatttgaggtacatgaagtatatgctgtggatgttctcgtcagctcaggagagggcaaggtgaggagagtaccagagttggcaaagaggggtgactgagagtgttcaccagaccaaatgttacttaaattactctttcaggccaaggatgcaggacagagaaccactatttacaaacgagacccctctaaacagtatggactgaaaatgaaaacttcacgtgccttcttcagtgaggtggaaaggcgttttgatgccatgccgtttactttaaggtactaagcaatgatagtacttggaaccagtctgactcacagaccatacacccaggaacactttttcctctcccttcctgcctagacttgtagcgtgcatgtgctcactccctccctctctctccccatctccttctcattgaaggtaatgtaaaagagcaatcctaagcatgatttctgcctgagggtaggagctattttaaaatatgagcaaaatggtaagacttgatggggagttaaagatacctctgaatatcatcttccctgccagagcatttgaagatgagaagaaggctcggatgggtgtggtggagtgcgccaaacatgaactgctgcaaccatttaatgttctctatgagaaggagggtgagttccaaaaagagcttcactttggattccctgattataagatatccttcctgtaagttcagaagagctaagtatgacaaaggaactttttatcaaaacacatcttcatttttgccataggtgaatttgttgcccagtttaaatttacagttctgctcatgcccaatggccccatgcggataaccagtggtcccttcgagcctgacctctacaagtctgagatggaggtccaggatgcagagctaaaggccctcctccagagttctgcaagtcgaaaaaccc

SEQ ID NO: 134500 - DNA, 407 bp, Homo sapiens
cttttgctcccttgaagatctatcctggctataacccagtctaagccagaaatctcagagccctgtgtttccataaccaggtagttgtctcactgcctaccacttcaaactactgaagtgggtggatttggaaaccttttgggatactggatagcttgttccataggttgtgtactatctacaggtatgctgtcacaccagttgaagcagcatgtcatcgatggagaaaaaaccattatccagaatcccacagaccagcagaagtaggtgccaaccctacttattaccttctaccacacaagactagtcatcaggtttttttctatactcccaactgaatcttgtccgccctctactccatgttttcaggagtggacctgtgctcttaatattccctttctctaggc

SEQ ID NO: 134501 - DNA, 2729 bp, Homo sapiens
gagagaccacgcttcccctcatgctcctcaacggctccgccttcccgccggagcctgacccttcccagagtgcccggcgattgcggcgtgcgaggcccttggagggcaaggccccagggcctggcttaggagcgcgagaggcaggctgggaattgtagttcgaaggccctcgagagcggctagagtctggcggccgagaggactagttgtcccagcgtgccctgcgcctcagcccgcgcgctcgcagcttctcgctctcgcctgcctgcccgctcccttgcttgctcgcgctttcgctcgccctctcctcgaggatcgaggggactctgaccacagcctgtggctggggaagggagacagaggcggcggcggctcaagggaaacgaggctgcagtggtggtagtaggaagatgtcgggcgaggacgagcaacaggagcaaactatcgttgatgttctctggtcgtgaccaagtataagatggggggcgacatcgccaacagggtacttcggtccttggtggaagcatctagctcaggtgtgtcggtactgagcctgtgtgagaaaggtgatgccatgattatggaagaaacagggaaaatcttcaagaaagaaaacggaaatgaagaaaggtattgccttttcccaccagcatttcgggtacaatcaactaacctatcgtcacttctccccttttgaaagaagcgacccaggattatattcctccaaggaaaggtgacttggttaaaaattgaccttggggttccatgttggatgggcttcatcgctaatgtagcctcacactttttgtggttgatgtagctcaggggacccaagtaacagggaggaaaggcagatgttattaaggcagctcacctttgtgctgaagctgcccctacgcctggtcaaacctggaaatcagaacacacaagtgaccagaagcctggaacaaagttgcccactcatttaactgcacgccaattagaaggtatgctgtcacacagtttgaagcagcatgtcatcgatggagaaaaaccataattccagaatcccacagacaagcagaaagagggcccatgaaaaagctgattttgaggttacatgaagtatatgctgtggatgttctcgtcaagcctcaggagagggcaaggcccaaggatgcaggacagagaaccactatttacaaacgagacccctctaaacagtatggactgaaaatgaaaacttcacgtgccttcttcagtgaggtggaaaggcgttttgatgccatgccgtttactttaagagcatttgaagatgagaagaaggctcggatgggtgtgggtggagtgcgcccaaacatgaactgctgcaacccttttaatgttctctatgagaaggagggtgaatttgttgcccaggtttaaatttacggttctgctcatgccccaatggccccatgcggataaccagttggtcccttcgagcctgaacttctacaagttctgagatggaggttccaggatgcagagctaaaggccctcctccaggagttctgcaaagtcggaaaaaccccagaaaaagaaaaaaaaagaaggcctccaagactgcaggagaatggccactggtggcattctctgcagtcttggaaacatttagaagaaaatggaagctggggggacttgaggtgggtcccatctccccagcttgctgctcctgcctccatcccccttcccaccaaacccccagactctgtgaagtgcagttcttcttctccacctaggaccgccagcagagggggggggattccttggcccccaccccagttccccaacccactcccttccaacaacaaccagctccaactgactctggtcttgggaggtgaggcttcccaaccccggaagactactttaaatgaaaaaaagaaattgaataataaaatcaggagtcaaaattcatcgtcttcaaggcccctctttctagccttttctactactctctgcttggtcaaggtttgtgccccactacagaacaggggctaaattagccaccaccactgaaaactcagccgaatttttttataccactctgatgtcagcattttttccatctgtttggggctttttcctcttttttccattctccccaaatattttatctggcttcaaaattaagaggattatttttcagattgtttttattcagtgtggccgattcctcatctgattcaggctgtccagtcaggccccctccccattttgggacctggagccttcatttatgaagagattctccatcctatgaaatggatcctcatttgtaaatcttttttcttcccattttcaccaaagctgtaaagaaataatccatctcaaaccttacccttttttctctggagtcagtggggtctttcctcgctccatcttacacagaccctgagctggaagcctcaacctggttttgttcccctgtttgaaatattgtgatctccctcccatgaaagaaaaaccaagaaccagaggcgtagactgactgaagacacaactcctggctttctgaagctatggacttggattggattgctgggggtttgtagagaaaggtgacaaatttcagtacctctggcatgctgtcccaggaaactagggctcccactaacttatgaggtttttaaacacattgaaaatgacatgacattaaaataaatttggatatgctcataatgaaaaaaaaaaaaaaaaagtcgacc

SEQ ID NO: 134502 - DNA, 3969 bp, Homo sapiens
  misc_feature (1)...(3969): n = a,t,c or g
atgccgctggattctggtgcaccaaaaccgggactgtcacatgatccttttgaagtgctccgccgagatagtgttgataagacctctcgggtatggtcaggccttgaacgttaccaggagctgcttactgaggacgcactgggtgatctcatcccttcttttctactgactggtcaacagacaccggcgctcggccgaagagtatctggtgtcatacaaattgccgatggaagtcgccgtcgtaaagctgctgcacttaccgaaagtgattatcgtggtctggctggcaagctgcatgatgagcacatgcctgcattatccagattgggtaacgattatcgcccaacaagcgcttatgaacgtggtcagcgttatgcaagccgattgcagaatgaatttgctgaaaatatttctgcgctggctgatgcagaaaatatttcacacgctgatgacacatcaatctacatgttttatcaaaaggtcggcgacaactcaatcgacagctggaaaaacgcgggccgtgtctttaaagacagcgataagttcgacgccaacgatccgatcctgaaagatcagacgcaagaatggtccggttctgcaacctttacatctgacggaaaaatccgtttattctacactgactattccggccggaaggcgaagataaagccgtcacgacacagagagaaagagcgccttttggtgccaaagacgagcaggccgagcaccacaagggggcggggttttatcggggaacgggggaaggcccaccccaaaccccgaagcgggaacggcgcaagagcaaagcggcacgccgagggccacagacccaaaagcgccagagataggcaaaagaggcaacggacaaagcagaggcagaaggacaaagacgcacccaaaaagccaaaacgagacggcaaaccccacagaggaagacgacaggcccagaggaaaggcgagagggaacacggcgcgacacaaaacggaaagaaaaagggcggagaagaagccaaaggcacaaggacacacgcgaagggcaaagcaacaggggcaacaacacagcgaagcccaaagccgcaaaggcaaccggacaggggacaaagggaaaggcgcagggccaaagccccaacggcacagggcgaggcgggaaagccagacagcaaacagcgcaagggagccagcagcaagcgcccaacagccaacagaggacaaggaaacgggacaacggcgaggcgcgaacagggcaacagcagaaacgaggatacgcggcgaaagcggaccaggcacaaaaggggagaaggcggacaagcgcaaagacagggtaaacacgcgcaggaccaccaaacggcgaacaagaggccaaagcgacgcaaaacgcgcgaaaaaaggcatcacgcggcgggagacgcgacaccgggcgcgccacaggcccaacgccgaccacggcggacggagcagcaacgaccacggaccggcgccaagaacgacaataacgaaacgacagcagcgccactcgacacccacgcgacgaagacgacgacaccacgcaacaacgggagcgcacgaaagcaccgacatacacgacgagactctcgagtgatccctcatttggccagtgtgggcactaataaagatgaggaagaggaggacgagtgggaaaaactaacttcagattctgagtgtgagaaacagctaccggaggagattaatgaaaagaaaggaaaactaaaaaaagtatgttttactagcccatcagctccacctgctgaattaagtgaatggccacctcctctgtgccccttactggagaagcccgggacggccatgtgcgtgggctgcgggagtcagatccacgaccagtttatcctgcgggtgtcgcccgacctcgagtggcacgcggcctgcctcaagtgtgccgagtgcagccagtacctggacgagacgtgcacgtgcttcgtgagagacgggaagacctactgcaagcgggactatgtcagggagaaggccatccgcatcccgcacgggtgccgcagcgctcccccgggcccgggaatgcccgcaggcgggtcaccgcagtctcctggtggccacaaagtgtcctgggcgcgcgccggagcccgtacagccagggagatgagggcggccgcaggcccagcgctgacaccggcgcaccttgggcccgcaggcttgttcgcatcaagtgcgccaaggggcaggctgctccttcatgagagcgtcgggccgcgggttggcggcgtagcaggtccgcagagtgtgcagctgcttctcgttcagcacagtccgcacgcgggtcgtcttctccgtctgcttgtgcacgtgcgggcgcaacgcgggctgccggcccgacccagcgtctgccaggacaggacaattgtggcaattaataaagacccagaagctccaattttccaagtggcagattatggaatagttgcagatttatttaagacaattgtggcaattaataaagacccagaagctccaattttccatgtggcagattatggaatagttgcagatttatttaaggcccgcttgcttcttttcacgttcttgactgaattccatgtggtcacagttggaggaaaggtccctctggcgcgtcaggcgctgcaaaacgatctcaacgtgatgctgttttccgataacgtctcagttgaagatgaactggcgctcaagcaactggcccacgaaaaagggctgctgatgatggggccagactgtggcacggcgattatcaacggcgcggcgctctgttttggtaacgccgtgcgtcgcggcaacatcggtattgttggcgcatccggcaccggcagtcaggagttgagcgtccgcattcatgaatttggcggcggcgtttcgcaactgattggcaccggcgggcgcgacctgagcgagaaaatcggcggcctgatgatgctcgacgccatcgggatgctggaaaacgatccgcaaactgaaatcattgcgcttatctccaaaccgcctgcgcctgcggtggcccgcaaagtgctggaacgtgcgcgcgcctgccgcaagccggtggtcgtctgcttcctcgatcgtggcgaaacgccagtggatgagcaggggctacagtttgcccgcggcaccaaagaggcagcgctaaaagcggtgatgctctccggcgtgaaacaggaaaatctcgacctgcatacgcttaaccagccgttgattgcggatgtgccgaaaaccgccgactccggcagccagcgcattaatagcggcaccagaatcaacggcaccacaccacctacccaaaacaccgtttgccatgctaagtttgcccccgcgaaacccagtgtcgccgccagcgccgcgccaatgggaacaccgcaatacatcaggctcactgccgtcccacgaaaacgtggacccgcggcttcagacgtcagggcgataagattcggcaacgccgcccccaggccgacaccggtcatcagccgcgcaaagaccaggacgcgacaccacaccactagcggctccacgagccgcagacgtcgacgccgcgaggcagcggagcgacacgcgacaatgccgcaaggatcgagcatacgagctagcgactctatacacagagaacgcaaacacgccgataggacgatcgggaaaccgcgatcaccacattccaacgaaaccagaagcgaccacgcgacgtcggtctcccaggcatcgacaacagacacccgctgcgaaatgcacggctacggcgcctcggccaacgccagagcgaatcaatcagcacacaacagccacgaactcgagaccacacacatgctcgtccangaagagccacacagaagccgcaacgctaggcggagcatctggcctgaccgtacgtcaacacgcggccacacgtacacaaccgagccacgaaccgcgtgggccgaccgtgcgcgcaagacggcacgacaagcgacacgctag

SEQ ID NO: 134503 - DNA, 2834 bp, Homo sapiens
tcagccaggagccaagaacccaacaaagaggggtttttgccatcttgttttgaggcccagtttgatgaacaatttagccaggttcttctgggggagggggagtatcaatgcatagtggactgtcactggaatattctgggtcctaatcagcagctgcccagagatggggtctgagtgtataatgggcaggtacggctgaacagaaacagaggtgcctccaccccaggcaaggcagtttcccccaggtagccataggcctgcagcacagatccgtagaccaggctgggcctctgggtgctgtgtggccttgccccgctcctcccctctctggatcttcacttcctccctatagaaagaggaaactgggctggatgggctatttgtaaatatttgtccagacctagaaattcgtagaggggaacataaaccgaaatggtgcagtacagatccacggtatatatgggtcgggatcaaatggagatgtgaaatgggagcaagcgggtattcagtgcacccccatctgggatctcggagaggctcccctttgtttgtttcgggcttcagggtgcaggctctggaatcagtcactgtttccccgggatggagagaacctggggccaagcgaggagagtgccagcggctgctcagcaccttggtcggtgggaggccactgggctggggaacctggagccttgaggaaggagacaggggccgaagcccaagggcgggcaggaaggaactgttgcaagccctggaggcccgtccataaccgtggatgagtcttctacacatgtggcctggccctgtccaaatgggctctgaaggaggggaagggccctcgtaggcccccggcatattcgcacctcccacccagtcccctgggcagcgcctcgccctgggtccacgtcggtccctttccctctccagagtcctgggcaagcctctttcctcttcctctgaaactccgacttcttccggagggcttcgctcgttccgagggtcctgcgactggaggaggcacatccctgagcagccactccctccccgcagcggcctgtcgccgagctcccgcgccctgcttgagctcgggagagatcgctgcggggcagtccggcccgggagcgagagaaagaacgaaaatgcacagctctctccgagtaaggcgaacagatggagaggaagacgaacagttaaacgaaacaaacagaataaaacagaaacgaaatcgggccccggggggctgggccacccggagacgctgggtcgggccggcagcccgcgttgcgcccgcacgtgcacaagcagacggagaagacgacccgcgtgcggactgtgctgaacgagaagcagctgcacactctgcggacctgctacgccgccaacccgcggcccgacgctctcatgaaggagcagctggtggagatgaccggcctgagcccgcgggtcatccgcgtctggttccagaacaagcgctgcaaggacaagaagaaatccattctcatgaagcagctgcagcagcagcagcacagcgacaagacggtgagcagccgctgggccggaggctcgagtcgggtgggggctgcgcttccgccgcggtatctgcgtgcccttttctgggcgagccctgggagatccagggagaactgggcgctccagatggtgtatgtctgtaccttcacagcaaggcttcccttggatttgaggcttcctattttgtctgggatcggggtttctccttgtcccagtggcagccccgcgttgcgggttccgggcgctgcgcggagcccaaggctgcatggcagtgtgcagcgcccgccagtcgggctggtgggttgtgcactccgtcggcagctgcagaaagatccccagtggagaaagagggctcttccgatgcgatcgagtgtgcgcctccccgcaaagcaatgcagaccctaaatcactcaaggcctggagctccagtctcaaaggtggcagaaaaggccagacctaactcgagcacctactgccttctgcttgccccgcagagccttcagggactgactgggacgcccctggtggcgggcagtcccatccgccatgagaacgccgtgcagggcagcgcagtggaggtgcagacgtaccagccgccgtggaaggcgctcagcgagtttgccctccagagcgacctggaccaacccgccttccaacagctgggcttgctctcagctggcggccggtccccaagggacactttccgactcggagcacgcggccctggagcaccagctcgcgtgcctcttcacctgcctcttcccggtgtttccgccgccccaggtctccttctccgagtccggctccctaggcaactcctccggcagcgacgtgacctccctgtcctcgcagctcccggacacccccaacagtatggtgccgagtcccgtggagacgtgagggggacccctccctgccagcccgcggacctcgcatgctccctgcatgagactcacccatgctcaggccattccagttccgaaagctctctcgccttcgtaattattctattgttatttatgagagagtaccgagagacacggtctggacagcccaaggcgccaggatgcaacctgctttcaccagactgcagacccctgctccgaggactcttagtttttcaaaaccagaatctgggacttaccagggttagctctgccctctcctctcctctctacgtggccgccgctctgtctctccacgccccacctgtgtccccatctcggccggcccggagctcgcccacgcggacccccgccctgccccagctcagcgctccctggcggcttcgcccgggctcctag

SEQ ID NO: 134504 - DNA, 276 bp, Homo sapiens
tcaagggcgaacgagaattactccagcgcatgcacaagtgtgaaacaccagactgggatccaaaagtctgcttgtcactgagccgtaagttaaccagcggcagagctgagaacagataggaccaaaatgtgatcctacaagcagcagccgtcggtgaagacagtcaggacatctctggtcttcaaggctctggccttcagtttcatgcaggtccacagcctggaggtagtcgctgacctcactaccccctggtccccatgtcaaacagcagctcat

SEQ ID NO: 134505 - DNA, 387 bp, Homo sapiens
atgggacacatcttcatgaagtttgaggacaccaagatcaagacaggtctccacacgacccagaaggaaaaaagaaaagctcccatccaagggcatgttctcttcagtatccctgcctcaggtgctgacacagagacatcaaagaccaacctgctcctggtcactgtgttggcagccacaacacctgatattactgaggagttaaatctgatctgcagtagatcaatgtctctgcggtctctaaatcatcagcttacttcatgcattttatctgacagaaggacaaatcggcaattcgagagacttaaagaattattaggtgattctttaaaaggagaagccaaagcaagcacacagaacattcatgtgtcagttagtatttactga

SEQ ID NO: 134506 - DNA, 1167 bp, Homo sapiens
tcaagattgctgcagcagggcatcaaactgcatgcaggtacttctgagcagaccacgtggcctccaggtctctccgctgaagacggccttgccctggctcctgatcctcttgcagtgggcctcgcgctcccgctccagccggcccttcgtgctaaactgcagggcagtgctctgttcctgaggacgcgcgtggccggcacctcccacctcggtgactccgagactccgcagccctgcggagagcccacgatggccgtctgcagaggagcgatcctctctcccttccgagggaggaggccgggctacgggtgagtaagctgctgcgggccccgtgccccgccgggtgtgaacggagatgcgctgcgcagtgcccgtcctgcgcagctcccagcttagagaccgcagagacattgatctactgcagatcagatttaactcctcagtaatatcaggtgttgtggctgccaacacagtgaccaggagcaggttggtctttgatgtctctgtgtcagcacctgaggcagggatactgaagagaacatgcccttggatgggagcttttcttttttccttctgggtcgtgtggagacctgtcttgatcttggtgtcctcaaacttcatgaagatgtgtcccattttcatcctttctggtaatctaagtttcttaaatctaaattcccttgccttttctttagggctcagtgacaagcagacttttggatcccagtctggtgtttcacacttgtgcatgcgctggagtaattctcgttcgccagggatgaggtcccctggggctaaacgaatgaacagtttttgaaaagcagaagctacgtccagggggtttctgggcctcaaattgcgcagacttgcggtgctggggagacgttttgcctgcaggcagcaggctctgaattgccctttagctcccgacaatcgcgtccaacgggaagcagcctgagcatccatgagtgcaggagcgtccaccgtgcagtagacactgcccagcaatgcaacgagcggcatgcagcggacactgcccagcaatgcagcgagcgacatgcagcggacactccccagcaatgcagcgagcggcgtgcagtagacactgcccagcaatgcagcaagcggcgtgcagtagaccctgcccagcaatgcagagagcgacat

SEQ ID NO: 134507 - DNA, 1208 bp, Homo sapiens
ctgctcggaattctcgcggcgaaccacgcgtccgcggatttcctcatgcaggggcgtgtgctctggaggagatttagcccaggtgacagccctgaggaggttggttcctgcttccttgccctggctggatgggaggccccggccctggagggagactggccaggcagccagtgttcggagagctggaggcatggtgtccccttcctgtgtgacctgttgatggggaaaaggagagctggaaacttacaggtcataggtggatttccagtccggacactgcctgccattctccccagggaagggaagaagcggggctctggccaggactgcagggtcttggcagctccagggaacctagggtgcacctggcacttagcctctgtgaacacaggtttcctcatctgcactgggggcccattaactgcaataaccacagggctgttggacattaacgtaagcaaaatgtctagcacagcaccttgcagaggcgttcgagcattataacgaatggcatccgcatagtgcgctgggttatcgctcgccacgggaatatctgcggcagcgggcttgtaatgggttaaatgataacagatgtcttccagcgaatttttgaccgcaacaacccgtggcataacgtcaacggcagcaacttcccctacttcgacagcctgcaatttgccgataacgtgaaaaagtggctgtcgaggagctgctgttgctgttccgcgtcggtcctgctcctgcgcgcgtcgtccaggcccgccaggtcgccgaccagtctctagggcgtccatcgcgggacccacgggaggcagaagtggaggccgtgcgcaccgcgagctcaacacagttgggggccaggtggccgcctcccagcaggttgtcggggttgagctgggtcttgtgctcatcgctgggcttgtagtgcggtgccggtcctcaaggatggggccgaagagatccttgaacacgtcgtaggactcctcgtcggccgccacgcggcccacggccgcgggtctggatggcgcctccagcgcgaagccacccctggcgcgcagctccgcgttcagctggggcagcgcctcggccactgggtcttggtggccgctcaggtcgggaaactcgtcctgcgccgggaggcgagcttcagcgccccgcggctgctgggcctccattgatgtcgtgtggctggagggtggtccttgcat

SEQ ID NO: 134508 - DNA, 958 bp, Homo sapiens
cgggaattgttcgctttagtgccggcgccatggggtcggagctgatcgggcgcctagccccgcgcctgggcctcgccgagcccgacatgctgaggaaagcagaggagtacttgcgcctgtcccgggtgaagtgtgtcggcctctccgcacgcaccacggagaccagcagtgcagtcatgtgcctggaccttgcagcttcctggatgaagtgccccttggacagggcttatttaattaaactttctggtttgaacaaggagacatatcagagctgtcttaaatcttttgagtgtttactgggcctgaattcaaatattggaataagagacctagctgtacagtttagctgtatagaagcagtgaacatggcttcaaagatactaaaaagctatgagtccagtcttccccagacacagcaagtgggatcttgacttatccaggccacttttcacttctgctgcactgctttcagcatgcaagattctaaagctgaaagtggataaaaacaaaatggtagccacatccggtgtaaaaaaaagctatatttgatcgactgtgtaaacaactagagaagattggacagcaggtcgacagagaacctggagatgtatctactccaccacggaagagaaagaagatagtggttgaagccccagcaaaggaaatggagaaggtagaggagatgccacataaaccacagaaagatgaagatctgacacaggattatgaagaatggaaaagaaaaattttggaaaatgctgccagtgctcaaaaggctacagcagagtgatttcagcttccaaactggtatacattccaaactgatagtacattgccatctccaggaagacttgacggctttgggattttgtttaaacttttataataaggatcctaagactgttgcctttaaatagcaaagcagcctacctggaggctaagtctgggcagggggctg

SEQ ID NO: 134509 - DNA, 3383 bp, Homo sapiens
tttttttttttttttttgccgggttgtttgttttttaatggtttagggttgttttattttaatcttgtccttcagaggtgatatgaatacctagaaatgttacaggaaatagactaaatgaataaaacagaatctagaacacacagcaagtgcagtggtatgaaccggttgtgcaccaagggctggaaggaagttggctcgggctagcgtttgttcagtgctcgccatgggagcactttgcctgctctccaactaccgggaacaccgacagtggtccgtggacaattctcagaccaaggaggcctgcaccagcatgtcaggaacctccaaggagagtctggggcatggggggctgccagggttgggcaagacctgcttaacaaccatggacacaaagctgaacatgctgaacgagaaggtggaccagctcctgcacttccaagaagatgtcacagagaagttgcagagcatgtgccgagacatgggccacctggagcggggcctgcacaggctggaggcctcccgggcaccgggcccgggcggggctgatggggttccccacattgacacccaggctgggtggcccgaggtcctggagctggtgagggccatgcagcaggatgcggcccagcacggtgccaggctggaggccctcttcaggatggtggctgcggtggacagggccatcgctttggtgggggccacgttccagaaatcaaaggtggcggatttcctcatgcaggggcgtgtgccctggaggagaggcagcccaggtgacagccctgaggagtgggtaaaagaggaggaggtctgtttcatgcctccagttcccccagctccgggggcagcaggacagagcctgcagaaggataagggggagctgtctgccgagcaggggatctgggccacattgatgacgctggtgatcatggtgacagcggcaaataaagagcgagtggaagaagagggaggaaaaccaaagcatgtgctgagcaccagtggggtgcagtctgatgccagggagcctggggaagagagccagaaggcggacgtgctggaggggacagcggagaggctgccccccatcagagcgtcagggctgggagctgaccccgcccaggcagtggtctcaccgggccagggagatggtgttcctggcccagcccaggcattccctggccacctgcccctgcccacaaaggtggaagccaaggctcctgagacacccagcgagaacctcaggactggcctggaattggctccagcacccggcagggtcaatgtggtctccccgagcctggaggttgcaccaggtgcaggacaaggagcatcgtccagcaggcctgaccctgagcccttagaggaaggcacgaggctgactccagggcctggccctcagtgcccagggcctccagggctgccagcccaggccagggcaacccacagtggtggagaaacacctccaagggcagccctgctgaagggcgctgtggccccgggcttctctcggagggacctggtgtttcctagcatcttctgcgcctgcctagggatctccatccacatacaagagatggatactcctggggagatgctgatgacaggcaggggcagccttggacccaccctcaccacagaggctccagcagctgcccagccaggcaagcagggcccacctgggaccgggcgctgcctccaagcccctgggactgagcccggagaacagacccctgaaggagccagagagctctccccgctgcaggagagcagcagccccgggggagtgaaggcagaggaggagcaaagggctggggccgagcctggcacgagaccaagcttggccaggagtgacgacaatgaccacgaggttggggccctgggcctgcagcagggcaaaagcccaggggcgggaaaccctgagcctgagcaggactgtgcagccagggctccggtgagagctgaagcagtaaggaggatgcccccaggcgccgaggctggcagcgtggttctggatgacagtccggccccaccagctccttttgaacaccgggtagtgagcgtcaaggagacctccatctctgcgggttacgaggtgtgccagcacgaagtcttgggagggggtcggtttggccaggtccacaggtgcacagagaagtccacaggcctcccactggctgccaagatcatcaaagtgaagagcgccaaggaccgggaggacgtgaagaacgagatcaacatcatgaaccagctcagccacgtgaacctgatccagctctatgacgccttcgagagcaagcacagctgcacccttgtcatggagtacgtggacgggggtgagctcttcgaccggatcacagatgagaagtaccacctgacttgagctggatgtggtcctgttcaccaggcagatctgtgagggtgtgcattacctgcaccagcactacatcctgcacctggacctcaagacgggccctaaggagaagtactgcttccagcaagtcaaatacttggattttatcaatggcgagacaaaagaggcaaggccaaatcgggctggtcttaatcccgaacggtctgtggggccccttctccactcgctggagtgcggggcggtgggagagagcaggggctacaaggagggtcgacccagtgccggcgccatggggtcggagctgatcgggcgcctagccccgcgcctgggcctcgccgagcccgacatgctgagggcctacttcaagaaaaacttctcggccgtgagcttgaatgagatggcaagaagggcgatagcaaacggcgatggcacacgtccctgggaacagccagccctgtccgtgggtagaaaaatgagccagggagaactttccgttcattccgccaacgcctactgcagtcgggtttatagcggggaacccgacaacgaggcgcagaccccgctgtctgcttatttaattaaactttctggtttgaacaaggagacatatcagagctgtcttaaatcttttgagtgtttactgggcctgaattcaaatattggaataagagacctagctgtacagtttagctgtatagaagcagtgaacatggcttcaaagatactaaaaaggattctaaagctgaaagtggataaaaacaaaatggtagccacatccggtgtaaaaaaagctatatttgatcgactgtgtaaacaactagagaagattggacagcaggtcgacactaagaattttgaaattgcttttgataattttctgtcagaaatggagaaggtagaggagatgccacataaaccacagaaagatgaagatctgacacaggattatgaagaatggaaaagaaaaattttggaaaatgctgccagtgctcaaaaggctacagcagagtga

SEQ ID NO: 134510 - DNA, 1640 bp, Homo sapiens
atgcgcagaccaagcacgccggctctagcggtggtggtctttgctaggtctggaggtagagcagatgctgaggcgttcaaaggaaggcggtgcctgtggacaagcaggcttgcacaggatctggcccgtgccgaccagggcgccaggaccctgaaagtctcgtcccagggattgggagtggggcacattgtagaatctgtgtttggagcaggtcaaccatcagatcgggtacctgaggtgagaatgcaggtctgcgagcccctaggaccggaccataacgaccttaacagccataacggccgtaactgccataacggccggctgcgcgaggcccttccagcatttccactttcgtcaggtactggagagggctgccggccggatgccagggcagaggggcagggcggacggctaggagttcaagaaacatcctggtctgagggaaaggctgcagcctgcaccgccatgaataagcttttcagcttctggaagaggaagaatgagacccgcagccagggctacaaccttcgagaaaaggatttaaagaaacttcacagagctgcttcagtcggggatttgaagaagctgaaggaataccttcagatccaagaaatatgatgtaaatatgcaggacaaaaaatacaggacacctttgcacctagcctgtgctaatgggacatacagattgttgtacttttttcctaatttgaggcaacaatgcaaaataaatgtccgggatagtgaaaacaaatccccattgattaaggcagtacagtgtcaaaatgaggattgtgcctactattcttctaaactttggtgcagacccagatctgagggatattcgttataatactgttcttcactatgctgtttgtggtcaaagtttggtcattagttgaaaaactggcttgaatacgaagctgatcttgaagcgaaaaataaggatgggtataccccactattggttgcccgttattaacaattaatcccaaaattggtaaaatttcttctggaggaaaggggctgatgtgaatgcttcagataattatcaaagaacagcccttattcttgctgtcagtggtgaaccaccatgtttagtaaagcttcttcttcagcaaggtggggaaatatgtaacgaagggaatggtggattcacagctgaggaatatgtttatttccatggttttactgcatagatacccacaattcactgcgagccatggaaagtcagaaacatgctaaatagacaccttattcttggcactacatgtgactaaaggaagatatggaacccatttctacaatttctttgccgcttccttgaattggaaaaatggtactttgcaaggaaccgttaaagtgaactatgataatatttttgctgactacccagttgaagaaaaagtttcgttaattggatgggattttttttttttttcacgttagaagaatgaatgaagaaattttaaaagataaacatcctatattgtgaaccatcagctgaaaagataaatttgtgttcaatatataggcagaaaaaaatttgtgtcaaaatgttgaatggaataataatgaggaaactgtgtgttaggcatgtattaaaacatttaaataaaataaaaatacatttcaaaaaaaaa

SEQ ID NO: 134511 - DNA, 954 bp, Homo sapiens
ctacacaatatccttgccaagatgttgaacgtgaatcttctcatgagcagacaaatctagactgtggctagttttcaaaagaaatggcctggtttcttcaaaactgtcagcgtcttgaaaaccaaaattaccaatggggcgcccccctcctcctgtcccctcagtctctccagggccgctgccagggagcttggcgatcgcgccacactctctggagccccaccttgtgcaatcttcctgcctggtagttccgccaaaaacaaaacagtcaaagcgcaaacctggaaggggcgcgcaggcaccaactttgccaaacgctacagagttttccgtttgcagaaatgacccaaaagaaggggggcgccgctccccgtgattccccaatcggcttctggagccagaggctcctcctcgcccctcggcgggagaaagcccgcggccggctgctgctgcccgcttccctgctccgaggaaaaacgactccacaactttgtgcgcgagagaggctcgctccttcggcggctcctcctcctcctccccgctgcgggcctgcccctttgttggagccgagcgcatggacgcctgaattggcaaggagagctgcttagagaactggtaggggcagccagctgatgcgcagcccagagtgtttggtgagggagcatctgtggtggagcacagccagggatagccatctctgtaggccccactagctcccacaggagactttagtcctaggggaactgtcagacttgaactctgcagggtggtcttgcccattagactggactggtctgacctgaataatccttggtcttctggtcccttctggaaccccaacctggcaatgtctgcttgcagggcagcctcgggtgccctgggggcccactctatagcttttgcactggtggaccatgcctgactagtggagagctgcagtggggtggtctccat

SEQ ID NO: 134512 - DNA, 1039 bp, Homo sapiens
acatggatggagttgagagccattatcctcagcaaaccaacgccagaacagaaaaccaaacaccacatgttctcacttataactgggagctgaataatgagaacacatgtacacatggcaggaaacaacacacactggggcctgtcaaggtaggtgacttggggcgccaagttcccgacgcggtggccgcggtgaccgccgaggcccggcagacgctgacccgggaacgtagtggggctgatcttccggaacaaagttgctgggccggcggcggcggggcgagagcgccgagggggagccggagcgctgcagaggcgcgggccggagggctggcgctgatctgcacccttctcatctggagagcggacccctggctgcccggaggcgagccccttcccggggggtgggggcggcaacgcgcgacccagcggtcctgcgccccaccctccctcctccgcctccagcgctcggctccaacaaaggggcaggcccgcagcggggaggaggaggaggagccgccgaaggagcgagcctctctcgcgcacaaagttgtggagtcgtttttcctcggagcagggaagcgggcagcagcagccggccgcgggctttctcccgccgaggggcgaggaggagcctctggctccagaagccgattggggaatcacggggagcggcgccccccttcttttgggtcatttctgcaaacggaaaactctgtagcgtttggcaaagttggtgcctgcgcgccccttccaggtttgcgctttgactgttttgtttttggcggaactaccaggcaggaagattgcacaagttggggctccggagagtgtggcgcgatcgccaagctccctggcagcggccctggagagactgaggggacaggaggaggggggcgccccattggtaattttggttttcaagacgctgacagttttgaagaaaccaggccatttcttttgaaaactagccacagtctagatttgtctgctcatgagaagattcacgttcaacatcttggcaaggatattgtgtagat

SEQ ID NO: 134513 - DNA, 935 bp, Homo sapiens
cggcgcggggctgaaggctagcaaaccgagcgatcatgtcacacaaacaaatttactattcggacaaatacgacgacgaggagtttgagtatcggttagtgctggcgcgggagcaactagcgacgggtcgtgagctttggccgctgagggcacaaggaattagtaacaggaactgaggcgatagaattggcgcatgcgtacgagacatgtcatgctgtcccaaggaccatagccaagctggtccctaaaacccattctgatgtctgaatctgaatggaggaatcttggcgttcagcaagaagtcagggatgggtccatttatatgatccatgaaccggaactcttaacattttggctgttcccggcgcccacttacccaaggaacccaaagaaaatgaaagctgggcaagctaacttttcaagccttcaagcttttacaccagctgtcccttacttcctaaacatctttctggataacatttatttatgttggccttcttgttttcttcacttttggatattttaaaagatgtttcaattacactggtttgaatggtgctgggtaactggctttgccttccttaagtagagcccacccacccacccatagccccagcccagatggaggtgctctgtgggggcccacagccctaaagctgaggtgtgaccccccagaagcccacgatgtgcttctgtatccaggaacacacttgggcaggatgggagggaaggcatctggagtttggaggaccatgggctgtttacaggggttcatgttaaacttgctgtttttgttttttcctgccgggtgttgtatgtgtggtgacttgcgggatttatgtttcagtgtactggaaactttccattttatttcaagaaatctgttcatgtttaaaagccttgattaaagaggaagtttttataaaaaaaaaaaa

SEQ ID NO: 134514 - DNA, 467 bp, Homo sapiens
tcaagcacaggtgagaggcagagaatccatccacctgtttctgttctctcctgcttagctccagggatggaactgggactgggatagaggaaaggtgaactcctcattaaggaaatgaatgtttggtttttgtcctgagtcctaaagccaggagggtcatactctttcgggtctcccagttgtaactcttctcattgacttataggattccagaaatggaaggatgtgccttgtgaagacaagttctcctttgtctgcaagttcaaaaactagaggcagctggaaaatacatgtctagaactgatccagcaattacaacggagtcaaaaattaaaccggaccatctctccaactcaactcaacctggacactctcttctctgctgagtttgccttgttaatcttcaatagttttacctaccccagtctttggaaccttaaataataaaaataaacatgtttccacta

SEQ ID NO: 134515 - DNA, 1404 bp, Homo sapiens
gtttcccatggatgtgactctctcctagggaatgctataacttttaaattaagaaaagcacttgttcagagaaatgaaagacacaaaaagattcaggaaaataccaggcacagaaagataaataccacatgttctagctcaaatgtggaagctaacaatttagatctcatagcagtagagagtgaaatagtggttactatagtcacagaaggggacggagaagacagcgaaagcttggttaaggaatacaaaatcctctttcacaaacagcttggcaaactgtgcaagtcaaagatgggctttgtcctttcccagcagcaaccagatgtcagttctcatgccctgagcagcccagaagaagcagagacttccaggaatagtgatgatggtgtgaaggaggactctgggagaggggcaagattgttgatttgcctcttaagcaagagattcattgcagctcagcatggctcagaccagctcatacttcatgctgatctcctgcctgatgtttctgtctcagagccaaggccaagaggcccagacagagttgccccaggcccgggatcagctgcccagaaggcaccaatgcctatcgctcctactgctactacttttaatggaagacccgtgagacctggggttgatgcagatctctattgccagaacatgaaattcgggcaaactgggtgtctgtggttcacccagggccgaggggtgccttttttggcctcaactgatttaaggaggagtgggcacttgatggactttcaatgtcttggatttgggcctccaatgacccccaaaaagaacccgccgctgggcactgggagcagtggggtcccctggtctccttacaaagttcctgggggcattgggagcccccaagcaggtgtttaaatcctgggctacttgtgtgagcctggaccttcaaagcaccaggatttccagaaattggaaggatgtgccctttgtgaaggacaaggttctcctttggtctgcaaagttcaaaaaactagagggcaggctgggaaaatacaatgtctagaactgactccagcaattacgaacggagtccaaaaattaaaccggaccatctctccaactcaactcaacctggtcactctcttctctgctgagtttgccttgttaatcttcaatagttttacctaaccccagtctttggaacccccacacaataaaaataaacatgtttccactattgtgctgtcttactgtgtctgctatttccacagctgatgcctgggtggttgagatgagagtgattacaacaaagcttgctctggcctatccacttcttaaaagtccatccgcataccatgcatattggaattcagtatttatgaacatatgtggctttgcttatgacaaggttaacaagatgga

SEQ ID NO: 134516 - DNA, 322 bp, Homo sapiens
acgaggcagatctctacgaacttgtacagtatgctggaaacattatcccaaggctttaccttttgatcacagtttcaaaggaactcaccagacttttgaaaataccagttgacacttacaacaatattttaacagtcttgaaattaaaacattttcacccactctttgagtactttgactacgagtccagaaagagcatgagttgttatgtgcttagtaatgttctggattataacacagaaattgtctctcaagaccaggtggattccataatgaatttgggatccacggtgattcaagatcagccagatcaacctgtaga

SEQ ID NO: 134517 - DNA, 420 bp, Homo sapiens
gatctctacgaacttgtacagtatgctggaaacattatcccaaggctttaccttttgatcacagttggagttgtatatgtcaagtcatttcctcagtccaggaaggatattttgaaagatttggtagaaatgtgccgtggtgtgcaacatcccttgaggggtctgtttcttcgaaattaccttcttcagtgtaccagaaatatcttacctgatgaaggagagccaacagatgaagaaacaactggtgacatcagtgattccatggattttgtactgctcaactttgcagaaatgaacaagctctgggtgcgaatgcagcatcagggacatagccgagatagagaaaaaagagaacgagaaagacaagtcagttggaaggtgtaaatgtggaacgttacaaacagattgttttgactggca

SEQ ID NO: 134518 - DNA, 1449 bp, Homo sapiens
atggccatttctgatgaactgcactacttggaggtctacctgacagatgagtttgctaaaggaaggaaagtggcagatctctacgaacttgtacagtatgctggaaacattatcccaaggcttgaagaaacaactggtgacatcagtgattccatggattttgtactgctcaactttgcagaaatgaacaagctctgggtgcgaatgcagcatcagggacatagccgagatagagaaaaaagagaacgagaaagacaagaactgagaattttagtgggaacaaatttggttttccctgatgaatttcacctccagactttgaatccttttcttcgggcctgtgctgagttacaccagaatgtaaatgtgaagaacataatcattgctttaattgatagattagctttatttgctcaccgtgaagatggacctggaatcccagcggatattaaactttttgatatattttcacagcaggtggctacagtgatacagtctagacaagacatgccttcagaggatgttgtatctttacaagtctctctgattaatcttgccatgaaatgttaccctgatcgtgtggactatgttgataaagttctagaaacaacagtggagatattcaataagctcaaccttgaacatattgctaccagtagtgcagtttcaaaggaactcaccagacttttgaaaataccagttgacacttacaacaatattttaacagtcttgaaattaaaacattttcacccactctttgagtactttgactacgagtccagaaagagcatgagttgttatgtgcttagtaatgttctggattataacacagaaattgtctctcaagaccaggtggattccataatgaatttggtatccacgttgattcaagatcagccagatcaacctgtagaagaccctgatccagaagattttgctgatgagcagagccttgtgggccgcttcattcatctgctgcgctctgaggaccctgaccagcagtacttgattttgaacacagcacgaaaacattttggagctggtggaaatcagcggattcgcttcacactgccacctttggtatttgcagcttaccagctggcttttcgatataaagagaattctaaagtgctccgcccaccctgccagctccgcccaccctgccagctccgcccaccctgccagctccgcccaccctgccagctccgcccaccctgctaccgcgatgagctgctactcccgaaaggcccggccagctccgcctccgcgctcagccccttccccgcctcgggaggccaagtggattcgtggctggtgcacagcgtggcagctgaggatgcagacgtggctcacgggctgctcggcgccaccgccacgttggccagaggagtcggcgccagccaggctgcacagtgggggcggcggggatccccaagcagctcggagtag

SEQ ID NO: 134519 - DNA, 3115 bp, Homo sapiens
  misc_feature (1)...(3115): n = a,t,c or g
tactcggggcgggtgctgcttgctgcaggctctggggagtcgccatgcctacaacacagcagtcccctcaggatgagcaggaaaagctcttggatgaagccatacaggctgtgaaggtccagtcattccaaatgaagagagtgcctggatcaaaaacaagcgtattggagtgcgtcataaaacaatgcttcgtaatatgcttgggtgaactccggacttctatgttatcaccaaagagttactatgaactttatatggccatttctgatgaactgcactacttggaggtctacctgacagatgagtttgctaaaggaaggaaagtggcagatctctacggaacttgtacagtatgctggtaaacatttatccccaaggcttttaccttttggtccacagtttgagttgtaataatgtcaagtcatttcctcagtccagggagggatattttgaaagatttggtagaaatgtgccgtggtgtgcaacatcaccttgaggggtctgtttcttcgaaattaccttcttcagtgtaccagaaatatcttacctgatgaaggagagccaacagatgaagaaacaactggtgacatcagagattccatggattttgtactgctcaactttgcagaaatgaacaagctctgggtgcgaatgcagcatcagggacatagccgagatagagaaaaaagagaacgagaaagacaagaactgagaattttagtgggaacaaatttggagcgcctcagtcaggtggaaggtgtaaatgtggaacgttgctgacagattgttttgactggcatattggagcaagttgtaaactgtagggatgctttggctcaagaatatctcatggagtgtattattcaggttttccctgatgaatttcacctccagactttgaatccttttcttcgggcctgtgctgagttacaccagaatgtaaatgtgaagaacataatcattgctttaattgatagattagctttatttgctcaccgtgaagatggacctgggaatcccagcggatattaaactttttgatatattttcacagcaggtgggctacagtgatacagtctaggacaagacatgccttcagagggatgttgtatctttacaagtctctctggattaatcttggccatgaaatgttaccctgatcgtgtgggactatgttggataaagttctaggaaacaacagtgggaggatattcaataagctcaaccttgaacatattgctaccagtagtgcagtttccaaagggaacttcaccagacttttnggaaaattaccagttggacactttaccaacaatattttaaccagtcttggaaattaaaacattttcacccactctttgggtactttgactacgagtccaggaaagagcatgagttgttatgtgcttagtaaatgttctgggattataacacagaaattgtctctcaagaccaggtggattccataatgaatttggtatccacgttgattcaaagatcagccaagatcaacctgtagaagaccctgatccagaagatttttgctgatgagccagaggctctggtggctcgcttcattcatctgctgcgctctgaggaccctgaccagcagtacttgattttgaacacagcacgaaaacattttggagctggtggaaatcagcggattcgcttcacactgccacctttggtatttgcagcttaccagctggcttttcgatataaagagattttctaaagtggatgacaaatgggaaaagaaatgccagaagattttttcattttgccccaccaagactatcaagtgctttgatcaaagcagagctgggcaggaattgcccttaaggactttttctttcaagggaggcacttagctggctggggggaattgggttttggaaatcatggggacagtcgcatatggaattcatgtcccagggcattttctctgtatggaaggatggaaatcaggcgatttcccaaaggcacagctaggctggcccttcacctttggatccattggggcactttttgaaagggttgaagtgctttcagtggaagaggattcctggaaccctctgagggactcagtgtggcccttgctgcatccaaacttctaaagaaacctgatcagggcccgagctgtgagcacctgtgcacatctcttctgggtctggcagaaacacggacaaaaaatggggagggagcttcacggaggcaagaggggtaatggagtgccctaaaaaagcctctaaaaatagcaaatcagtgccatggacccctctcttacaagtgccagctttttatagaaaattctgaaccagatatatctatttttatgaaaagggaaaatgatgcgggtaacaattccaggttttaaaacccagcttattccaaaaggtttcgnagaaagaccttcccggaatctttggactccagttgaaggaaacagagcaggtttaacaaaccattttcataaacacactgggagcatttgccgcttgcgggcgggaaatcacccagaatcccgaggggcccaatttatggaaggtcctcatccctttaaaaaaggaaatagcctcacccatactccctttcccatgtacatcccagtggagggttttattaccgctaggtttccctttcccatagattgtgcctttgagaaatgctgaggtaggtttcccgatttcttacctgtgatgtgttttacccagcacgtccggacacttcaccttcagggaccttaattaaaattattcacttgggtaagtgttccaagtctttctggatcaccccaagtagcatgactgatctgcaatttaaaattccctgtgatctgtnnnnnnnnnnnnttatataaataaaccaacccccccacccctttttttgggttacaaagaaacctcccttttttttggtgggggggtgggctcattgggggagggggattttttttctttcggggggagaacaaccccaaaagcgttggttttttgttttttaccccggttggaaattatttaaaaaaaagggaaaccggttgggaaaatccttttgggcctttcccctaaatggcaaaaaagggccttgggaaaaatttcccttaaaccta

SEQ ID NO: 134520 - DNA, 402 bp, Homo sapiens
  misc_feature (1)...(402): n = a,t,c or g
tcgccctagctgcacaatatatatgctgaccatatatatgtatacacacacacaaaactgcacatgcttgaaacatttgcaaccnnnnnnnnnnnnnnnnnnnnnnnnnnnnnnnnnnnnnnnnnnnnnnnnnnnnnnnnnnnnnnnnnnnnnnnnnnnnnnnnnnnnnnnnnnnnnnnnnnnnnnnnnnnnnnnnnnnnnnnnnnnnnnnnnnnnnnnnnnnnnnnnnnnnnnnnnnnnnnnnnnnnnnnnnnnnnnnnnnnnnnnnnnnnnnnnnnnnnnnnnnnnnnnnnnnnnnnnnnnnnnnnnnnnnnnnnnnnnnnnnnnnnnnnnnnnnnnnnnnnnnnnnnnnnnnnnnnnnnnnnnnnnnnnnnnngtaacctaaatctttttgtgtttgct

SEQ ID NO: 134521 - DNA, 435 bp, Homo sapiens
  misc_feature (1)...(435): n = a,t,c or g
ggctgcacgatatatatgctgaccatatatatgtatacactcccacaaagctgcacatgcttgaaacatttgcaaccnnnnnnnnnnnnnnnnnnnnnnnnnnnnnnnnnnnnnnnnnnnnnnnnnnnnnnnnnnnnnnnnnnnnnnnnnnnnnnnnnnnnnnnnnnnnnnnnnnnnnnnnnnnnnnnnnnnnnnnnnnnnnnnnnnnnnnnnnnnnnnnnnnnnnnnnnnnnnnnnnnnnnnnnnnnnnnnnnnnnnnnnnnnnnnnnnnnnnnnnnnnnnnnnnnnnnnnnnnnnnnnnnnnnnnnnnnnnnnnnnnnnnnnnnnnnnnnnnnnnnnnnnnnnnnnnnnnnnnnnnnnnnnnnnnnngtaacaataaataattttgtgtttgctctccacattcatattcagaaatctctcttaaaaacaaaa

SEQ ID NO: 134522 - DNA, 436 bp, Homo sapiens
  misc_feature (1)...(436): n = a,t,c or g
aagagggaggtgttgaaaagaagatttgaaatcaagaaaaaactaaaaannnnnnnnnnnnnnnnnnnnnnnnnnnnnnnnnnnnnnnnnnnnnnnnnnnnnnnnnnnaaaaaactgacacagattcaagaatctcaggtaacatcccacaacaaggaacggcgttccaagcgggatgagaaactagacaagaaatctcaagccatggaggagctaaaagcagagcgagaaaaacgaaagaacagaacagctgagctccttgccaaaaaacagccattaaaaaccagtgaggtctactctgatgatgaagaggaggaagaggatgacaaatccagtgaaaagtcagaccgctcatcacgaacatcatcgtctgatgaagaagaggagaaagaagagatcccctccaaatcccaaccagttttcttacctgaagaaa

SEQ ID NO: 134523 - DNA, 750 bp, Homo sapiens
atggtgtgttcagattcagactcttcctcagaagatgaagagttccatgatggctatggagaagacctcatgggagatgaggaagacagggcccgtctggtacagatgacagagaaagaaagagagcaagaactgttcaatcgcatagagaagagggagcccctgccaaagagcaattcgccggggaggggtgaattacagctaacgaaaaggctgatatttcctatcaacagctggcggaccgtccgcacctatttgcacaatcatatcgagccggctgatgaaaaaaaatccaaccacgcttgccgcactaagttactctgccgccgatggccgccggcgatgctgtgcacccccgcagcacgttgtaggggcaccggcaccaggccgaagggggggggagaagtgcccgaaaaggcgcggcccgccccaaacaaaccccacccacaacgaaggcaaagcaaaaaggtcaaacgggagacacccaacgaaaaccacggcaacgccagccgcacacgccagaagaggaagcagaaaagacggaaccagaccatgaactcgcagaccccacaagcagcaggatcgagaaaccaagaaagagaaaatgggcacgagcctaaaagacagggcgcccaaagagcggcacgaaacacccagacacgacaggacgccagagagaaccaccgaaccctgaggtataaacagatcaccaaaggaaagcccgaccggaagcccaacaagacaggctga

SEQ ID NO: 134524 - DNA, 867 bp, Homo sapiens
atgcgtctccgcgtgggccgcgtgcgagccggggtccagctcaactcccaaggcgcgcgccccgggggatccacggctggagacgcatgcaggccccgggccactgggaccctggctctgaggctgcgggcccggagtggggaacgagggcagagcgccctggaacgcagcggccgcgcgcctcctcccttgctgcgtggactgggcgctaacggcgcaggaggcgcacggggccagggatgcggggaccgttggcgcggacaagggtggcgcccaggccgatttgaaatcaagaaaaaactaaaaacagccaaaaagaaagaaaagaaagaaaagaagaaaaagcaagaagaggagcaagaaaagaaaaaactgacacagattcaagaatctcaggtaacatcccacaacaaggaacggcgttccaagcgggatgagaaactagacaagaaatctcaagccatggaggagctaaaagcagagcgagaaaaacgaaagaacagaacagctgagctccttgccaaaaaacagccattaaaaaccagtgaggtctactctgatgatgaagaggaggaagaggatgacaaatccagtgaaaagtcagaccgctcatcacgaacatcatcgtctgatgaagaagaggagaaagaagagatccctcccaaatcccaaccagtttccttacctgaagaattgaatcgggttcgattatcacggcataagctagaacgctggtgtcacatgcccttctttgctaaaactgtcacaggatgttttgtgcggattggcatcggaaaccacaacagcaaaccagtttaccgggttggtatttcttcccttggacaattgtccatgctttcagtataa

SEQ ID NO: 134525 - DNA, 4502 bp, Homo sapiens
tgtgggtcgagcagcggcggcggcggcggcagtggcggtcccactggcaggcgggcaagaggggagtccgggcggcggccggcgtgggagccgggggaccaccatggtaaagaagcggaaaggccgcgtcgtgatcgactcggacacagaggacagcggcagcgacgagaacctggatcaggagctcttgtccctggcaaagcgaaagcgcagtgactctgaggagaaggagccgcctgtgagtcagcctgcagccttcgtcagactcggagacgtctgacagtgacgatgagtggacatttgggagccataaacataagaagaaaggacaagccagaacactagagcagaaaggaaccatgaagaaacaggccaacaaaactgcctcctcaggcagttcagaccaacggacagttcagctgagagctcagccccctgaggaaggtgaagtgtcagactctgacagcaacagctcctcttccagttcagattcagactcttcctcagaagatgaagagttccatgatggctatggagaagacctcatgggagatgaggaagacagggcccgtctggaacagatgacagagaaagagagagagcaagaactgttcaatcgcatagagaagagggaggtgttgaaaagaagatttgaaatcaagaaaaaactaaaaacagccaacaagaaagaaaagaaagaaaagaagaaatagcaagaagaggagcaagaaaagaaaaaactgacacagattcaagaatctcaggtaacatcccacaacaaggaacggcgttccaagcgggatgagaaactagacaagaaatctcaagccatggaggagctaaaagcagagcgagaaaaacgaaagaacagaacagctgagctccttgccaaaaaacagccattaaaaaccagtgaggtctactctgatgatgaagaggaggaagaggatgacaaatccagtgaaaagtcagaccgctcatcacgaacatcatcgtctgatgaagaagaggagaaagaagagatccctcccaaatcccaaccagtttccttacctgaagaattgaatcgggttcgattatcacggcataagctagaacgctggtgtcacatgtttcttctttgctaaaactgtcacaggatgttttgtgcggattggcatcggaaaccacaacagcaaaccagtttaccgggtcgctgagattacgggtgttgtggaaactgccaaagtttaccaactaggtggcaccagaacaaacaaagggctgcaactacggcatggcaatgaccaacgcgtgttccgtttagagtttgtctcaaaccaagaattcaccgaaagtgagtttatgaagtggaaagaagcgatgttctctgctggcatgcagttgcccactctagatgaaatcaataaaaaggaattatctattaaagaagctcttaattataaattcaatgatcaggacattgaagagattgtaaaagagaaagaaaggttcagaaaagctccacccaactacgctatgaagaagactcagctactgaaggaaaaggccatggctgaggacctggggggatccaggacaaggccaaacaaatccaagatcaactgaatgagctggaggaacgggcagaggccctggaccgccagcggaccaagaacatatccgctatcagttacatcaaccagcggaaccgggagtggaacattgtagagtctgagaaggcccttgtggctgaaagtcacaacatgaaaaaccaacagatggatccctttactcggcggcagtgcaagcctaccatcgtttctaattccagagacccagctgttcaagctgccatcttggcccagctgaatgcaaaatacggttctggagtgttaccagatgctccaaaggaaatgagcaaggcaagtgtgggtcaaggcaaagataaagatttgaattctaagtcagccagtgacctctcagaaagatctgttcaaagtacacgattttgatgtgaagattgacttacaagttcccagctcagagtcaaaggctttagccatcacctccaaggctccgccagccaaggatggggctccaaggagatctctggaacttgggaaggactacaaaaaacggacgaggggcttattttgaggcacacccagcctgctgcttctgaccctgcatgccccatcgcagcgtcccacctttcctcctttcctttggatttagccttctttgggctgggagcagctgttgaactggggaagagactcttaaactgccagttcatctgttaatattaaaccatttggctgttttaggacctcctttgttttgcacaccatctcccaccagcctccccgtcccccagggccccacccagtgtgggcctgggctctcttgggctttatccatgtctttagatttgtgtttgccttttgtttttttaaccgcgcagttcattggccactctgcacgcattcagtattaccatggagctgggaatcttgctggagcccctggggcaatagcagcagcaccaggcggtctcctctacagactgccttggcccacccattgaacattcggcacgtgaccttgtggggggagcggggattgggcacctgcgatcctctttcctctcttcatctttctcttctgcccttctttttggaagaaggggtttcaaaaccagtttagtttccaaaaagtgtacatttgtggggggggggggtctaatttgagagcgagagtgtgtatgtgtgtgtgtgtaagtgtgtggatttttttatcatttttttaaaatgcagtactctttgtatcagtctgtcatggggtctatagctgtttcagatttttttcagctgtacttgagcatctgaaactgcaagaaagaaactcattaaatgtgattcttcttactaaacaggcctgactgctgtagctgtgtaacttccccattcccacctactcttcccatcctttcccaactttggagaaaactccccagtttagccccctgacctgcaggctgtgtcctgggcaggtgtggggaggggaagcccatggccagggtaccaggggaggggcagtgaatgtcttgctcttcccatggggtacagcccacagcttcttggctgaacgtaggaacttcttttttcttcacccagtataccagcctcttcctggtgattctgttttgctgctttggcaagaactacattttgtttttaagagaaatttctgaatatgaatgtggagagcaaacacaaaaagatttaggttacgccgggtgcagtagctcacgcctgtaatcccagcactttgggaggcctaggcgggtggatcaccctgaggtcaggagttcaagaccaatctgactaaccacggtgaaaaccccatctctactaaaactaccaaaacttagccgggcatggtgggtgcgtgcctgtaatcccagcttactcgggggggctgagacaggaagaatcccttgaacctgggaggcggaagtttgtggtgagccaagaatcgtgccactgcactccagtctgggtgacagagtgagactccgcctcaaaaagatttaggttgcaaatgtttccaggcatgtgcagttttgtgtgtgtgtatacatatatatggtcagcatatatattgtgcagctagggcgaagccagcagaggtgtgtgtatgtctttaatgaaatgtttgaaaagagataagctgactgcttgataatcactctccaggtgtaaagctccaagtgtaaataaaagtgggcatttaacaaatctttcagaacaaaagtacagctgactatatataccaagagctaagctaaaggaacagctgagagctccgatctccacgagagactaatctaaaagctctgctttgtaacttcctcaccctgccttcgtacaaggaagggggacgatgggaaatcatggacttgtaagttgtatttaaacataaaaatgaacttggtaacttctgggtttagtaagagcctcagtgtccgctttaacttagtttactttttttttatttttaaagcagcaatggatggtttttaaaggagtattatggattgtaaaattgcctaaatatgactgtaacacagctttgtggtagctgtgacacagttcacttgggcaaagggagtggtgatggactcggttaaaatccatatatacttgaataagtccattgaccgaaactctttatagaccaattgtgtaaatgtggaattcacagactgttaacattgcctggacttcagtcagagtccctggagtctgctgggacctctcctatcatgatgaacttggacttttttttttgatttctggttttaaaaaaacataaaattatagaatccagataattcgctggagtcattctgatccaccatgtaggatctgtatttagtatcctttgggtttggggaagtgttgattacattatgggctgtgttaattaaaatttttatttaaaactgaaaaaaaaaa

SEQ ID NO: 134526 - DNA, 709 bp, Homo sapiens
  misc_feature (1)...(709): n = a,t,c or g
cagtgtcatagggagggcttctctttnttcttggcactccttttcaacctggggtcaggtaatcccaccttgtgttttccactttctttctacacaatataagaactgtatcaagtcttgaccttttttggaactgccttccacagagatgggtttcaagagattgttcacaatcatggagtaactcttcccatttagattctttaccaaaagatcaaatgacctctctgtgaaatgcacctgcacattctcagtgggaacttgatgaactccagttaaggtaatgtagattttcacaaacttatctgactgatcccatccataattactgattttcaccgtatagcccgttgtaatgggagcaaccacagcagctggtttttcattatcaagaagttctgctttcttctgtgatttctgttgcatcttgttcttgatttctgtctcaatcttggatttttaagcagataagggcatcacgtactcttttcctagtagccttttccagcaacacctttacctcttgtagatctttctgtagctcttctgaagccatgggggctgggtcaggccgaagtcccgagctgcagccgcgcagaagaaggaacaggaaaccccgcgccgagccctcaaaccgagcgcagacgcctacccgcacgagtcgcggcgctgcagcctgcgcccacaccgaccctgcgcaagatcgcgg

SEQ ID NO: 134527 - DNA, 2818 bp, Homo sapiens
aatattacagaagagaattggtggttttctcgatgccttggtcaggaacagtcaaccagccagatatatcaacgactatcagcttagtaattacggactggacatgctcgggccttcgctggacccagcccccatggcttcagaagagctacagaaagatctagaagaggtaaaggtgttgctggaaaaggctactaggaagactgaaaaatccaagattgagaccgaaatcaagaacaagttgcaacagaaatcgcagaagaaagcagaacttcttgataatgaaaaaccagctgctgtggttgctcccattacaacgggctatacgaaagggggggggggggaagagagaggaggagaagcccccacctccaacgaagcgcaagcaacagaagttcgggggggggcgggggggggaaaagacaaagacgatggcgaccgagaacgccgcaaggaaaacacgaggagggcgggcgcgcaccgaatagaacaacaggcacgaacagtgaatacagatcaaaaaacgacgggagacagagaaggagaggaggaacgagaaggggcggagacgacacaagactgccacgcagaaaaggaggagagaggaacgccgagcgcggagggtgggcgaaggaacaaggaagagagaacaaccggcgcacgaacaggaacacgcgacgactacccacacccgcccccccgcgccccccgaacaagaaaaacacaaacccacaacagaaaggaaagaaagaaagaagagaccccaggggacgcaaagcgaaaaaaacaccgcaacaccacaccgacccgacgcagcgacaacagccaacaaaagaaaacaaagaccaccccacgcgcaggcggcgaaacggagcgcaaaaccaagagagcagaaaaaaaaaaccaaaacagaagaaaacaacagaagagagagccaccgcgggagccgaccccccccccagaaccccaacccaagcggccccccaccgaccgcacgcagacaagaaaaaccacagacccccgaagagacggcgccaaacgacaagaacaagaagcagcaagggcgacaagcaacaaacagacaaacaagaccggacacgacacccacgccccagacagcgagcagacgccggaaaaacacacacaaacaacaagcccgacagccacaaaagagaaacaacgagacaaaacaaccaaccaacccccaaaccccacacaccaacacaccgaacccgcaagcgcacgacgcccgcgcagcgccgcgcaccacaagcagacgccccacacccagcacaacgagaaagagaaaaaacataacaagccgaaacagcaaaagagccgcgagcggcgccgccccggcggcggcagaccacaccccccccacgcacccccaacaaacgcgcggcccggcgcgcgccccaccggaccagcccacccccgcacaccaccgcggcggcagcacgcaccccacaccaccacaccccccgccccgcggagagcccggcgccagcccccggccgcgcccccgaaagcccgccccgggggcagccgcaagagggggggcacaccgcaccccccccccgccgaccgccgcagcccgcccccccgcccgcccgccgcgcgcaggcgccgcccgccagggcaggacagccaagccccgggggcacgggcccgcgcgccaccgaccggagcccgcacccccgcgccgcacccagacacacgcaccgacagacgccgcccaccggacgccccccacacgcccgcaacgcccgcgccgccggcgggaaagaaaggagacagacgaacggaaacaaagaagaggaaaagaaaaaggaacgaagcaaccaagaaagagacagaaagggacaaggaagagaaggagggaaaacgagaagaaaagagagagaagagaaaagagaagacaagaaagaaaaaaaaagaagaagaagaggaaagaagaggcgcggagaaggaggaaagaacagaagaaggaagagaagaggagaaggagcgagacaaagagggcaaaacatgcaaaaacgaagagaagagaagagagaagagagaggaggcgggggaacacaaggagaagggacgacacgagcaggagaagagagagggagacgacgagaacgcgcgcgaggaagagaagcacagacacggaagcgacacgcgcacacacaaacgaagaacagaagagcgcacaccgcgaagcaacaagcggagcgcgcgcgcgagaaagaacacacccgccacggcacgacgcccgcgcaggaggcgcgcccgcacaccgcccgccggcgccccccagcaggcacaaaacgccccgcccgccccggccaccgcccgcaacgacaaagagaagacacccagaccacccgccccagcgacgcggaccacccgacaccccgaggaccccgcaccgccgcccgcgcaccccggcgacgcccgcggacccgcccgaccacgaaagaggcgccgacggcccgcgctgcggcgccacgacgcacaacacccgcgaggacggcccggcacgccgccccggcacccacgcccaccagaaccgcccgccacgcccccgagagcccaccccgcatcagagcgacccgcccccccgcacccaccgaaagcggcgtgtcgccggcgacgggcagcagcagcagacggcgagcgcagtggcagcgacgcgcgcggcgagaggcgcaaccgacgcgctcagggcgtcgcgccgcaccaagaggagcgcctcagcacgcgcgacggagagcccccgcacggaggaatagagcgacgcgtgacagccgcacagcgccagtag

SEQ ID NO: 134528 - DNA, 475 bp, Homo sapiens
ttttttccagagtagagtttattagaacaataactggtgataatgataaatattgatcaaagactgagcctaggaagtgggttttttgaggctgcatatactcaaggcaattcttcagaaccacagagggctcattggatcctattaaaagctgagagttaatgaataaacagataaaacagagacctgagtagacggtagtcgatattcttgtacatgtattctacctctagattccatagaaagaactaaaagtacatgaatttcactaccaacatctccatcagttaccagctgtatcaccttggatcagtcaggtaacctcccgcgaatctggttgcttccggggcaggggatccgcgggctgcaggtttgagcctgggagccggcagggtggagcagttggagggccaagcctttgagctccagggggggtggccgggacagtgggtagtgccagccgatcggcgtcctg

SEQ ID NO: 134529 - DNA, 536 bp, Homo sapiens
ctatgaaccattagattccaataagagaataggtacatcatcatctagttatgttctttgcctttgtagctctttagccattttctcaaatttcatgggaaatctcttatcattttgtggtgttttaaaattaaaatctttggcatgcatacattgacggtttttttttaattaggcttgataagtgttcattcatattagcagcagggaacaatgattcatcaatgtgtgctccagctgtcctgcatttttcaacccagagcgccgaaacgagctttacgcctctcttctgagctttgtcccaagtgctctggtacccatctttgaagataacgtgagttacttgtttgttaaaagtttttgaaccctttgcccccatatccgcaagctgtgttgtaaaagtctaaagaatagttttccgttccattggatgaccacacttcaacataggccactacatctttcaggatgggggccgccatgacagacggcgggatccggccagctggcctacgcggtgcttgcgagcctggcgg

SEQ ID NO: 134530 - DNA, 2724 bp, Homo sapiens
tcagtcgatgagagctgtcagtcgtgagttctgagtaatgtgaaggtgccaggtagaaggtacaaaggcaagaaaggtgggaaggcctggagcctgtgcgaagagcagcacggccttggtgtggcccggggatggatgcagaaccgcgagaagagagaggctgacttcagccacggccacgggctctggggttagactgctctcatctttggttttctgtaggttcattgtgattgttgtaccagggtattgtttttgttgtttatttacttgagagtcacaggccgtcctgtctttgatctgttctggaaacttctccactgtgatttcttttgcctgttttctcacgcctccattgctgggaacgcaatctcgtgtgctatcctttgcttctatagcccatgtctcatgattttcctctatttctttcctcttgtatctccttatttcattctggatgtcttctattggtttcttttccatttcacctttgactctttttaagtctattctgatgctaaatccatatactgcctcctctttgcccactcccagagaccaccatgtgtctttaatgaaaatgaccctcaaaactctgggacagtccacactgtgtttcttgttggacttactgaccacaggcatgccagagccaaaatagagtcttgggcaggggaggcagctcctttcacacttgtggctgcttctgcagataagctgttcggtgacctccatatttctaaatactgtggccgtattgctgtttcggtttttcagtttcagcagtactgcgggctctgtgacagtacttcccattgcagcagtactgtggcctctgcggcagtacttaacatagtggcagtacagtggcctctgtggcaggacttcacattgtggcagtaccgtggcctctgtggcaggatttcacattgtggcagtaccgtggcctctgtggcaggacttcacattgtggcagtaccatggcctctgtggcaggacttcacgtgtggcagtaccgtggcctctgtggcagtacttcacgttgtggcagtactgtggcctctgtggcaggacttcgcattgtggcagtaccgtggcctctgtggcaggacttcacattgtggcagtaccgtggcctctgtggcaggacttcacgtgtggcagtactgtggcctctgtggcagtacttcacgttgtggcagtaccatggcctctgtggcaggacttcacattgtggcagtaccatggcctctgtggcaggacttcatattgtggcagtaccgtggcctctgtggtagtacttcacgttgtggcagtaccgtggcctctgtggcaggacttcacattgtggcagtactgtggcctttgcagcagtacttcatattgcagcagaactgtggcttctgtggcaatacttcatattgtggcagtacttcatattgcagcagtaccatggcctctgtggcaatacttcatattgtggcatacttcatattgcagcagtacagtggcctctgcagcagtacttcatattgtggcagtaccgtggcctctgtggcagtacttcatattgcagcagtactgtggcctctgcggcagtacttcatattgcagcagaaccgtggcttctgtggcaatacttcatattgtggcagtacttcatattgtggcagtaccatggcctctgtggcagtacttcatattgtggcagtacttcatattgcagcagtaccatggcctctgtggcagtacttcatattgtggcagtaccgtggcctctgtggcagtacttcatattgcagcagtactgtggcctctgtggcagtagttcatattgtggcagaattgtggcttctgtggcaatacttcatattgtggcagtacttcatattgcagcagtaccatggcctctgtggcagtacttcatattgtggcaggactgtggcttctgtggcagtacttcatattgtggcagtacttcatattgcggaagtaccgtggcctctttggcagtacttcatattgtggcagtactgtgtcctctgtagcagtacttcacaacaaacaaaacaaaaaacaaaacaaaacctggatcctgccatcttacatattttggtggagcagctggagggccaagcctttgagctccagggggggtggccgggacagtgggtagtgccagccgatcggcgtcctggggattgcctgaatggatttgctgcctcagggatccgaagtctctttcattcccttactggggatttgaggtctggaggctcgcaagcaccgcgtaggccagctggccggatcccgccgtctgtcatggcggcccccatcctgaaagatgtagtggcctatgttgaagtgtggtcatccaatggaacagaaaattattcaaagacatttacaacacagcttgtggatatgggggcaaagatcagagaaagaagcactgaggagagaaacaatctgaccaaggcaagaactgggacgggaaaattatatacgatggaaatggggaaagacagaccaatctgtgtacaaatgaagctgcttggaaggaattggccacctaaagaaggaagagacagttggtgcatcttccagatcgaaataaactctggcttctgttgggtcatgaagaagagagggaatgggaagaaatctaaaatgagaatccgaagaatatcctccaaaagagctactattgtccccagttcttga

SEQ ID NO: 134531 - DNA, 671 bp, Homo sapiens
cctctcttccacaggaggcctacacgccggccgcttgtgctgcagcccatgtctcttagtgatccccttgaaaagttcccagcatatttttccgagtacttcaacaccaacattcgattggggcggcggaaaaatagccctttgcccatcactgcccatttaagggtgtgggcccgaagatatgctccatgtggtgttgaggaaagcagacattgacctcaccaaagagggcgggagaactccactgaggatgaaggtggaacgtgtgatcacccatttttgcagaatccacgccagtacaaagatcccaagactgggttctttgaacaagacaagaaggatgtaaaaggatggaaaatacagccaggtccctagccaattggtctgggacaacaagctcccgtgaaagacctgggagccgactgaaagaagattccgggcccattagagggcctgcgtcactttctgggggcctttcgtgtccgaggccaagcacaccaagaaccactgggccgccgtggccggcaccgttgggtgtgtccaaggaggaaataaggtctgtagggccttgtcttgttaataaattagtttatataccaaaaaaaaaaaaaaaaaaaaaaaaagtcgacgcggccgcgaatttagtagtagtagtagtagtaggcggccgc

SEQ ID NO: 134532 - DNA, 941 bp, Homo sapiens
gccggatcgttccggactacccacgcgtccgcagcgctggctgtgttgactgtttggcgtggtttacacgggtttctgtcttggtgtctggacagcgggggtggggggggtgccgggcccaaacttccccaggcctattctcacactggtgagagggccctaggggaagggtgtgggctgggtggcggggccaggccagctgagacctacaggaccgtggagcatttaggtctcccacccaactccacccggtcctctgagcatcagttacagagcccaggcagcaggagggcagggcccagccccttatcacccatcctcaaggcaggcaggaaccctgaaggcagcttccaccagggggtcccttagcccccaccctccaaaagccccagaccctgccaggcctcaccctgccagcatcgtggccccagctgacggctcccaagggcaggtgctggcaacacaagcaggagccctcggggcatcccgcagggcacacaccaggtcgccctgggctccccaagcacctcccagacccagcccttgggtgggtcctggcccacaaacccccacgccctgcccctgagatgagccccaccgcccacctggcctccagccctggagacctttctcccccttggccatggctcccatggggaggctgcaggccctccctgggctggaccagaggggacagactgtctctcccctgcgacttctgggggcactggagtccttggcctggttaccttcagcatttatagccctccagtgagttattcctcggagttctcacagagcagcatgcgcctgcggcaaagccctcacctccagcccctggaccacctgactgctgcctcccacctggcgccaaacacggccaccgcctcttttgttaacaggacagttgatccattaaattaaaaatcattcaatagaaa

SEQ ID NO: 134533 - DNA, 908 bp, Homo sapiens
gaggtgggaatttgaaagggaaagtaactgagcttttgctagacttagaaaaacttctgggtgtagtagagatccttgttagacatggggacaaaggcgagcatcccaaaggactccccactagggtgtctttaaggcaattggagcaaattcaaatgagatggctcaaagaaaaagaaacaattttcttgggagaacaagaaatttggcctgaaacttgttctttacattatcatactattttacaattggacttattcagtaaaaaggaaggaaaatggggagaagttccttacgtacaggcttctatggccccctaccaggattctgacttaagagtcaactgcaggatgtgtctggctcatgttacttccaggcaccaagaaaccgcgtgggatatcctcgatgctcccttcctagcggcaccccctggagggcccatgccctctccagggtcttctcagtcccccagttctgcgaggggtcctgccagttctccagtgtgggatttcaccccaatgtcatcagaaaaccctcccttttatttagctagctccagcctgtatcccccactgcccaaggaagctcatgcaaccatagggaaggaaaggggactatcaagagccaagggatcccccatacaactttactcagatcttggaacttttagatgccgtccaattcccaaagaaataacaagtattcactgcaggggacaccagaaggaagacactgttcttattagaggaaattcccttttggaaagagcagctaaggccacagctaaggaaaccctggtatttcaggctgctgcgctactaccaggtcatccatgtcagtggaaccgtagtatacacccaaggaaattaaagggactgagtaaaaggcttccagtaagacccctctag

SEQ ID NO: 134534 - DNA, 838 bp, Homo sapiens
atggtcattgttggcctggcagcgggggtcttgttagtgggtcctggtgatgggggtctaatcagtgagggtgtggtcagggaagacctgatgtgtggggtctggtcagcaggaacctggtcagtggggactgctgagcgctgcttggagaagccaggtgcattgcacgttatcgagggccctctggacagctgggatggcccagtgatgcccaatggcccggtcaaaaatcataaaggagaacagcaagaggtccccagcaaacatccacagatggccttggaaatctgcctgtgcttggacttcctgtactacccattcctgaggggcgatgcttctgcagggcctgtgacttggtgcacaacttcagacaccatcatcttgcagcagcaccgcaccctcactagccagggtgttgatgacttcctcaaggccaaggccacattcaaggcttcggactttattgatgcgcttgtgctgagcaaggatcttaattcaggaggtagaatggagcttgagatcaagtgtctgatcaaggtacttgaacttgatctggagggctctggggagccatggaaggtgctggataaaggagtgacagtcagctatgttttcgagatgactatagaaggctgcctggaaggagtgaacaagagccaggagaccagggagggagcttgtggggcaggtctggagatggcaaaggagggatcctgcttggatgaaaggtcttcagggactgtctcaggttacacacaggtgtcctcagagctagtgtgttcagggttcttgtctccaggatgaaaatgggaaggagttgtcagacgaggacatataa

SEQ ID NO: 134535 - DNA, 551 bp, Homo sapiens
atcgagaccaatggacagcgtcgtggaattctctgacctggtcttatgacctgttagctttcttcatcagacgtgagcaccaggatggcaggggcctcatctgtcctgttcctcctgtggcctgggtcctagcaccatgtctggtacagtgtagatgctcaagggaagtttactttgtagaccccacttacctgggagatgttactgttagtctaccctgtaccattttgtaaacctccagcccattttgcagactctgatcacagtgaaacgttccatgggaacttgggccatgagaaacatccttcctaaccacgtgactgcagaaacatccttatcgcgtcctcctgggcaaaggcccaacagcctgactgcagggacatccttgccatatcctgctgggcagcaagctctaccacccagatccctccctcccagtcccatgattaccccagcctgtgagtggcagttggtgctggcactaagctggtttcctcctccccagggttttgctggcaataaagatgttgctgttgaagccaaaaaaaaaa

SEQ ID NO: 134536 - DNA, 2856 bp, Homo sapiens
ctacttttggtaagcagaactggcactgtgggatgaaccgaatgccatgttaagatgcccgatgccaatgctcatcacatcccagaaaaggtgttggttgatatagacagctggacggtggccatggaagttggaatccgctaaggagtgtaacaactcagctgctgaatcaactactccctggagaagcatgtgggagcgctggggagggttctcttttctttgtgaagggcaggatgccccggaatgggttcgacccgagagaggggactgtaccttggaaagcatcgtggttctggtggcatctggtgagctctggctggcccttgaaaatccaggggagacagtgtaagtcttacgcagggccatacccatgtctgcagcagatctccaagatgagcagactctccccccggccccatctgtctcctgttccccactccgtggaggtggcgggccacgtgctggtccctgccaccagggcggcggttccgtgcagcgcctcggctggtgcttagcagtcgacgtatagaactggtgtgcaccaggggaatccgactgtttaaacaaagcatcgcgaaggccctcggggggtgttgcaaagtgatttctacccagtgctgttcgtggggaacctggtgctaaaccattggtagacgacctgcttccgggttggagtttggccacacatggccaacctccacttgtggctgctcctgggtcaggcctctggggtcgaccagctgacgcctgagggtgtgagacagctggcggctcgccatgtcccaggtcgaccagcaggccctctggaccgagcggtgtgcaggggtgcccgttgggatgagctggatccggagcgtccgcatctcggtcggaacctccagggtcaaccagctgctgcccgcgagctccggacttagccggcggctccctgtgtcccagattggccagcaggcgaccagtggcggtcccacggctacctgccaccttccagggagctctgaggcggatgcccccatcacgtcccgctaccctcccacagctggcctttgccaggcaacggcaggggaaccgctttgacgctgctttcgaatcctccggcgaagacttccaccagatgccccgggtgggccggatgggatgagactggcccaccccagaccgtgctgttgttttgaaggcaaggcgagggttaaagaaagacagagagagacagttggcggcttcaacagcaacacttttattgccaacaaaaccctgaggaggggtgaaccagcttagtgccagcgccaactgccgctcacaggctgaggtaatcatgggatgggagggaggggtctgggtggtagagcttgctgcccagcaggaaacggcaaggatgtccctgcagtcaggctgttggacctttgccccagggccttgtgccatccctcctcgttccccctgatcctgcccacgccgttgtaaacagctccttcttaatggcccgtcagctgatgagagtttcctgccagcacctgactgccacactgctttgccaaagggaccaggctcctcggcacaggagctgaggttctgcttcaatcctggtgaatccatgggatcgatgataaggtgggaatcagagggaagagcaaaataaaggggagtgaaggtctgattgtaacctgagacagtctctggagactgttcatccaagcaggatccctcccttgccatctccagacctcccccacaagctccctccctggtctgctcttgttcactcattccagtcagccttctacagtcatctctaacacgtatctgactggcccctcctttatccagcaccttccatggctccccaaagcactccagatcaagttcaagttctttgatcggacagttgatctcaagctgcattctacctcctgtggtgcctacgttaccatctgtgcctaggatgtgcaatgggcccttgctcccactgcagggttgacgttccctccagctggagacctggtctcctgacatcgcctggcctgtttgtcctgctctttgtcccatcagaatctctgagcaagatctcccaggtccatccagacacctgctttgtccacttttgactgggccattgaacaccactgggccaccccaactgtccacaggctccttgataacatgcatttcccctgacatttcccagtagtgctcagcagcccccactgaccaggtcccgacaagggcctcactgatgaggacacgcccaccaggctctgctgactgggtcccatgtgcccagtcctccactgaatagcaccccttgacctggtcaccagtgccccagcccatgctgaccaggccagcactaagtcccagatgaccaggtctccactgatcaagccccacagcccaggtttgcactgaccagacaccaaacatctctgtcttcccttctgccacatgttgcctgttgtccgtgactttggtaagagcttccttgtgtacgaggatgatgtccaggatgttggtctggtgtccctgagacagcactaacaggtccatgcctgggtccaggtccttcctggactgattggcaaagagctcactgatgttcttgaaggcatctctgcttaagtggatggcccttccgtctttgatattaggaacaatatcacagagggggtgtacaacttctgtgatattgtaatattctttcttcccatggatattaggaatgatatcccgggggggcttgttgtacaccccatccgtgggggagaggatgatattactctgcatatcatagagggtgcacacggctgtaatgttgtccataataacatccagaggggaagagaatattattcccat

SEQ ID NO: 134537 - DNA, 355 bp, Homo sapiens
aagttgggaaggaggggtcctccccttcccatgagaatcctttatttgtcccaactgaggggtgggtgtggggtgttaaataagatttgaaataggtggggacgctgtacagggggtccgggaagggggctgggggcaggcagcaggtcagtgcacctgaggctgggggtgcccgtggagaagcctcctggtggctcagggggtgggcccagcttctctgcctcctgctccactgactggctcccgtacgcactgtcttccttcacctctgtgctgggcagcttgtctcgggtttctggacccctcagcagcctcactccctcctctgaagtttttgtatcatagtccccatcat

SEQ ID NO: 134538 - DNA, 385 bp, Homo sapiens
gatggcaggcctttggggacttctctcccacagatgtgcataaacagtatgccattgtgttccggacacccccctatcacaagatgaagattgagcggcctgtaacagtgtttctgcaactgaacaccaagcgaggaggggacgtgtctgattccaaacagttcacctattaccctctggtggaagacaaggaagaggtgcagcggaagcggaggaagccttgcccaccttctcccaagccttcgggggtggctcccggaccccctgtacagcgtccccacctatttcaaatcttatttaacaccccacacccacccctcagttgggacaaataaaggattctcatgggaagggaggacccctccttcccaacttaaaaaaaaaa

SEQ ID NO: 134539 - DNA, 5686 bp, Homo sapiens
ttatcttcttccggattcggcgtggtcagcagtttgcaaccgtagaaaatcgagtttgcgcctgccataaagcacatcgcctgagtctgttcgttcatctgctcgcgtccggcagaaaggcgcacgtaagaggttggcatcatgatcccccgcgaccgcaatggtgcgaataaaatcaaaggcatcgacatcatcgttatcggcaagcggcgtgcctttcaccttcaccagcatgttgattggcacgctttccggcggcgtcggcaggtttgccagttgcagcaataatccggcgcgatcttttaccgtttcgcctaagcccacaatgccgccagaacagactttgatcccggcatcgcgcactttttccagcgtatcgaggcgttcctttccacaacgattggttttaaccaaggcacacatgtttgtgaattttttacgaatttgtgcttctcgtggttggtggggaggtagtatatggcctttaggatctttcaacaagccacattcaaaagctcttaagatgtagttaatagtacctacattgtctagtttctgtattatttccttatccctaggaataggaatcaccttctgtttaagggatgttggaccatgaggtacataaaatatagaagcagaaaatagaatggtggttgccaagtgatagcgaaaagcaataggcttccacgttccgtaacagtagacgaccacggcagaaatcttccttccgataggttcgccttcctgtggaggacaggcagaaacatctatggaaggccaaatattcccaacaggctccattaattgcgttgcgctcactgcccgctttccagtcgggaaacctgtcgtgccagctgcattaatgaatcggccaacgcgcggggagaagcggtttgcgtattgggcgccagggtgggttttcttttcaccagtgagacgggcaacagctgattgcccttcaccgcctggccctgagagagttgcaacaagcggtccacgcttggtttggcccagcaggcgaaaattctgtttgaaggtggttccgaaattcggcaaaatcgacggcgactcccatcggcgagtctctatgacaccagatactcttcgaccgaacgccggtgtctgttgaccagtcagtagaaaagaagggattcagctgttgatacttgtgcatgcttcacgaagttcttgtgctgtgcttttcagctccatcaggacatttatgttcttctctacactgattattccagttagcaattcctctaatcttttttcaaggttcttagcttccttgcattggcttagaacatgctcctttagctcagaggagtttgttattacccaccttctgaagcctacttctgaaaattcatcaaaccaattctctgtccagttttgttcccttgctggcaaggagttttgatcctttggaggagaagaagtgttctggtttttggaattttcagcctttttgcactggtttttcctcatcttcatggatttatctacctttgatctttgatgttggtgaccttcagatgggtttcctctactgcaggtctgctggagttcgctggaggaccactccagatcctgttgccgggtatcaccggcggaggctgcagaacagcaaagattgttgcctgttccttcctctggaagatttgtcccagaggggcacccacctaatgccagctggagctctcctgtatgaggtgtctgttgacccctgctgagaggtgtctcctcatcaggagccaggggggtcagggacccccttgaggaagcagtctgtccctcagcagagctcaagtactgtgctgggagatctgctgctctcttcagacgtggcgttatttctgagggctctgttctgttccattgatctatatctctgttttggtaccagtaccatgctgttttggttactgtagccttgtagtatagtttgaagtcaggtagtgtgatgcctccagctttgttcttttggcttaggattgacttggcaatgtgggctcttttttggttccatatgaacttgaaagtagttttttccaattctgtgaagaaagtcattggtagcttgatggggatggcattgaatctgtaaattaccttgggcagtatggccattttcatgatattgattcttcctacccatgagcatggaatgttcttccatttgtttgtatcctcttttatttcattgagcagtggtttgtagttctccttgaagaggtccttcccgtcccttgtaagttggattcctaggtattttattctttttgaagcaattgtgaatggcagttcactcatgatttggctctctgtttgtctgttattggtgtataagaatgcttgtgatttttgtacattgattttgtatcctgagactttgctgaagttgcttatcagcttgagattttgggctgagacaatggggttttctagatatacaatcatgtcatctgcaaacagggacaatttgacttcctcttttcctaattgaataccctttatttccttgtcgtgcctaattgccctggccagaacttccatcactatgttgaataggagtggtgagagagggcatccctgtcttgtgccagtcttcaaagggaatgcttccagtttttgcccattcagtatgatattggctgtgggtttgtcatagatagctcttattattttgagatatgtcccatcaatacctaatttattgagagtttttagcatgaagggttgttgaattttgtcaaagggccttttctgcatcagttcctccttgtacctctggtagaattcggctgtgaatccatctggtcctggactcttttttgttggtaagctattgattattgccacaatttcagagcctgttattggtgtattcagagattcaacttcttcctggtttagtcttgggagggtgtatgtgtcgaggaatttatccatttcttctagattttttagtttatttgtgtagaggtgtttgtagtattctctgatggtagtttgtatttctgtgggatcagtggtgatatcccctttatcattttttattgtgtctatttgcttcttttctcttttcttctttattagtcttgctagcggtctgtcaattttgttgatcctttcaaaaaaccagctcctggattcattaatgttttgaagggttttttgtgtcctagtcccgggctggcctcaccttggtgctgcaagtgaggtcaagaggcgtgtggccccggaagctgcttcgggtgtccttctcaggcccttcagagtccgagtcgctatcagaggtagggggtgaaggcagtgggcacaggggctcctcgttttcagcatggatgtcagcaccagccttcagaaggaggcgggtgagggtcgggtaccccagtccagctgccaggtgcaggggtgtgtttcccgcaaaggtgcgagcgttcacgttggcccggagcttggtgaccagatgggtgaccaaccccagctcctccatctctgtggctagatgcaaggctgttcgtcccccctgccgctctgtggcctccacttcagccccactgtccaccagcagatccaggcactcagggcttcgggctcggaccgccaggtgtactggatacagtccctcaaagtcaggcatatgcaacagctggggcacagcaggagctccactctgaagcagtgcacgcagcagctcaggagcaccagcgcctgcccgcagcgccagatgcatggctgagtctccatgccgatccagcagagctgggtctgcacctacccgcagcagaaagctcaccacactcgtctgccccgtgatcaccgccaggtgcaggggcgtctggtgcaggtggttggtgaggttgacaacgccgaggtcctgggcgtggtggatgacatagactatctgctcaatgacactggtctgcccgtggatgatggctaggtgcagtggtgtgtctccgttctcgtcctgcgccgtcagcaggtggcgctgtcccgccagcagcgcgcgccggtccgcggtgacgccgtagtcgagtagggctcgggcgctgcgctgcgccaggccgaacaggcgcgcgttgtactctcgagctcgctgcagcattctccggggcctgcggctcgcactggggggtcctggagggggcgctcggctccgcggcttcctccccggagtccctgctgggcaccgtggcggccatctgcgccccgcccccgcctcccgggtagcaccgcatggggcccgcgccggactggtaggggctgtaggccagggaggaggggaagaaaccgaggctgccacctcctccagctcctccgtagcccccggctgcacccccagagcctccacccatgtgggagccacccccgaagggctgggagaaggtgggcaaggccttcctccgcttccgctgcacctcttccttgtcttccaccagagggtaataggtgaactgtttggaatcagacacgtcccctcctcgcttgcgtttcagttgcagaaacactgttacaggccgctcaatcttcatcttgtgataggggggtgtccggaacacaatggcatactgtttatgcacatctgtgggagagaagtccccaaaggcctgccatccattctcatcatcctcatagaaccgaacctcaatgtcatctttctgcaccttgtcacaaagcagataaacttcatctccaccccgcacagagcctgctgtcttgtccattcgagaaatcttcaggtttgatgcccccggagatttgctatcatggatgggctgggaggtgactggcttcaggggcagggagaaggagccatcactggctctaaggaaggcagagaagcgcagccgcactatactcagatccatcaccttcttcagttctttggcctcttgctccagctcccgctgctcggcctccgtaaggccctggggcctagagcggagccgctgcctctgaagtttttgtatcatagtccccatcatgttcttcttagtcacatgcaggacacccaggttgttaaactgggcagtcatgttcttgggccccacagaaacggcgcagatccccagcttcgagcattgcttgcccaccagactgtgggcgatgagcacgaggtgggtcactgtgtgttaccaggtccacctcgatcttggctggtccctcgtagttacagatcttgacagtgggataggtctttcggcccttctcactggaggcaccgggcagtcctccatgggaggggccttcacagccatatcgaaatcggaagcctctctgcttaggctgttccacgatcaccaggtaggggccatcagctgtttctggggctggctccttgggttccacaatggaggagttcaatttgaaatcatcatattcaataataccatccagacctgggttgtagcaactctccatgtctctgggctaggcccggctctgtctagtggctccggccaggttctgcttcccagaattttagacgcccgcgggtccgcgtatctttgtacaacggtgtcgacgtggatccgagtgtcgtcgcctgcgcgccctttccggctgtgtgcagctgctgctctccagccccaggcgctgtccgctaaaggccctcctccctcttttctcttgtcccggccacccaggggtctgaatccagccactcaccgtg

SEQ ID NO: 134540 - DNA, 346 bp, Homo sapiens
ctccacagaccatcacggacaccgagctttgggtaactctcacagtggaggtatgggacatctctactccttccctggcaactgatcacatgcccgttaccatcccattaaaacctaatcacccttaccccgctcaacgccaatatcccatcccacagcacgctttaaaaggattaaagcctgttatcactcgcctgctacagcatgggcttctaaaacctataaactctccttacaattcccccattttacctgtccaaaaactggacaagtcttacagattagttcagaatctgcgccttatcaacaaaattgtttcacctatccatcctgtggtgcccaaccc

SEQ ID NO: 134541 - DNA, 809 bp, Homo sapiens
tatgggacatctctactccttccctggcaactgatcacatgcccgttaccatcccattaaaacctaatcacccttaccccgctcaacgccaatatcccatcccacagcacgctttaaaaggattaaagcctgttatcactcgcctgctacagcatgggcttctaaaacctataaactctccttacaattcccccattttacctgtccaaaaactggacaagtcttacagattagttcagaatctgcgccttatcaacaaaattgtttcacctatccatcctgtggtgcccaacccaccagcctttactagtcaaatcacccaagcagtttctcaggctcttggtattcagtggaaccttcatatcccttatcatcctcaatcttcaggaaaggtagaacggactaatggtcttttaaaggtacacctcaccaagctcagcctccaacttaaaaaggattggacagtacttttacctcttgctcttctcagaattagagcctgtcctcgagatgctacagggtacagtcgatttgaacttttatatggacgcactttcttgcttggccccaacctcatcccagacaccagccctctaggcgactatcttccagtcctccagcaggctagacaggctgctaatcttctcttgcctactccagatccccagccacatgaagacaccctagctggacgatcagttcttgttaagaatctgacccctcaaactctacaacctcgatggaccggaccccacttcatcatctatagtaccccgactgccgtctgcctgcaggatcctccccactag

SEQ ID NO: 134542 - DNA, 516 bp, Homo sapiens
atgctgcccaatcgcctcggaagcccagtagaccatcacggacgccgagctttgggtaactctcacagtggaagcccaaagcctccttcgtgtcttcctctcatatctccccaccttaacccacaagtatgggacatctctactccttccctggcaaccgatcacatgcccattaccatcccgttaaaatctaatcacccttaccccgctcaatgccaatatcccatcccacagcatgctttaaaaggattaaagcctgttatcactcgcctgctacagcatgggcttctaaaacctataaactctccttaccattcccccattttacctgtcctaaaaccagacaaggcttacaagttagttcagaatctgcgccttatctaccaaattgttttgcctatccaccccgtggtgccaaacccatatactctcctatcttcagtacctccctctactacccattattctgttctggatctcaaacatgctttctttactattcctttgcaaccttga

SEQ ID NO: 134543 - DNA, 1896 bp, Homo sapiens; identical to SEQ ID NO: 114495

SEQ ID NO: 134544 - DNA, 1806 bp, Homo sapiens
atgatttcctgcctagctgaagggcttaaaagggcagcttacaaagctgttaattatgacaagcttaaagaaactacccaaggtaaagacgaaaacccagcccagttcatggcccgcttagcagcaacccttagacgctttaccgccctagacccagaagggccagaaggcggtcttattcttaatatgcattttatcacccaatccactcctgacattgggaaaaaacttcaaaagttagaatctcgccctcaaaccccacaacaggaattaacctcgccttcaaggtgtacaataatggagaggagactgacgctgcccgatcgccttggaagccccctggaccatcacggacaccgagcttcagggcctgtttcccttgcccccataacttttgtgggtattgacggccaagcttcaaaacaccttaaagctcccctactttggtgccaacttggacaaccttcttttaagcactcttttttagttatccccacctgcccagttcctttattaggccgagacattttaaccaaattatctgcttccctgactattcctggactacagccacatctcattgccactcttcttcccaacccaaagcttcctttgcgtcttcctcttgtatccccctaccttgacccacaagtatgggacatctttactccctccctggcaaccgatcacatgcccattaccatcccattaaaacctaatcacccttaccctgctcaacgccagtatcccatcccacagcacgctttaaagggattaaagcctgttatcactcgcctgttacagcatgggcttctaaaacctataaactctccttacaattcccccatttcacctgtccaaaaacctcacaagtcttacagattagttgaggatctgtgccttatcaaccaaattgttttgcttatctaccctgtggtgcccaacccatacactcttttgtcctcaatacattcctccacaactcactattccattcttgatcttaaagatgcttttttcactattctcctgtacccctcatcccagcctctctttgctttcacttggactgaccctgacacccatcagtcccagcagcttacctgggctgtgctgccgcagggtttcagggacagctctcattacttcagccaagctctttctcatgatttactttctttccacccctccgcttctcaccttattcaatatattgatgaccttcttctttgtagcccctcctttgaatcttctcaacaagacacccttctgctccttcagcatttattctccaaaggatattgggtgtccccctccaaagctcaaatttcttctccatccgtaatctacctcagcataattcttcataaaaatgcacatgctctccctgccaatcgtgtccgactgatctctcaaaccccaacaccttctacaaaacaacaactcctttccttcctaggcatggttggatactttcgattttggatgcctggtttcgccatcttaacaaaaccattatataaactcacaaaaggaaacctagctgaccccatagatcctaaatcctttctccattcctctttccgttccttgaagacagctttagagactgaagccaccctagctctccctgactcatcccaacccttttcattacccacagctgggctggaagtgcagggctgtgcagtcagaattgttacacaagggccgggaccacgccctgtagccttttgttccaaacaacttgaccttactgttttgcctagccctcaagtctgcatgcagcagccaccactgccctaa

SEQ ID NO: 134545 - DNA, 648 bp, Homo sapiens
atgacctcaggtcctcagattaaccagcccaagaaacatctcaccaatttcaaatctgaaccatctgacctctcccctcctccccaggctgctccttgccagctgaagactgacgctgcccaattgccttggaagccccatagaccatcacgcaagcttcgggtaactctcatagtggaaggtaagtccgtccctttagtcaatacggaggctacccaatccacattaccttcttttcaagggcctgtttcccttgcctccataactgttgtgggtattgacggccaggcttctaaacccctgaaaactcccctactctggtgccaacttggacaacactcttttatgcactcttttttagttatccccacctgcccagttcccttattaggccgagatattttaaccaaattatctgcttccctgactattcctggactacagccgcatctcattgccacccttctccccaacccaaagcctccttcgtgtcttcctctcctatccccccaccttaacccacaagtatgggacatctctacttccctggcaaccgatcacatgcccattaccatccgattaaaacctaatcacccttaccctgctcaacgccaatatcccatcccacagcacgctttaaaggattaa

SEQ ID NO: 134546 - DNA, 404 bp, Homo sapiens; identical to SEQ ID NO: 127040
  misc_feature (1)...(404): n = a,t,c or g

SEQ ID NO: 134547 - DNA, 439 bp, Homo sapiens; identical to SEQ ID NO: 132756
  misc_feature (1)...(439): n = a,t,c or g

SEQ ID NO: 134548 - DNA, 1059 bp, Homo sapiens; identical to SEQ ID NO: 114869

SEQ ID NO: 134549 - DNA, 1134 bp, Homo sapiens
atgtgggaaagtttggaacttcctggaaacattttcaatggctttgaccaaaatgctgataatgatatggacgatgaaattcaggctgaggtcatctcagatggagatgaggaatttgttgggaactggaataagcctagagacttggtgccctgcatcctagccactctagccttgactaaaaggggacaagatacagctcagaccatggcttcagagggtgcaaggccaaagcattggcagcttccaggaggtgttgggcccgtgggtgctcagaaatcaagaattgaggtttgggaacctttgcctatatttcgcaggatgtatggaaaagcctgtatgtccaggcagaagtttgctgcaggggcagggttttcctggtatgttcctgtggcagttgttggagcaaaagttcacgatgtgaacctccatatgctgtcctttccatccaagtggaagctgcacacatgcatgaaatttggtgccgtgactcagatcgtgacctcccttgggaggtcctcctgttctttgctccttgagaaagatccacctatggtcctcagaccgaccagcccaagaaacatctcaccaatttcaaatctgacaaaggagacacgttttatccgtggacccaaaactccggcgccggtcacggactgggaaggcagccttcccttggtgtttaatcattgcagggacgcctctctgattattcacccaggttttagaggtgtcagaccacgcagggacgcctgccttagtccttcacccttagcgaatttaattaacctcaccttcaaggtgtacaataatagaaaaaagttgcaattccttgccttcactgtgagacaaacctcagccatgtctccagcacacaagaacttccaaacgcctgaacctcagcggccaggcattcctccagaacctcctcccccaggagcttgctacaagtgccagaaatccggccaccaggccaaggaatgcctgcagcccaggattcctcctaagccacgtcccatctgtgcgggaccccactggaaattggactgtccaactcacctggcatccactcccagagcccctggaactctggcccaaggctctctgactgcttcccagatcttcttggcttag

SEQ ID NO: 134550 - DNA, 381 bp, Homo sapiens; identical to SEQ ID NO: 119823

SEQ ID NO: 134551 - DNA, 453 bp, Homo sapiens; identical to SEQ ID NO: 114501
  misc_feature (1)...(453): n = a,t,c or g

SEQ ID NO: 134552 - DNA, 602 bp, Homo sapiens; identical to SEQ ID NO: 123812

SEQ ID NO: 134553 - DNA, 531 bp, Homo sapiens; identical to SEQ ID NO: 120915

SEQ ID NO: 134554 - DNA, 909 bp, Homo sapiens; identical to SEQ ID NO: 114873

SEQ ID NO: 134555 - DNA, 678 bp, Homo sapiens; identical to SEQ ID NO: 114876

SEQ ID NO: 134556 - DNA, 312 bp, Homo sapiens
tcatttcgtggtggcctgctggtatgataggtctggttgaattttaggatctggattttcagtcttcaccagctgtgaccccccagggagcaccctctttgctctgggctgctgcatttcagccatgcagctgttctcatcctcaggaaagtcccagaactctggcagccacttccagagcccctggaactctggcccaaggctctctgactccttcccagatcttctcagcttagcagctgaagactgatactgccggattgcctcagaagcctgggctgtactgctgcaagcttcacagacagcccccat

SEQ ID NO: 134557 - DNA, 928 bp, Homo sapiens
ttaaggcttctcatcttctacaggctcgctgtggtattctgccccacacaggctcttgtcaatattgcttggaataggtttaatttctgttcccagctgctcctcaatacttttcaggttgaagtgatcatcatatgtgatcaagttgatggctaagccaggatgaccaaagcgacctgatcttccaatacgatggagataggtctctgcgagtttttgaagctcagttatacatgcatagtactgggttactccctttagagttagttcctccatcaggttaatctcatagggtttctgcaagtgggaattcatgaacttctgtacactgacagacttacagaaatcttgagcatcgatttcctttgcataggtcatctctttttctttcatgactttagcatcaatttgtatgttagtttttacttcagttagggagagtttgtttgtctgtttagctatcttcatgaagtttttgtgtaaatctttaaagtttttgatggtgatactgatctctgccagccatgtaagtatgcaatattggtcgttatttgctattttcttaggtagaggcagctctaatggcttccagttagcctttcccatcataagagccctcataccacatatcaggaaaccaatatggaaattctccacgctgctaagtatatctgtttcaattatgcattctggcagccactcccagagcccctggaactctggcccaaggctctctgactgactccttcccagatcttctcggcttagcggctgaagactgacactaccagatcgcctcagaagccccctgacccccatgactgtatctctccgatccacctgacattcaccccatttccccagatttccttctttcctgttcctcaccctgatcacacttgatttattgatggcggttccaccaggc

SEQ ID NO: 134558 - DNA, 420 bp, Homo sapiens
ctaaaccagttcccccaagtgttttatgtcaccttccaaacatggtcttagaaccatgtgtgcatgcaggtatgtaggatgtttgtttctccagttaggatctgattttccaccagaggcactctgtttctgcagaatctctgacaatgcacggattaaataattagcaaacttctgcgaagagagtggtgcaggggagcctggcagccactcccagagcccctggaactctggcccaaggctctctgactccttcccagatcttctcggcttagcggctgaagaccgacactgcccgatcgcctcagaagcccccttgttgcaaagaaaatccttgtataagtctccttgtacatcttcaacaatctcttgatgctgcataccaagaagtggaatttctgaatccttgagtgtcaacat

SEQ ID NO: 134559 - DNA, 816 bp, Homo sapiens
tcatgaggtctggttaatatcaggaattattgcctcaaacgctgcaggtgtggatcgatctctttcagtcccagtaaatggggctgcaactgcctttgacaacctcaaagctgcacagtgctcatgccctggggcagacaatgatgtgggggagttgctgattttaggatagaaaattacaatgcttatatagtaaacagcacctggaagtttactaatgatttttacaattaacagcagcagtgcggtctgattattcatgcgtgctttcaatccctccaaatgttcctcatgtgacctctttttaggaatctctattccaggcccttcattctgaccatcaccacctgcatcttgtatcctggattcttttaagaattttaaatagtgcatatccctcaacctctttctcctttcaatcttggtgccacacttcaatttctcccttctcttaatttcaattcctttcattttctggtagagacaaaggagacacgttttatccgtggacccaaaactccggcgccggtcatggactgggaaggcagccttcccttggtgtttaatcattgcagggacgcctctgattatacactcatgtttcaagggtgtcagaccacgcagggacgcctgccttggtccttcacccttagtggcaagtcccgcttttctggcagccattcccagagcccctggaactctggcccaaggctctctgactgactccttcccagatcttctcggattagcggctgaagactgacgctgcccgatcgcctcggaagccccctgcacccaggtgatataaacagccat

SEQ ID NO: 134560 - DNA, 1155 bp, Homo sapiens
atggacacatatagaggaacaacagacactggggcctacctgaagacacgcatgaaatttggtgccgtgactcagatcgggggacctcccttgggagatcaacccctgtcctcctgttctttgctccgtgaaaaagatccacctacgacctcaggtcctcagaccgaccagcccaagaaacatctcaccaatttcaaatccgagacaaaggagacacgttttatccgtggacccaaaactccggcgccagtcacggactgggaaggcagccttcccttggtgtttaatcattccagggacacctctctgattattcacccaggcttcagaggtgtcagaccacgcagggacgcctgccttggtccttcacccttagcggcaagtcccacttttctggggaaggggccagctgctcctcgccagaccgagctaggtcccaattcttcctcagcctccgctcctccaccctataatccttttatcgcctcccctcctcacacctggtccggcttacagtttccttccatgactagccctccccctcctgcccagcaatttactcttaaaaaggtggctggagctaaaggcatagtcaaggatttaattaacctcaccttcaaggtgtacaataatagaaaaaagttgcagttccttgcctccactgtgagacaaaccccagccacatctccagcacacaagaacttccaaacgcctgaactgcagcagccaggtgttcctccagaacctcctccccgaggagcttgctacaagttccagaaatctggccaccgggccaaggaatgcctgcagcccaggattcctcctaagccacatcccatctgtgtgggaccccactggaaatcggactgtccaactcacctggcagccactcccagagcccctggaactctggcccaaggctctctgactccttcccagatcttctcagcttagcggctgaagactgacactgcccaatcgcctcggaagcccccagctctctggtcccatcatgaaagggtgatggattgagggtattaactactggaaatcgcaggggaccaaagacaccagttttgtggaataaagtaagtttgagataaagcgcagtacagacggtcaaggtaatgctgccttttgcttcaccttcagaag

SEQ ID NO: 134561 - DNA, 1825 bp, Homo sapiens
tgctctgagtatgaggactcctccccagctccagtaccagccacagatctcagctcaacactctcgagctctgtaccacaaccccaggatacagggaccagccagcagcttcatcccctggacccttggcatgagctgcttcgtgcccaggagctccaaggtgccaccaaccacaagggctacagccatgcagagcatgagcatgcaggcctaggtgtccagggtgggaatggggctctggctttttcgaacagtgggcacaggcatgctgttcccaccatcagctcaggcactggcaggaggaggactccaagttcttcggcttttggactcttgaacttacaccagtggtttgtcagtggctttcaagccttcagcgacagactgaaggctgcattgtcagcttccctacttttgaggtttggggactcagactggcttcctagctcttcagcttgcaaatgtcttatgctgggacttcactttgtgattgtaggtaacatctgtgctacactcaaggagaaatactcctcaatgctccatttagatgtgaccatgaagaaaaatggggagaaaagaacaaggctccaaaaaagaaagaagggaatgcctccacatccggcttatgaggacctaaacatagctgccatcactctccctgccaatgttgtccttcatcagccaagtggcttcagaacttcagggcagctggaccccgtttggtggtctcttgacacggacgcgcatgaaatttggtgccaagacccgggacttggatcaggggacttcccttgggagatcactcccctgtcctcctactctttgctccatgagaaagatccacctacgacctcaggtcctcagaccgaccagcccaagaaacatctcaccaatttcaaatccaagacaaaggagacaggttttatccatggacccaaaactccggcaccggtcacggactgggaaggcagccttcccttggtgtttaatcattgcagggacacctctctgattattcacccatgtttcaagggtgtcagaccacgcagggatgcctgccttggtccttcacccttagcggcaagtcccgcttttctggagaaggggcaagatttaattaacctcgccttcaaggtgtacaataatagaaaaaagttgcaattccttgcctccactgtgagacaaaccgcagccacatctccagcacacaagaacttccaaatgcctgaaccgcagcggccaggcgttcctccagaacctcctcccacaggagcttgctacatgtgccggaaatctggccactgggccaagcgaatgcccgcagcccgggattcctcctaagccgcgtcccatctgtgtaggaccccaccgaaaatcggactgttcaacttacctggcagccactcccagagcccctggaactctggcccaaggctctctgtctgactgactccttcccagatcttctcggcttagcagcttgaagactgatgctgcccgatcgcctcggaagccccctacaagaccattcacggacgccgagcttcgggtaactttcacagtggaaggtaagcccgtccccttcttaatcaatacagaggctactcactccacattaccctcttttcaagggcctctttcccttgcctccataactgttgtgggtattgatggccaggcttctaaacctcttaaaactccccaactctggtgccaacttagacaatactcttttaagcactcctttttagttatccccacctgcccagttcccttattaggctgagacactttaactaaattatctgcttccctgactattcct

SEQ ID NO: 134562 - DNA, 539 bp, Homo sapiens
  misc_feature (1)...(539): n = a,t,c or g
gaattgtggatgattgcggtggagccttcactatgggtgtcatcggtggcggagtcttccaggccatcaagggtttccgcaatgcccctgtttgcagattgctgtctgaagctcccttgtttatctactcttgctcaagatctgtgtctcccaccgttaatgtgagctctgagagggcagagagcagacctaccttgttcatggctgtatccctgcatatggcatggtgcttggcacatataggaattcggcaccggttgagaggtagtgccaatgctgtgaggatccgagccccccagattggaggtagcttcgcagtgtgggggggcctgttctccaccattgactgtggcctggtgcggcttcggggcaaggaggatccctggaactctatcaccagtggagcaattgaccggggctgttctgggctgcccgcagtgncccactggcaatgggtgggctcagcaatgatggggggcatcctgttggcctcattgagggggttggnatcctcctaatcggtaaacagccacagttcg

SEQ ID NO: 134563 - DNA, 1010 bp, Homo sapiens
tgggggagcagagggcagcacttcctccagctccaaaagagtgcacccaccccaacgttaccaatacactcgtgcaggcggaaagctccgacgccggtgtgcgtctacgctgggggcgtggcctgactgcgcggccagacgccagcgccatggaggagtacgctcgggagccctgcccatggcgaacttgtggatgattgcggtggagccttcacctatgggtgtcatcggtggcggagtcttccaggccatcaagggtttccgcaatgcccctgttggaattcggcaccggttgagaggtagtgccaatgctgtgaggatccgagccccttccactacaggtagcttcgcagtgtgggggggcctgttctccaccatcgactgtggcctggtgcggcttcggggcaaggaggatccctggaactctatcaccaagtggagcatttgaccggggctgtgctgggctgcccccaggtggcccactggccatgggtgggcttcagcaatgatgggggggcatcctgtctgcgcctcatttgagggcgtttggcatcctccttcactcgttaaacagccccagcagttccgaaaatgggcccccaattccctggaggaccccaagccaagctgccccctaaggatgtcaccaccggccccaggctaccccaagctatcagcagtaccacttgaggaagccacttgccaccatgggagctacttcctcggttcccttccccgatgggtctaccctcaaggggagggctggcttcccaggttagccctgggacccttccagagaaattttctactctgctccctagtcccagaaatggggtgtggggcaccccacgctgccctgacagatgggtccccttttttctctctcagggcaccccagccccacactcacatggtacgaagttctcaccccagctcctttgtgtggcaccctgatgagtattttaaaacccgttttgaaatgccaaaaaaaaaaacaaagggcggccgct

SEQ ID NO: 134564 - DNA, 585 bp, Homo sapiens
ttaaggtggcgcgtctggagtctgtcccttctgatgttcagatgtgttcggagtttcttccttctggtgggttcgtggtctcgctggttcaggagtgaagctgcagacctttgcggtgagtgttacagctcttaaggcagcacgtctggagttgttcgtttctcccggtgggcttgtggtctcgctgggctcaggagtgaagctgcagatctggccccacccacatcctgctgattggtagagccgagtggcctgttttgtcagggcgctgattggtgcatttacaatccatgagcttgagctaaacacagggtgctgattggtgtgtttacaatacctgagctcgacataaagactctccacgtcccaaccagactcaggagcccagctggcttcacctactggatcccgcaccagggctgcaggtggagctgcctgccagtcccaccctgtgcgctggcactcctcagcaccttgggtggtcgatgggactggatgccgtggagcagggggtggtgctcgtcggggaggaggaatgttgttgccgctttgatcatctatccagacctctaaaactttccccat

SEQ ID NO: 134565 - DNA, 1104 bp, Homo sapiens; identical to SEQ ID NO: 128151

SEQ ID NO: 134566 - DNA, 2364 bp, Homo sapiens
atgaacatgaacatcaaaaaaattgtaaaacaagccacagttctgacttttacgactgcacttctggcaggaggagcgactcaagccttcgcgaaagaaaataaccaaaaagcatacaaagaaacgtacggcgtctctcatattacacgccatgatatgctgcagatccctaaacagcagcaaaacgaaaaataccaagtgcctcaattcgatcaatcaacgattaaaaatattgagtctgcaaaaggacttgatgtgtgggacagctggccgcagcaaaacgctgacggaacagtagctgaatacaacggctatcacgttgtgtttgctcttgcgggaagcccgaaagacgctgatgacacatcaatctacatgttttatcaaaaggtcggcgacaactcaatcgacagctggaaaaacgcgggccgtgtctttaaagacagcgataagttcgacgccaacgatccgatcctgaaagatcagacgcaagaatggtccggttctgcaacctttacatctgacggaaaaatccgtttattctacactgactattccggaagtttgctgaggagccagatgccttgtgctgacttgtctattttgaaagaggctgcagaaacactcgattccacctcaacccggaattcagctttcttaggtaatacacatgacgaggctccaattgttcatgtattcattccctcccttgcatattccaccaatatttggtcactcatcttcaacccaacaaccatgattatgatgtgctcacgagactggctttcttcttgtgaaaataagagggtagatcttgcttttgggttggtgtacagtggaacccctgtacagaagctagagcaaatgaagttcagtccccagctaggctgtaaccactttgagagcaaggacagaaatgacttcctgtttgcccccgaggaaatagaaaaggacccacaaggtgaaagtctgctgtgtgacttcatgactaaaacaccaaaagcaatggcaacgaaagctaaaatagacaaatgggatctaattaaactaaagagcttctgcacagcaaaagaaactaccatcagagtgaacaagcaacctacagaatgggagaaaaattttgcaatctacccgtatgacaaagggctaatatccagaatctacaaagaacttaaacaaatttacgagaaaaaaatcaaacaaccccatcaaaaggttgatgaaaggcgtctgctaaacttgacaacagacagattaacaggagaaaaggcatacagatttattaaggtgcaagtgctgagagtcacacaaggtatgaaaattcaaagaagggccagaagcaaagaactccaaggtgatggtgatgaaattcaaagatggaagcgcctccactccccacccaggctgcttggagaagagcctcacaggattattttcaaactagactctgctaatgacatgcacaagagtgccccattttcctcactccaatccccactctggcatcagccggttatgcaggaggttgagaggcagtacaaagaaaagaaagaccttgtgagagagggagggaaatgcaggtgtcagggtagacctggcaaggtggtattaactgagctcagtcttgaagctagaggtgggtggatggaagacattcccagcagaaggactagcaaatgcggaccatgggagctggtgtcccattgtgtccagaattggtgggttcttggtctcactgacttcaagaatgaagcctcggaccctcgcggagtgaagctgcagaccttcacggtgagtgttacagctcttaaggcggcgcgtctggagttgttggttcttccgggtgggctcgtggtctcgctggcttcaggtgtgaagctgcagactttcgcggtgagtgttacagctcataaacgcagtgtggacccaaagactgagggagccggctctggccttggccagcccagaaaggggctctcacagtgcagcagcgggccgaagggctcctcaagtgccgccaaagtgggaacccaggcagaggaggcgccgagagcaagcgagggctctgaggactgccagcacgctgtcacctctcaccatgaaagggtatggagccatgccaagaaggcaagtgggccaggtttgctggaggggcaagtttgggctggggctggattttgggcttctctcagggttttgcctctgactgcagtggatggtcacaccagtaactgcaggctccactccatacagctcaaggcctgtctgcttctgttgctgaaactgaaaaagctgatcaacagggcctcagctccttacagtggggtgatggcccttcccacatctccaggagggtctgtctgctga

SEQ ID NO: 134567 - DNA, 531 bp, Homo sapiens
atggggaaagttttagaggtctggatagatgatcaaagcggcaacaacattcctcctccccgacgagcaccaccccctgctccacggcatccagtcccatcgaccacccaaggtgctgaggagtgccagcgcacagggtgggactggcaggcagctccacctgcagccctggtgcgggatccagtaggtgaagccagctgggctcctgagtctggttgggacgtggagagtctttatgtcgagctcaggtattgtaaacacaccaatcagcaccctgtgtttagctcaaggtttgtgagtgcaccaatcgagactctgtatctagctgctctggtggggccttggagaacctttatgtctagctcagggattgtaaatacaccaatcagcaccctgtgtttagctcaagatgtgcatgaagcaccataccagagagatatggaactctattttcagaatttttcagaatgtccactgggcagccagctgattgaactcagaaatgggacatgttctctccctatgcggtga

SEQ ID NO: 134568 - DNA, 4021 bp, Homo sapiens
tttcgatttaggaagtttattttgccaaagttaaggatgtgtgcccgtgacacagcctcaggaagtcctgacgacatgtgcccaaggtggtcgggcacagcttggttttatacattttagggagacatgggacatcaatcagtatatgtaaggtatacattggttccatccagaaaggtgggacaactcgaagcagggaggggacttctgggtcataggtagataagaggcaaacggttgcattcttttgagtttctgattggcctttccaaaggaggcaggcagagacgcatctatctcagtgagcagaggtggctttgagttctgtcatttgtccacaaggaatttccttgtgagggaggtatgtagctttttaatcgtagtagctatcttttttaggaatagaatgggaggcaggtttgccctaagcagttcccagcttgactttctgctttggcttagtgattttggggccccaagatttattttcctttcacactgtaaactaagttcctcccaaagtaggttgagcctacgcccggggatgaacaaggacagcttggagattagaagcaagatggagtcggttaggttagttgtcctttcacggtcataattttctgttataatttttgcagaggcggtttcagcaccacggcggtcatggccagagcaaaaagtatgtttttgatgttgaaaggaaaggctggacctgactttggtatcagatttactgccagttccgggtggtttacatgatttgaggatcgttatgcattacataatgttaacatgaatgctgagtctgtgggtgctgatgtgaaggcagctgaagagttttggaagcttgattatggaggagatttacttgccacagcaaatcttcaatatggaggaaacctcgctattctggaaacagatgcctgaaagaacttttgtatctgcccaaggggtttttcctgaccactgcacaaagaaagaccatggcatttttgtagagaaagagtttaacagacacaagggtggccacgccatgtgggagactgagttgagaggtgacagcgtgctggcagtcctcacagccctcgcttgctctcggcacctcctctgcctgggctcccactttggcggcacttgaggagcccttcagcccaccgctgcactgtgggagcccctttctgggctggccaaggccagagctggcaccctcagcttgcagggaagtgtggaaggagtggcgtgagcgggaaccggggctgcgtgtggagcttgcgggccagatggagttccgggtgggcgtgggcttggcgggccccgcactgggagcagccggccggccctgtctcacttcatcacagaagaggacaaagaccagcgagtacaggaccagctcgggggggtgtggcaccgaatggaaatccatgagcagcacgtaggcaaacagcaggaggaaggcgatgtagaagaccacattccaggagaagaccacgaagggggaggtgaagaacgccacatagtaccaaagcagcttcttgtgcttgtcgacaggtttcttcctaaatgatacaaagccacagcccaccaagggtataataaacagacacaggataatcttccagttcttggtgtctcgggaaatctctccataccattgcttagaaagaaaattctggaccccaggctgggcgatgaaatgctggtctgtggcctccaccgccagctccagacagttgcttccaccccaagcttcacaggaatagaccagcagctgttctgccaagtcttcatcgctgctgtaacactcagtgaacagctctccaccatctggtctatgagtgccgctggcaatgtctgtgccacatggcagatccgcgcccaccacagcattccacactgtggactcaccaacagcccgggtctcgtactcattagccagctcctcggactccccagcagcattgatgtcgttcttcactttggccagagtcttcagaagcttgctggctcccagggctgccagagtgcagcccctggtctgctcccaaatgactttggagagttccttcttattctgaagaatggcccagatgaagagagcttgcagggggtgccgagtaataggagacacgtcgtggagttctatgtccatctcgtcccggccatttctgtcttccttccggaagcctcttcggaagttcgcaaccagtttccagacaaacgtgaggagggcatcattataggaattcttggcgatctgcagattccggtacacaagcgtgctgaagtggttggagaagagttcagtgaggacatcatgggtgagaaacttccgtaggttcaagccattctccagaaagaggcggacaaacttgggtctgtcctttatgagagccgtaaacatgacttcttgaaggtcagcagacttgagaaccaccagcatatgagaagaggctttgccgtcagtcacatctttgctctcaaccttgattctaccattttccagccatgtgacctggattattgtgtctctgagcctcggtttgctcttctcccatcggcggtcattggtgaaaatctcatcattggctaagtccagctggttccactccagcagaagcttcagctgcccattccagttatccttgtcttgctcactggtgctgaaggctttgtatagagcgtaggagatggcattgctcacaatttcatccccagcttcttccattttaataactgttaataggtgagaacattcgagaatttctttgagccatttgatccaactctcagtctcctcctcaggcagccgggacaccgtgcggggtaaaaagcgcaccagcttctccttgacggcagaagatgtcagggcatcctccacctccaccaggctagcgatcacatcagcgatctggcccgagccttccaccaccacacaaggaattttatttttgatggaggtattgatggctttcaaagtctcttttccacctccttgggcaaaacacacaatggggatcttgccaccatagttggaatcttgaatagtgcgctcagagatatacttctctagctgattccggagctttgcttcgacagtgggatgtccatgacagccattgtccacgagcagcaaatgtgtgtggttgttgtccaggatatacagtggatctcttgtgaagtcatccataaggtactgggctaaaaaatagccctcagcatcgcaattcctgatgagggtgtcccggttggagaccatgccccaagctgctatgccaatggccacaatattctcctctgaactcctgctgatggtgttatctctcaccacctccccgatgtacttcatcaggccataatgggtgcctcccgtgagaatccaagcacctttggactgcgcgatgtagatgagccggctgaagatcttgcgcatgcgcggcttcagggcgaagttcttggcgcccccggtcacagaaatgaccaggttgggtgttttcaggtgccagtgctgggtcagcagctcgtaaaggatttccgcgtccgtgtcgcaggacagacgtatatacttccctttcttccccagtgtctcaaactgaatatccccaaaggcgtcggtaggaaattccttggtgtgtttcttgtagttccatttctcactttggttgatctgggtgccttccatgtgctggctctgggcatagccacacttgcacacattctccgtggccttggaatctttggtaaagaagacacattctcgtttcttaaaatttgcttgaataaaattcaccaagtcccaagaagccatgattgggcacgtctgtgtcctgaaggcagcgtagaagctggcgctttcactgtaagacaagtctgtgctccgagacgcgctggagtacagggtccgggtgctgtccagagtgtcattccttctgttcctcatgctgagcctggctgcccgaaaggacatcttttcctttacttctgcaggctccacgtcttctgtccacctgcatcctccaaccat

SEQ ID NO: 134569 - DNA, 2155 bp, Homo sapiens
atgcctgagcctcccacccactccatgggctcctgtgcggcccgagcctccccgatgagcaccaccccctgctccacggcacccagtcccatcgaccacccaagggctgaggaatgtgagcgcacggcgcaggactggcaggcagctccacctgcagccccggtgtgggatccactaggtgaagccagctgggctcctgagtctggaactaacatttccattacacctggaaatgccacatttgtgacccgggtgcagggacaggcttggtttgcctcatgtatcactggtcatgatatgtctagtttaaaaacttccagtgtcgtggtattaaggagacaatctgaggcacttctaccagccaatttgacatgcaattggcaagattcttctgcccttgccaccttagaaagtgccctgtcccaggtcagacacaaaagattcacatttacacttatggtctttacaggctcagccatagtcattatggcaactgttagcattgctgttgtatctattactgaatcagtacaaacaactgcttttgtagataatctggccaaaaatatatgtgatgaacttctcctacaggacatggatgaagctggaaaccaacattctcagcaaaataacacaagaacagaaaaccaaacaccacatgttctcactcataagtgggagttgaacaatgagaacatacggatacagggaggggaacattacatactggggcctgttggtggcaggttgccaacatccaaactcgctgttgattgccagctcctgctccttgcagcagcccagcatgctctctgctggtgccaaaatacccttccaccaaaccccgctaacttctggaactgtcctagagggtttcctaccctagcaagtgagcttgcctatgtcagccctaaccttgctcttgtcattcagctgagccagaggaaaaaatttgagctattctggggtggtctacagagaaccatcttctttcccttcagtgttctcagaatattgactgttgatgaacaagccaatgatgtgagtgtggctgcagcaaggacccttcaaattttcagagatgacatgattgtatatctagaaaaccccattgtctcagcccaaaatctccttaagctgataagcaacttcagcaaaatctcaggatacaaaatcaatgtacaaaaatcacaagcattcttatacaccaacaacagacaaacagagagccaaatcatgagtgaactcccattcacaactgcttcaaagagaataaaatacctaggaatccaacttacaagggatgtgaaggacctcttcaaggagaactacaaatcactgctcaaggaaataaaagaggatacaaacaaatggaagaacattccatgctcatgggtaggaaaaatcaatatcgtgaaaatggccatactgcccaaggtaatttacagattcagtgccatccccatcaagctaccaatgactttcttcacagaattggaaaaaaacaactttaaatttcatatggaaccaaaaaagagcccacactgccaagtcaatcctaagtcaaaagaacaaagctggaggcatcacactacctgacttcaaactatactacaaggctacagtaaccaaaacagcatggtactggtaccaaaacagagatatagatcaatggaacagaacagagccctcagaaataacgctgcttatctacaactatctgatctttgacaaacctgagaaaaacaagcaatggggaaaggattccctatttaataaatggtgctgggaaaactggctagccatatgtaggaagctgaaactggatcccttccttataccttatacaaaaatcaattcaagatggattaaagacttaaatgttagacctaaaaccataaaaaccctagaagaaaacctaggcattaccattcaggacataggcatgggcaaggacttcttgtctaaaacaccaaaagcaatggcaacaaaagacaaaattgacaaatgggatctgattaaactaaagagcttctgcacagccaaagaaactaccatcagagtgaacaggcaacctacaaaatgggaaaaaattttcgcaacctactcatgtgaaaaagggctaatatccagaatctacaatgaactcaaataa

SEQ ID NO: 134570 - DNA, 1603 bp, Homo sapiens
tcagccttggcaaaaacaccttctaaataactgagacttgctcagaaattcaggaacacaaaccaaaggctcagggtagaaaaacttggaattatcgctgtctttaaagacacggcccgcgtttttccagctgtcgattgagttgtcgccgaccttttgataaaacatgtagattgatgtgtcatcagcgtctttcgggcttcccgcaagagcaaacacaacgtgatagccgttgtattcagctactgttccgtcagcgttttgcagcggccagctgtcccacacatcaagtccttttgcagactcaatatttttaatcgttgattgatcgaattgaggcacttggtatttttcgttttgctgctgtttagggatctgcagcatatcatggcgtgtaatatgagagacgccgtacgtttctttgtatgctttttggttattttctttcgcgaaggcttgagtcgctcctccggcgctgtgcttgatttctcgccgggccttagctgccttcccgcggggcagggctcaggacctgcagccggtcatgccggagcctctccccaacccccaccgtgggcttccgcgtggcccgagcctccccgacgagcaccaccctcctactccacggcacccagtcccatcgaccacccaagggctgaggagtgcaggcgcacggcaccaggactggtttgtaaatgcaccaatcagtaccctgtcaaaacggaccaatcagctctctgtaaaacggaccagtcagctctctgtaaaatggaccaatcagcaggatgtgggagtgaagctgcagagcttcacggtgagtgttacagctgttaaggcagcgcgtctggagttgtttgttcctcccggtgggttcgtggtctcgctggtttcaggagtgaagctgcagaccttcccagtgcgtgttacagctcataaaggcagtgtggacccaaagagtgagcagcagcaagatttattgcaaagagcgaaagaacaaagcttgcacagtatggaaggggatggaccgggttgccactgctggctggggcagcctgcttttattctcttatctggccccacccacatcctgctgattggtccattttaccgagaacccagtgctgagggagccagctccggccttggccaccccagaaaggggctcccacagtgcagcggtgggctgaaggtctcctcaagtgccgccaaagtgggagcccaggcagaggaggcgccgagagcaagcgacggctacgaggacggccagcacgctgtcacctctcagtgccactccatggatgagtgtgcagatgacactggatcaaaaatccatctgactcaacaggtagacatggcggcacaggttgcctctggaatggcctatctggagtctcggaactacattcacagagatctggctgccagaaatgtcctcgttggtgaacataatatctacaaagtagcagattttggacttgccagagtttttaaggtatggcaccagagtctcagaacattaggttatgactatttacccttttacaatggaaagttagcagcattaactgagcagatagacagagaaggaaatagagcaggatga

SEQ ID NO: 134571 - DNA, 1284 bp, Homo sapiens
atgaacaacttgagacgcgctgccttaagagctgtaacactcaccgcgaaggtctgcagcttcactcctgagccagcgagaccacaaacccaccagaaggaagaaactccgaacacatctgaacatcagaaggaacaaactccggacacgccacctttaagaactgtaacactcaccgcgagggtccacggcttcattcttgaagtcagtgagaccaagaacccaccaattccggacacaccagctactagggaggctgagggcctacgttcaaggctagcagtgtactcaacaagggacagtccctgtgtggcctgttcaggatcctatacacaggctcagggctctttgggcaggaaattccaggatccggttagcttatttgaagatcttactaaaaatacaccagagcccaacctccgaccaattacatcaaaacctgtcctagtgcaggaaactctctccaactttgcacttttcttaaaggaaagtaatggacccagtaaaggtttggggaagccattaaagggactgacctgaaaggccctgcatggattcccatgtccatggagtttggaagataatacagcaaggctgtaccaagtgcagggtcctcacttttaatcctctatcccagaaaacaacggtgggcccaaaaggatgaagagagccattgttgagaccttggccaatgtgactgcttgacaaagaatggtgtggccgatgtgtctatttgaagattttgtgaatctcactcctcaggagaccattgcatcattgggccgcacactggtggtcccatggaaaaagccagatgactttgggcaaagggtgggaaatgaaagaaagttcaaagaccagggaacgctgggaagtccgtttggccttgtggtgtaaattggatcgcccaataaacattccccttggatgtagtctgaggccccctaaactcatctgttatcctgctagctgtagaaatgtatcctgataaacattaaacactgtaatcttaaaagtgtaattgtgtgactttttcagagttgctttaaagtacctgtagtgagaaactgatttatgatcacttggaagatttgtatagttttataaaactcagttaaaatgtctgtttcaatgacctgtattttgccagacttaaatcacagatgggtattaaacttgtcagaatttctttgtcattcaagcctgtgaataaaaaccctgtatggcacttattatgaggctattaaaagaatccaaattcaacctaaaaaaaaaaaaaaaaaa

SEQ ID NO: 134572 - DNA, 669 bp, Homo sapiens
  misc_feature (1)...(669): n = a,t,c or g
ttttttttttttagaatgaaataatcagtttaatatttatagacttgagaaagaacttgaattaaaattcagtctggagtctgaattagcaccatctgaatacagaaagaattctatgtacatgcacaaattagtttaattaacatatataggtaaaatatatttgtttgttttacttgatatacttgttttgacagactcttcctggggttacacttatttttattagttggctactgatccccagaagaactccagtcgttgtagttgtgcggaattcaaattctacaagaaggtccaatcccactttgaatccaccaactgctttggcaaaaccggttccgtcaaaatatgttcccctctgagcatttgcaaaacatgtcccaacatggaagctggaggtgggttgttccagatcggcaggggcctctgccatgtggagattcctgacgcagccatcaatgctataggtcactggaccaattcttcgggtagtgtagttgatgggtaacccaccaacatacagcattcccacgacatnccagatgtcggctttnttgggactgatggttctgttggaagccccatctacataaagaattccttcttgcttacttctcattatctttaatctgtgccactggccatcattgaattgggtgggatcat

SEQ ID NO: 134573 - DNA, 540 bp, Homo sapiens
cctccagcttccatgttgggacatgttttgcaaatgctcaggaggggaacatattttgacggaaccggttttgccaaagcagttcgtggattcaaagtgggattggaccttcttgtagaatttgaattccgcacaactacaacgactggattcttctggggttccagggcatttgtgtgatggacaatggcataaagtcactgccaacaagatcaaacaccaaaggcacaggcaagccactggaggttaattttgccaaggccctggaactgaggggcgttcaacctgtatcatgcccagccaactaataaaaataagtgtaaccccaggaagagtctgtcaaaacaagtatatcaagtaaaacaaacaaatatattttacctatatatgttaattaaactaatttgtgcatgtacatagaattctttctgtattcagatggtgctaattcagactccagactgaattttaattcaattctttctcaagtctataaataatattaaactgattatttcattctaaaaaaaaaaaaaaaaa

SEQ ID NO: 134574 - DNA, 486 bp, Homo sapiens
gcgtcactgagacctggaagtgcgctggaattcctcatagatatcgctcctttgaaagctgctatggaaccctgtgattaactctgaccgcatggactatgcagggcccgtgtgcttcaaaaacgctgacattggccgctgtgcccatgaaaagctccgcgaagactaagatggagcagctccaggtgaaataggtatccaacctgaggcagatgccaccccatactttgctacgcccaccccagttctgacacatggtccttgtgctgcagaatcagaaccagctcttttgatagggagcaagcagttcgggctttcaagaaacagtcacattgcaattgcatttgatgacaccaaagttaaaaaccgtctcacaattgagttggaagtaagaaccgaagctgaattccgcttgcttttttacatggctcgcatcaatcatgctgattttgcaacagttcagctgagaaatggattgccctactt

SEQ ID NO: 134575 - DNA, 462 bp, Homo sapiens
atggcagaggcccctgccgatctggaacaacccacctccagcttccatgttgggacatgttttgcaaatgctcagaggggaacatattttgacggaaccggttttgccaaagcggtgggccatttgatgcatattgccagtgctctgtgcagaagaggagtttttcgatattaccgggatgttacatcaggtgacttccgaaggttctccccacggcggcgacccatcagtcccaaaaaagccgacatcctggatgtcgtgggaatgctgtatgttgttgccgatgcagatgccactgtcaaaaatttagaacaggaagctgaccggctaatagataaactcaaacccatcaaggaacttgaggataacctaaagaaaaacatctctgagataaaggaattgataaaccaagctcggaaacaagccaattctgtaagttctttttatcgtcagtatcagtaa

SEQ ID NO: 134576 - DNA, 9746 bp, Homo sapiens
  misc_feature (1)...(9746): n = a,t,c or g
cagcgactcctctggctcccgagaagtggatccggtcgcggccactacgatgccgggagccgccggggtcctcctccttctgctgctctccggaggcctcgggggcgtacaggcgcagcggccgcagcagcagcggcagtcacaggcacatcagcaaagaggtttattccctgctgtcctgaatcttgcttctaatgctcttatcacgaccaatgcaacatgtggagaaaaaggacctgaaatgtactgcaaattggtagaacatgtccctgggcagcctgtgaggaacccgcagtgtcgaatctgcaatcaaaacagcagcaatccaaaccagagacacccgattacaaatgctattgatggaaagaacacttggtggcagagtcccagtattaagaatggaatcgaataccattatgtgacaattacactggatttacagcaggtgttccagatcgcgtatgtgattgtgaaggcagctaactccccccggcctggaaactggattttggaacgctctcttgatgatgttggaatacaaggcctggcagtaacatggctgttacagaacacggaagccctaacgccttaaccaaattaatccccggaattggggcaccgtcaaaatgcccaagattgagtaggtcatctgcacttcattttactccaagatacaccccttagaaaatggagagattcacatctctttaatcaatgggagaccaagtgccgatgatccttctccagaactgctagaatttacctccgctcgctatattcgcctgagatttcagaggatccgcacactgaatgctgacttgatgatgtttgctcacaaagacccaagagaaattgaccccattgtcaccagaagatattactactcggtcaaggatatttcagttggagggatgtgcatctgctatggtcatgccagggcttgtccacttgatccagcgacaaataaatctcgctgtgagtgtgagcataacacatgtggcgatagctgtgatcagtgctgtccaggattccatcagaaaccctggagagctggaacttttctaactaaaactgaatgtgaagcatgcaattgtcatggaaaagctgaagaatgctattatgatgaaaatgttgccagaagaaatctgagtttgaatatacgtggaaagtacattggagggggtgtctgcattaattgtacccaaaacactgctggtataaactgcgagacatgtacagatggcttcttcagacccaaaggggtatctccaaattatccaaggccatgccagccatgtcattgcgatccaattggttccttaaatgaagtctgtgtcaaggatgagaaacatgctcgacgaggtttggcacctggatcctgtcattgcaaaactggttttggaggtgtgagctgtgatcggtgtgccaggggctacactggctacccggactgcaaagcctgtaactgcagtgggttagggagcaaaaatgaggatccttgttttggcccctgtatctgcaaggaaaatgttgaaggaggagactgtagtcgttgcaaatccggcttcttcaatttgcaagaggataattggaaaggctgcgatgagtgtttctgttcaggggtttcaaacagatgtcagagttcctactggacctatggcaaaatacaagatatgagtggctggtatctgactgaccttcctggccgcattcgagtggctccccagcaggacgacttggactcacctcagcagatcagcatcagtaacgcggaggcccggcaagccctgccgcacagctactactggagcgcgccggctccctatctgggaaacaaactcccagcagtaggaggacagttgacatttaccatatcatatgaccttgaagaagaggaagaagatacagaacgtgttctccagcttatgattatcttagagggtaatgacttgagcatcagcacagcccaagatgaggtgtacctgcacccatctgaagaacatactaatgtattgttacttaaagaagaatcatttaccatacatggcacacattttccagtccgtagaaaggaatttatgacagtgcttgcgaatttgaagagagtcctcctacaaatcacatacagctttgggatggatgccatcttcaggttgagctctgttaaccttgaatccgctgtctcctatcctactgatggaagcattgcagcagctgtagaagtgtgtcagtgcccaccagggtatactggctcctcttgtgaatcttgttggcctaggcacaggcgagttaacggcactatttttggtggcatctgtgagccatgtcagtgctttggtcatgcggagtcctgtgatgacgtcactggagaatgcctgaactgtaaggatcacacaggtggcccatattgtgataaatgtcttcctggtttctatggcgagcctactaaaggaacctctgaagactgtcaaccctgtgcctgtccactcaatatcccatccaataactttagcccaacgtgccatttagaccggagtcttggattgatctgtgatggatgccctgtcgggtacacaggaccacgctgtgagaggtgtgcagaaggctattttggacaaccctctgtacctggaggatcatgtcagccatgccaatgcaatgacaaccttgacttctccatccctggcagctgtgacagcttgtctggctcctgtctgatatgtaaaccaggtacaacaggccggtactgtgagctctgtgctgatggatattttggagatgcagttgatgcgaagaactgtcagccctgtcgctgtaatgccggtggctctttctctgaggtttgccacagtcaaactggacagtgtgagtgcagagccaacgttcagggtcagagatgtgacaaatgcaaggctgggacctttggcctacaatcagcaaggggctgtgttccctgcaactgcaattcttttgggtctaagtcattcgactgtgaagagagtggacaatgttggtgccaacctggagtcacagggaagaaatgtgaccgctgtgcccacggctatttcaacttccaagaaggaggctgcacagcttgtgaatgttctcatctgggtaataattgtgacccaaagactgggcgatgcatttgcccacccaataccattggagagaaatgttctaaatgtgcacccaatacctggggccacagcattaccactggttgtaaggcttgtaactgcagcacagtgggatccttggatttccaatgcaatgtaaatacaggccaatgcaactgtcatccaaaattctctggtgcaaaatgtacagagtgcagtcgaggtcactggaactaccctcgctgcaatctctgtgactgcttcctccctgggacagatgccacaacctgtgattcagagactaaaaaatgctcctgtagtgatcaaactgggcagtgcacttgtaaggtgaatgtggaaggcatccactgtgacagatgccggcctggcaaattcggactcgatgccaagaatccacttggctgcagcagctgctattgcttcggcactactacccagtgctctgaagcaaaaggactgatccggacgtgggtgactctgaaggctgagcagaccattctacccctggtagatgaggctctgcagcacacgaccaccaagggcattgtttttcaacatccagagattgttgcccacatggacctgatgagagaagatctccatttggaacctttttattggaaacttccagaacaatttgaaggaaagaagttgatggcctatgggggcaaactcaagtatgcaatctatttcgaggctcgggaagaaacaggtttctctacttatatttcctcaagtgatcattcgaggtgggacacctactcatgctagaattatcgtcaggcatatggctgctcctctgattggccaattgacaaggcatgaaattgaaatgacagagaaagaatggaaatattatggggatgatcctcgagtccatagaactgtgacccgagaagacttcttggatatactatatgatattcattacattcttatcaaagctacttatggaaatttcatgcgacaaagcaggatttctgaaatctcaatggaggtagctgaacaaggacgtggaacaacaatgactcctccagctgacttgattgaaaaatgtgattgtcccctgggctattctggcctgtcctgtgaggcatgcttgccgggattttatcgactgcgttctcaaccaggtggccgcacccctggaccaaccctgggcacctgtgttccatgtcaatgtaatggacacagcagcctgtgtgaccctgaaacatcgatatgccagaattgtcaacatcacactgctggtgacttctgtgaacgatgtgctcttggatactatggaattgtcaagggattgccaaatgactgtcagcaatgtgcctgccctctgatttcttccagtaacaatttcagcccctcttgtgtcgcagaaggacttgacgactaccgctgcacggcttgtccacggggatatgaaggccagtactgtgaaaggtgtgcccctggctatactggcagtccaggcaaccctggaggctcctgccaagaatgtgagtgtgatccctatggctcactgcctgtgccctgtgaccctgtcacaggattctgcacgtgccgacctggagccacgggaaggaagtgtgacggctgcaagcactggcatgcacgcgagggctgggagtgtgttttttgtggagatgagtgcactggccttcttctcggtgacttggctcgcctggagcagatggtcatgagcatcaacctcactggtccgctgcctgcgccatataaaatgctgtatggtcttgaaaatatgactcaggagctaaagcacttgctgtcacctcagcgggccccagagaggcttattcagctggcagagggcaatctgaatacactcgtgaccgaaatgaacgagctgctgaccagggctaccaaagtgacagcagatggcgagcagaccggacaggatgctgagaggaccaacacaagagcaaagtccctgggagaattcattaaggagcttgcccgggatgcagaagctgtaaatgaaaaagctataaaactaaatgaaactctaggaactcgagacgaggcctttgagagaaatttggaagggcttcagaaagagattgaccagatgattaaagaactgaggaggaaaaatctagagacacaaaaggaaattgctgaagatgagttggtagctgcagaagcccttctgaaaaaagtgaagaagctgtttggagagtcccggggggaaaatgaagaaatggagaaggatctccgggaaaaactggctgactacaaaaacaaagttgatgatgcttgggaccttttgagagaagccacagataaaatcagagaagctaatcgcctatttgcagtaaatcagaaaaacatgactgcattggagaaaaagaaggaggctgttgagagcggcaaacgacaaattgagaacactttaaaagaaggcaatgacatactcgatgaagccaaccgtcttgcagatgaaatcaactccatcatagactatgttgaagacatccaaactaaattgccacctatgtctgaggagcttaatgataaaatagatgacctctcccaagaaataaaggacaggaagcttgctgagaaggtgtcccaggctgagagccacgcagctcagttgaatgactcatctgctgtccttgatggaatccttgatgaggctaaaaacatctccttcaatgccactgcagccttcaaagcttacagcaatattaaggactatattgatgaagctgagaaagttgccaaagaagccaaagatcttgcacatgaagctacaaaactggcaacaggtcctcggggtttattaaaggaagatgccaaaggctgtcttcagaaaagcttcaggattcttaacgaagccaagaagttagcaaatgatgtaaaagaaaatgaagaccatctaaatggcttaaaaaccaggatagaaaatgctgatgctagaaatggggatctcttgagaactttgaatgacactttgggaaagttatcagctattccaaatgatacagctgctaaactgcaagctgttaaggacaaagccagacaagccaacgacacagctaaagatgtactggcacagattacagagctccaccagaacctcgatggcctgaagaagaattacaataaactagcagacagcgtcgccaaaacgaatgctgtggttaaagatccttccaagaacaaaatcattgccgatgcagatgccactgtcaaaaatttagaacaggaagctgaccggctaatagataaactcaaacccatcaaggaacttgaggataacctaaagaaaaacatctctgagataaaggaattgataaaccaagctcggaaacaagccaattctatcaaagtatctgtgtcttcaggaggtgactgcattcgaacatacaaaccagaaatcaagaaaggaagttacaataatattgttgtcaacgtaaagacagctgttgctgataacctcctcttttatcttggaagtgccaaatttattgactttctggctatagaaatgcgtaaaggcaaagtcagcttcctctgggatgttggatctggagttggacgtgtagagtacccagatttgactattgatgactcatattggtaccgtatcgtagcatcaagaactgggagaaatggaactatttctgtgagagccctggatggacccaaagccagcattgtgcccagcacacaccattcgacgtctcctccagggtacacgattctagatgtggatgcaaatgcaatgctgtttgttggtggcctgactgggaaattaaagaaggctgatgctgtacgtgtgattacattcactggctgcatgggagaaacatactttgacaacaaacctataggtttgtggaatttccgagaaaaagaaggtgactgcaaagggatgcactgtcagtcctcaggtggaagatagtgaggggactattcaatttgatggagaaggttatgccattggtcaagcccgtcccattcgctggtaccccaacatctccactgtcatgttcaagttcagaacattttcttcgagtgctcttctgatgtatcttgccacacgagacctgagagatttcatgagtgtggagctcactgatgggcacataaaagtcagttacgatctgggctcaggaatggcttccgttgtcagcaatcaaaaccataatgatgggaaatggaaatcattcactctgtcaagaattcaaaaacaagccaatatatcaattgtagatatagatactaatcaggaggagaatatagcaacttcgtcttctggaaacaactttggtcttgacttgaaagcagatgacaaaatatattttggtggcctgccaacgctgagaaacttgagtatgaaagcaaggccagaagtaaatctgaagaaatattccggctgcctcaaagatattgaaatttcaagaactccgtacaatatactcagtagtcccgattatgttggtgttaccaaaggatgttccctggagaatgtttacacagttagctttcctaagcctggttttgtggagctctcccctgtgccaattgatgtaggaacagaaatcaacctgtcattcagcaccaagaatgagtccggcatcattcttttgggaagtggagggacaccagcaccacctagggagaaaacgaaggcagactggacaggcctattatgtaatactcctcaacaggggccgtctggaagtgcatctctccacaggggcacgaacaatgaggaaaattgtcatcagaccagagccgaatctgtttcatgatggaagagaacgttccgttcatgtagagcgaactagaggcatctttacagttcaagtggatgaaaacagaagatacatgcaaaacctgacagttgaacagccctatcgaagttaaaaagcttttccgttgggggtgctccacctgaatttcaaccttccccactcagaaatattcctccttttgaaggctgcatatggaatcttgttattaactctgtccccatggactttgcaaggcctgtgtccttcaaaaatgctgacattggtcgctgtgcccatcagaaactccgtgaaagatgaagatggagcagctcccagctgaaatagttatccagcctgagccagttcccaccccagcctttcctacgcccaccccagttctgacacatggtccttgtgctgcagaatcagaaccagctcttttgatagggagcaagcagttcgggctttcaagaaacagtcacattgcaattgcatttgatgacaccaaagttaaaaaccgtctcacaattgagttggaagtaagaaccgaagctgaatccggcttgcttttttacatggctcgcatcaatcatgctgattttgcaacagttcagctgagaaatggattgccctacttcagctatgacttggggagttgggacacccacaaccaatgatccccaccaaaatcaatgatggccagtggcacaagattaagataatgagaagtaagcaagaaggaattctttatgtagatgggggctttccaacagaaccatcagtcccaaaaaaagccgacatcctggatgtcgtnggggaatgctgtatgttggtgggttacccatcaactacactacccgaagaattggtccagtgacctatagcattgatggctgcgtcaggaatctccacatggcagaaggcccctgccgatctggaacaacccacctccagcttccatgttgggacatgtttttgcaaatgctcagaggggaacatattttgacgggaacccggttttgccaaagcaagtttgtggaattcaaagtgggaattgacccttcttgtagaatttgaattccgcacaactacaacgactggagttttttttggggatcagtagtcaaaaaaatgggagggaatggggtattaaaaattattaattaaaaagttgatgttttatggtcccaatggtgcggggcaagattcaactgcctgtcctatgatgcctggggttctcagggcatttgtgtgatggacaatgggcataaaatcccctgccccacaagatcaaacacccgcattgagcctcacagtgcgatggggaaccagggtnggaagccccaaagccccaaaccccagcatcctacatcagctgaccaccaattgcccctgtgttttgttggcagggcttccccagatgaccgcaaaaagcagtttggcctaacaaccacgtattccgttccgagggtgcatcagatccccttaagctcaccaaaggcacatggcagtccactggagtgttaattttgccaaggccctgaaattgaggggcggttccanccctgtatccatgcccccagcccaacctaataaaaataagtgttaacccccaggaagagtcttgttcaaaacaagtatatcaagtaaaacaaacaaataaatatattttacctatatatgttaattaaactaatttgtgcatgtacatagaattccttctgtattcagatggtgctaattcagactccagactgaattttacttcaagctctttctcacagtctataaataatattaaactgattatttcattctaaaaaaaaaaaaaaaaaaaaaagat

SEQ ID NO: 134577 - DNA, 445 bp, Homo sapiens
tggtcagttagtgatgccccttgacgctcgaccagaacgtcccatggatggaatgaaggtgcgggcatttatggagcgcctgctgtttgtcaggcgaggtactgataagcgctggagtgtaaggatgtacgtgacctgctctcagagttcaaatttaaatgaagagatatacattaatcaagtagtcattcaagcaaatatgaaattacaactgtgggctatgcgaacagatgacgcgaggggcctgtccagtctgggagatacggaaaggaaaggcccagggctgtttggtgagcggttgcaacgcctggagggtgatgtccagcgcctggctaaaacatatggtaccatcagtggcctggtgactagccacgaggatcccaacaggatgactggtggccccagggttcctgctgtccctgtgggctttgcattcatccttgag

SEQ ID NO: 134578 - DNA, 4055 bp, Homo sapiens
atgggccgccgccgcctgctcgtctggctgtgcgccgtcgcggcgctgctctcgggggcgcaggccaggggcaccccgctcctggcgcggcctgcgccgcccggtgcctcccgctacagtctctacacgacgggatggcgcccgcggctgcgcccggggccgcacaaggccctctgtgcctatgtggtgcacaggaatgtgacctgcatcctacaggagggagcggagagctacgtaaaggctgaataccggcagtgtagatgggggcccaagtgccccgggacagtcacgtaccgcacagtactcagacccaaatacaaggttggctacaagacagtgacagacctcgcctggcgttgctgtcccggcttcactgggaaacgctgccctgagcacctcacggaccatggggctgcctcaccccagctggagcctgagcctcagattccttcagggcagctggacccaggccccaggcccccttcctacagcagagcagcccccagccctcatggaaggaaaggcccagggctgtttggtgagcggctggaacgcctggagggtgatgtccagcgcctggctcaaacatatggtaccctcagtggcctggtggctagccacgaggatcccaacaggatgactggtggccccagggctcctgctgtccctgtgggctttggggtcatccctgaggggcttgtgggcccaggagacagagccagagggccactaacacctcccttagacgagatcctaagcaaggtgacagaggtgagcaacactcttcagaccaaggtgcagcttctagacaaggtgcatgggctggcacttggccatgaggcccacctgcagcggctgcgggaagccccaccatccccgctcacctccctggccctgctggaggagtacgtggaccgacggctgcaccgactctgggggagcctgctggatggctttgagcagaagctgcaaggcgtccagagtgagtgtgacctgcgggtgcaggaggtacggcggcaatgtgaggagggtcaggccgccagccggaggctgcaccagagccttgatggccgggagctggccctgcgccaggagctgtcacagctgggcagccagctgcagggcctgagcgtgtctggcaggggcagctgctgtgggcaactagccttgatcaatgcccgtatggatggccttgagagggccctgcaggcagtcaccgagacccaaaggggccccggtgccccggccggggatgagcttacgaggctctctgctgccatgctcgagggaggtgtggacgggctgcttgagggtctggagacgctcaatgggacagagggtggagcaaggggatgctgtctgaggttggacatgggggggtggggagtgggcggctttgggaccatgctggaagagcgcgtgcagagcctcgaggagcgcctagcaacattggctggggagctaagccatgacagcgcctctccgggcaggtcagctcggccccttgtacagacagagctggctgtgctagagcaacggttggtctcactggagacttcgtgcaccccgagcaccacctcagccatcctggacagcctcgtggcagaggtgaaggcctggcagagccggagcgaggccctcctacgccaggtggccagccacgcagcactgctccagcagctcaatggcactgtggccgaggtccagggacagctggcagaagggacgggcagctcacccgaaggcgagatcactctgctcaaggtcaatctgaactcagtgagcaagtcgctcacaggcctcagtgactctgtcagcccatacctctgaggccttcttggctgccaacacgtccctggatgagcgggaacgcaaggtggaagccgaagtccaggccatccaggagcaggtcagcagccaaggctccaggcttcaggctggccacaggcaggtcctgaacctgcgtggggagctggagcaactcaaggctggtgtggccaaggtggccagtgggctgagccgctgccaggacacagcccagaaacttcagcacacagtgggacactttgaccagcgggtggcacaagtggagggtgcgtgcaggaggctgggcctgctggccgcgggcctggacagcttgcccactgagccactgaggcccagagagggcctgtggagccatgtggaccagctgaatcgtacgctggcccagcacacgcaggacattgcccgcctccgggatgacctactggactgccaggcccagctggctgagcagagcccagccttatccagcagcgccttccagccttccctggctagcccaaatggcactaaggaggccactgagggaatcctccacgtggctgtcccagccaccaaaacccatgcacagtgctgcagaaactggacagttccggacagcggtcaaggcaaggatgtcatgcttgaaggccagggtagacttgagagagttcacattccactgtcagcaaatcagtgtctggacagccagctgcagggcctgagcatggctggcaggggcagctgctgtggcaaactggccttgatcagtgtccgtatgtaaaggccttgagaggaccctgcaggcagtcagcaccagcctcagcaactgtgcagagacctacaggcccacagccagtggcatcgtccgcattgccctgtgcccacaagcaacagtccacagcccttggtggcttctgttccttgtcccctcggcttctcttccgcagccatcaggactaggtttgtgcaggaaggtgatgcccactggaactctcctcacacctggcagcttcatggatgttgtatctgaactaaggaccagaggctgccagatgtttctggctcctcacgtgtccttcaggacagaacagaagcacaaagactcaagccaagaagttctctttaattccctttgatcctcccccaagggtgaagggctttaaggcagctggtagaaccccaggaaagaacggaatccaggcaatctgtttagagaccccccactccaaatttatccttttcctttccttcccctaagatgtttccagggccctctggtgcccacactgtcctcttccttccacttgggggtggggaaatccttccttgcgaggtcaaggccattttctcttaaaaaaagtggccttgaattgaggccaaggcccttgaagaaggagccaccagttggaggaaaagggctccaaagccttgctttttaacacccctgcaaaacccccaccttcccaagatggttcacaaaaggtgagaaattcaggtacgaaaccatcaatggacaacttgaaaatgcatgttcctcaggcctatgcagttccccagagactcttgacaccggtctcttgctgaggctcccagcctcagtttcccccacagcagcacgggccccactgtgctgctcttcaggtccccacagccctgcctttggttcctggacatttggtattctgccctccactctggtactatcagagtagggcaggctctggattaaagcttttagccggtctaaagctactttcttcaaagacagtgggaggagaggttgctggggcatcagccctgcttcccacagctccttaggcaagagcttacccagcagctgtgagcaccaagctggccagcagaggctgggggaggactttcaggccaacacctgcccccagctgagtttgggactgtccttaagcgaggtctggagagaggcagcggcagcagccggacggggagcaggccaagccggaaccacagcctgcaggtgtgggtgtgtgtcatgtgctgagatgccagggcaccagcaagggggatatgttggcagtgatgtctggcttcggagggtacagtcctggctcccagacaaggggcggggagaacactgtgtccttccagaggctgtaccacactcccactgctgtcacccttcactgaagcctcgagcctcggtagggcctccctcttctccctgtcctatcaagagttacagcaaggtcccaggttgacagggagctcgtgcc

SEQ ID NO: 134579 - DNA, 529 bp, Homo sapiens; identical to SEQ ID NO: 117835

SEQ ID NO: 134580 - DNA, 1569 bp, Homo sapiens; identical to SEQ ID NO: 130834

SEQ ID NO: 134581 - DNA, 1964 bp, Homo sapiens
atggccattctgtttgaaatgaggttggggcagcagagctctgccaagtttccaggcttccagtcctctttctttcctgtgatacctgtaaacaaaccctctgggaagttcaaacgggacagagcccacttcagctcaacaaggctgctgtggccagactgccaaatttctcagctctggggagggtatctccgaaaaaaaggcagtagccccagtcagggacttatagataaaaccccatctccctggaaaaaagcacctagggaaaggggtggctgtgggcgcagcttcagcagatttaaacatccctgcctgacagcactgaagagagcagcggacctcccagcacagcattcaagctctgctaaggacacctcccaaaaggggccgacagacacctcatacaggagagctctggctggcatctggcaggtgccccctctgggacgaagctttcagaagaaagatcaggcagcaatctttgctgttgtgcagcctctgcaggtgatacccaggcaaacagggtcaggagtggacctccagcaaacttcagcagactggcagcagaggggcctgactgtcagaaggaaaactaacaaacagaagggaatagcatgttcactcaaagaccccatccgaggtcaccaacatcaaagaccaaaggatcacaacttctcgccagcaagggaacaaaactggacggagaatgagtttgacaaattgacagaagtaggcttcagaaggtgggtaataacaaactcctctgagctaaagaagcatgttctaacccaatgcaaggatgctaagaaccttgaaagaagcttagaggaattgctaactagaatacccagtgtagagaagaacataaatgacctcatggagctgaaaaacacagcacgagaacttcgtgaagcatacacaagtttcaatagcccaattgatcaagcagaagaaaggatatcagtgattgaagatcaatttaataaaataaacagagaagacaagattagagaaaaaagaataaaaaggaataaacaaagcctccaagaaatatgggactatgtgaaaagaccaaatctacagttaattggtgtacctgaaagtgacaaggaaaatggaaccaagttggaaaacactcttcagaatattatccaggagaacttccccaacctagcaagagaggccaacattcaaattcaggaaataccagagaacgccacaaagatactccttgagaagagcaactccaagacacataattagtgtgggttcaccaaagttgaaatgaaggaaaaaaatgttaaaggcagtcagagagaaaggtcggggttacccacaaagggaagcccatcagactaacaacagctgatctctcagcagaaactctacaagccagaagacagagtgggggccaatacttcaacattctttaaagaaaaggaatttttcaacccagaaatttcatatccagcccaaactaagcttcataagcgaaggagaaataaaatactttatagacaagccaaatgctgagagatttttgtcaccaccagggactggcctgccctaaaagagcaccaggcctgccctaaaagagctccttgaaggaagaagcacttaaacatgggaaagggaaccacccgggtacccagcttgcttgccaaaattcattgcccaaaattgttaaaggacccttcgagggcttagggaagggaacttgcatcaactaatgagcaaaataaccagctaacattcataatgacaggatcaaattcacacataagaatattaactttaaatgtaaatggactaaatgctccaattaaaagacacagactgggcaaattggataaagagtcaagacccatcagtgtgctgtattcaggaaacccatctcacgtgcagagacacacataggctcaaaataaaaggatggaggaagatctaccaagcaaatggaaaac

SEQ ID NO: 134582 - DNA, 1081 bp, Homo sapiens
ggcacgagaagcgaaagcccgggcgactagccgggagaccagagatctagcgactgaagcagcatggccaagccgtgttggggtgcgcctgagcggggaagcccgcaaacaggtggaggtcttcagacagaatcttttccaggaggctgaaggaatttcttctcagagttcttgccacagaaaatcatataccctgaatccagcttctttccaagaggacttccccttcaatgtggcttgaccttgaacctttcgtccggggccccactgggacatccccccatccccagacccctccaccccaaggatgatgagatgggaaacagataaggcagggagaagaaaggaagttccctaaagtgtgggattttttccctgggggaattgaggaaagttcctgttccctggtttgccctgggttaaagccagaaagtctgggacttttcaaagagaaattgcattcttggtgatttacattggatccagacacctgattccccaagatttgaagatggaaatgattttgggggtagccaatccaggaagaaggtgctggaaaaagggtgaatgcctgtcaagaccaaagtgggaagcttttccagacaaccatttccaagtactttcttcagaacgtggggatgcctgtgggccaaggcctcccaaggagactcatgtaatggattaccgggccttggtgcatgaacgagatgaggcagcctatggggagctcagggccatggtgctggacctgagggccttctacgctgagatcgtaaagagcagtggaattggagcacatgtgagcttcaaggtgcagaacatacacagctcctactgctctgggcctactgtgtctcccacatgtgtcactggactgcctgcatcacagtctcctgactcaggagcccagctggcttcatccagtggatcccacacctgtgctgcaggtggagctgcctgccagtcccgtgccttgcgcctgcactcctcagcccttgggtggtcgatgggactgggcaccgtggagcagggggcggcgctcattgaggaggttcaggctgcacaggagcccacagagggg

SEQ ID NO: 134583 - DNA, 1935 bp, Homo sapiens
atggctgcttctggaactggaacaggaaatatacaagatgagcctggaaccatttacagtgtcaaaaaccgggaatatagacttgtatggtggtacttgttggagaaaaacatcaggccccgcatgtggtacagcgatgtgatgtgggtgtgtaagcagctgccaatcaaaggcgaaaggcacagcacagtgtcaagccagcacctgtgtctaccaaaacacacaggggtacgagctggtgggctccaagatcccagcaacgacgttcatccagccatgaccctcagagccacaatgaccaggagtcgcaacaatgagtcgagggccggtcctgccattgggctgatgctggcacccccacgggaactcttcaaaaagacgcctcgccagattgcactgatggacgttggaaacatgggccagtctgtggacattagtgggcttcagttagccttggccgaacgccaatctgaattgccaacgcaaagcaaagcgagcttccccagtattctcagtgacccagacccggattcttctaattctggatttgacagctcagttgcctctcagatcacagaagctttagtcagcggaccaaagccacctattgaaagcctttctagacaagtcccagacattttgaaggctaaatatagcacactgagaggacaaatagctgacacacaggcgtccggggaaaatcacggcccctgggcaatgaggggacacagcttcaatgacttactgatcgccactacccaaacagagctgcccaccagaaaaaatgccaagctctccctgagtttagattctgtctgcattatatcaacgttacagaattgcacattttccaaaaaccgccaccaccacagagctgccctgtgtcccatgggtcttgactttaccacaatcctaagtggtcccatgaagaccagccccccacagcacacgtggcaggtcagcgctgcttcatcggcattggcttcccagctaaatgctcaaagctcaaaacagctcctggagcaggcccacgtgctgcccaagttgcccaagttgagtccttgttgccactcaacaggaccactggttaccaaagcaccgcctccgtccagaatcctaactacactctgccccttccatggggaaccctcagctgcctacagctccctccatgcagcaacctgccaactcccacccactcacccggtctcagttgcaaaggtggaacatggggtcaagactgccctaggtcagacacagctctcagaatctgcccacatgatcacaataggagaagactgccctgagtcagacacagccctcagaaactgcccacaccattatgtgtatgcatccaggagcacattgtgtttctgccacgaggttgaacctgagatcgacatctttgcatgggccttgtatccttttgcatttagctttttgatgaatgacactgacagtgtgaatcagacagtcagtccaggtagcgtaactcgctccagacacctgaggctagcagccacacccattgtcctctcttggtttcctgagaaagcaaaggaccattgtgtggatgtcatcattcccatgtatctggggcaccatgtgcagctaatgaagctgacttttaaaaagaaggctgtgagctttgcagatgctgctgccgcccagggccccctgcttccagccatggtcaaccccaccatgtttttccacattgctgtcgatggcgagcccttgggctgtgtctccttcgagcgtgaacgtttcccagttttttatctgccctgccaagatgccaagacagagtggttggattgcaagcatgtggtctttggcaaggtgaaagatggcatgaatattgtggaggtcatggagcacttggggtccaagaatggcaagatcagcaatcagcaagaagatcaccattgctga

SEQ ID NO: 134584 - DNA, 1091 bp, Homo sapiens
gcaacgagagagcaaaactccatctcaaaaagaaaaaagaaagaaagaaatgctaggggaaaatgttttaactagtcattcttcccagtagctaatgaagctgacttttaaaaagaaggctgtgagctttgcagatgctgctgccgcccagggccccctgcttccagccatgggtcaaccccaccatgtttttccacattgctgtcgatgggcgagcccttgggctgtgtctccttcgaggtaaggggcctggaaagcaagaagtgactgctcatctaatccataaaactatgttaacagattggagctgtttgcagacaaggttccaaagacagcagaaaaattccatggctctgagcactggagaaaaaggatttggttataagggttccctgctttcacagaattattccagggtttaacgtgtcagagtggtgacttcacacgcccatacagcattggtggcaagtcccatctgccagggagaaatttgatgacaagaaccttcatcctgaagcatacgggtcctggcatcttgtccatggcaaatgctggacccagcgtgaacgtttcccagttttttattctgccctgccaagatgccaagaacagagtgggttggattgcaagcatgtggtctttggcaaggtgaaagatggcatgaatattgtggaggtcatggagcacttggggtccaagaatggcaagatcagcaatcagcaagaagatcaccattgctgactggacaactgcaataaatttgacgggtgtttctcttaaaaaaaaaaaaaaaatactgtgacagaccaaggtaaattgtttttgataattacagaagtgtgatttcttaatcagcagctgtcaaacatagtgttccttaatttaaaagcttgaacactaaattataaattggagaggttggaataattacggtcatatctctagaaacacaagtctttagtagcaaaaaagaaattagcaagagaagaaaactgttcagtactttgaaaggaaaaagttttcagtgatagtttttttagatgaaaattaacatgataaagaagtgacaggccaggtgtggtggttgacgc

SEQ ID NO: 134585 - DNA, 2569 bp, Homo sapiens
atggctgatgtgtacagctgctgctcaggccccaccctgaaatcttgggacgaaatttctgtgcccacggaaggtttcagaggcagattatctggattaaataagaaaagacctttagtaatcactgattctaagggaagccgactttcgcttcccgtcagcagcctttggcggaagagtgtcccgcctcttccgctctacagcggaggtggctgtggcggtggcgctggtggctgcggcggcggcggcggcagcggcgctcgagcggttcctgtcagggtcagccggcgggccccctgggtggtccacctgcaaatcgcggagcggcgccccagggatcgatggcgatgaactataacgcgaaggatgaagtggacggtgggcccccgtgtgctccggggggcaccgcgaagactcggagaccggataacacggccttcaaacagcaacggctgccagcttggcagcccatccttacggctggcacggtgctacctattttcttcatcatcggtctcatcttcattcccatcggcattggcatttttgtcacctccaacaacatccgcgagatcgagattgattataccggaacagagccttccagtccctgtaataaatgtttatctccggatgtgacaccttgcttttgtaccattaacttcacactggaaaagtcatttgagggcaacgtgtttatgtattatggactgtctaatttctatcaaaaccatcgtcgttacgtgaaatctcgagatgatagtcaactaaatggagattctagtgctttgcttaatcccagtaaggaatgtgaaccttatcgaagaaatgaagacaaaccaattgctccttgtggagctattgccaacagcatgtttaatgatacattagaattgtttctcattggcaatgattcttatcctatacctatcgctttgaaaaagaaaggtattgcttggtggacagataaaaatgtgaaattcagaaatccccctggaggagacaacctggaagaacgatttaaaggtacaacaaagcctgtgaactggcttaaaccagtttacatgctggattctgacccagatgcataatggattcataaacgacgattttattgtttggatgcgtactgcagcattacctacttttcgcaagttgaatcgtcttatacaaaggaaaagtgatttacatccaacattaccagctggccgatactctttgaatgtcacatgcgtattaccctgtacattattttgatgcacgaaaacgtatgatcatgagcgctatttcatggatgggaggaaaaaatccatttttggggatggcttacttcgctgttggagccatctccttccatctgggagttgcactgctagggattaatcataaatatagaaacagtagtaatacagctgacattaccatttaattttatattatgaaagcaaatcatctgcatgtgcatcaaggccagtcctattcaacctagctttcgaatgctgatatctggttagtatgtcattttgaagttgggcacataacttttctaaaaaaaagcagtctttgttgtttgcttcttccctacggatgacttctaaaaatatatgacgggtataaaaaaattagctatattgatcatatcaaccctgtaactgctgcaaatggcattctaatgtttgcattttattcggacaggccacatgatgcatagagcctctttcatgtgacttgtgtctactgcttaaatctttatgctgtgttgatgatattatattgacatatgaagctgtatatgtgtatgtattttgtggagaaagggattacaagatgtatgagtataatgacttgctaacctttcaggattcagagaaagatgaagaaagaccatatctaaataatacacttcatcattttcatgtgtataaatgcttaaagtaccatactttgtttgaggtggttcatgtatccagtttatccagtacagttatttgtcaagcttagctttgatttcaaaggacacgcttaccttgtctggcataagaattaatgctcatgtctgcagtggttgggtaggtcctgcttaggagaattaaaaaattcctctttccgtttggttgaatgttgcagtcaggaaccccaactcacttgggaatgtttttatatgtaatccatttccctttgaagcttatactttataagggggaggaaagaattcaggtgatatgggaaaactgcttggcagaccttcatcttctgcctcaactgtaaaccacatgtaaatgcttaatggagactgttttcattcttgtgatatttaacattcagaaaattacttcagctttgggaaatactcaggctgtttttattctgcaggtaagtgttttgacttaagtactaatattccagaaattttttggaaagcagtaaccttaatttcctatgtatttcattccacttttgcatataggtcaaatagcaatgtgtatgcacattctctttagttaaggcaccaattgtttcggcttgagtttcctaagacatactttagaaagatgctctataaatttcg

SEQ ID NO: 134586 - DNA, 493 bp, Homo sapiens
gaaatgaccagaaaacagcctgatgttgataaagtaacgaagacctataagaggagagctgctgatccttcctcattacaatcccatattccagtcttggataagggacgggcaggaagaaaacgctttccagcatcaagcttgtatccctctaggtcacagacacaaattgaaaccaaaaatcctagggtaaacttactggtgagcaaatggcagcaagtctggctcctggcgttggaaagaaggaggaaactcaatgatgccttggacagactagaggaggtttggaaattcataccctcaacaccacattgtcatttgccctcattcctcataacacattgccattgccaaaatcttggtattttttaacttttctgataataagcaaactcttgctatttgagtacatttttaaatttccaaaataaataccacaagtatgtgtgattttgtgaaatattgatatatgggacttggatttagggaaaaa

SEQ ID NO: 134587 - DNA, 1107 bp, Homo sapiens
  misc_feature (1)...(1107): n = a,t,c or g
ctgagggaatttgctaactttgattttgatatctggcgcaaaaaatacatgcgatggatgaatcacaagaaatctcgagtgatggacttcttcaggagaattgataaagaccaggatgggaaaataacgcggcaggaatttattgatggaattctttcctcaaagtttccaaccagtcgcttggagatgagcgcagttgcagacatctttgacagagatggcgatggatatattgactactatgaatttgtagcagcccttcacccaaataaagatgcatataaacctatcacagatgccgacaaaatcgaagatgaggtgacaaggcaggtagctaagtgtaaatgtgcaaagcgatttcaagttgagcagattggtgataataaatacaggtttggagactcccagcaactgcgactggtccggatcctgcggagtactgtgatggttcgtgttggaggtggatggatggcacttgatgagttcttagtgaaaaatgatccttgcagggccaaaggaaggacaaacatggaactgcgtgagaagttcattttagcagatggtgccagccagggtatggctgctttccgaccccgaggccgaagatcccggccatcatcacgaggcgcttcacccaacagatccacttctgtgtccagtcaggctgcgcaggcggccttccccacaggtccctgccaccaccacacccaagggaacgccaatacaaggaagcaagcttcgacttccaggatatttatcagggaaaggcttccactctggggaggacagtggcttgataacaactgcagctgccagagtccgaacacagtttggctgattccaaggaaggattncccagccgaccaggaagttcgagcttggaagcaaagtttggcagcaggggccagcagccgccgaggcagtgatgcatcagactttgacatttcagaaatccagtccgtgtgctcagatgtggaaactgtcccccagacacacagacctacaccccgagcaggttctcggccatccacagcgaagccttcaaaaatccccacgccccagaggaaatcacctgccagcaaattggacaagtcctcaaagagatag

SEQ ID NO: 134588 - DNA, 4721 bp, Homo sapiens
aaaggcaaatctaatggtacctggctgttcttaagaatgcatagagaggcttagcaggctgggattgattgaagcttatttcctgcttgaaactgacagtgtttatggccccaacttaaaactgcctattacttcaggccaaagggttccatggcgaaattgaggatttgcagcagtggctgactgacacggagccgtcatctgttggcatcctaaaccgcctgggaggtttaccggaaacagccaaggagcagcttaatgtccatatggaagtctgtgctgcctttgaagctaaagaagaaacatataagagtctgatgcagaaaggccagcagatgcttgcaagattgcccaaaatctgcagagacaaatatttgaccaagacataaataacttgaaaagaaaaatggggaatcggtggaaaccaaactcaatgaaagggaaaacttaaactggaagaggctctcaacttggccattggagttccacaattctcttccaagacttcatcaactggcttactcaggctgaacagaccctaaatgtagcttctcggccaagtctcatcttggacacagtcttatttcaaattgacgaacacaaggtttttgccaatgaagtaaattctcatcgtgagcagataatagagctggacaaaactggaacccacctaaaatattttagtcagaaacaagatgttgttctaatcaagaatctacttatcagtgtacaaagtcgatgggaaaaagtggttcaacggttggtagagagaggaagatctttggatgatgcaaggaagagagccaagcagttccatgaagcttggagtaaacttatggagtggctagaagagtcagaaaagtctttggattctgaactggaaatcgcaaatgatccagacaaaataaaaacacaacttgcacaacataaggagtttcagaaatcactcggagccaagcattctgtctacgacaccaccaacaggactggacgttctctgaaggagaaaacctccctggctgatgacaacctgaaactggatgacatgctgagtgaactcagagacaaatgggataccatatgtggaaaatctgtggaaagacaaaacaaaattggaggaagcccctgttattttcttggacaattcacagatgccctacaggctctcattgattggttatatagagttgaaccccagctggcagaagaccagcctgttcatggagacattgatttggtgatgaatctgatcgataatcacaaggccttccaaaaagagttggggaagaggaccagcagtgtgcaggccctgaagcgctcatcccgttatactcatagattttagtcgggatgactcctcctgggtcaaggtccagatgcaggaattaagcacacgctgggagaccgtgtgtgcactttctatatcaaagcacacacggttagaagcagccctgcgtcaggcagaggaattccactcgggggtacatgccctcttggagtggctggctgaggcggaacaaaccctgcgtttccatggtgtcctcccagatgatgaggatgctctccggactctcattgatcagcataaagaattcatgaagaaactggtagaaaagagagctgaactaaataaagccaccactatgggcgacaccggttctggctatttgccaccccgactccatcactaccattaagcactggataacaatcatccgggcgaggtttgaggaggtgctggcctgggcaaagcaacatcagcagagattagcaagtgctctggctggggcttattgccaaacaggaattgttggaagctttgctggcttggttgcaatgggctgaaactacacttactgataaggataaagaagtcatcccccagggagatcggaagaggtggaaagcactccattgccagaacaccagacctttcatggagggaaatgaccagaaaacagcctgatgttgataaagtaacgaagacctataagaggagagctgctgatccttcctcattacaatcgccttattctagtctttgataacggacgagcatgaagaaaacgctttccagcatcaagctagaatccctctgggtcacagacacaaattgaaaccaaaaatcctagggtaaactttacttggtgagcaaatgggcagcaagtctggctcctggcgttggaaagaaggaggaaactcaatgatgccttggacagactagaggagctgagggaatttgctaactttgattttgatatttggcgcaaaaaatacatgcgatggatgaatcacaagaaatctcgagtgatggacttcttcaggagaattgataaagaccaggatgggaaaataacgcggcaggaatttattgatggaattctttcctcaaagtttccaaccagtcgcttggagatgagcgcagttgcagacatctttgacagagatggcgatggatatattgactactatgaatttgtagcagcccttcacccaaataaagatgcatataaacctatcacagatgcccgacaaaatcgaagatgagggtgacaaggcaggtagctaaagtgtaaatggtgccaagcgatttcaagttggagccagaattggtgataataaaatacagggtctttcttgggaaatcaagtttggagacctcccagcaactgccgactggtccggatcctgcggagtactgtgatggttcgtgttggaggtggatggatgggcacttgatggagttcttagtgaaaaattgatccttgcagggccaaaggaagggacaaacatgggaactgcgtgagaagttcattttagcaggatgggtgccagccagggtatggctgccattccgaccccgaggccgaagatcccggccatcatcacgaggcgcttcacccaacagatccacttctgtgtccagtcaggctgcgcaggcggccttccccacaggtccctgccaccaccacacccaagattctccatcctttaacacgcaattatggtaaaccatggttgacaaacagcaaaatgtcaactccttgtaaagcagcagagtgcttcagactttcccgtggccatcttacagaggggaacgccaatacaagggaaggcaagttttcggatttccggggtattttattcagggaaaggcttccactctggggaggacagtggcttgataacaattgcagctgccagagtccgaacacagttttgctggatttccaaggaagattcccagccgaccgggaagtcgtgctggaaggcaaagttgggcagccagggcctagcagccgccgaggcagtgatgcatcagactttgacatttcagaaatccagtccgtgtgctcagatgtgggaaactgtcccccaggacacacaggaccttacaccccgaggcaggttcttgggccatccacaggcgaagcttttcaaaaatcccccacggcccagagggaaatcacctgccagcaaattgggacaagtccttcaaaggagatagtggcaattggttcttaccaagggcccttcctttgaggcattttattattttaagttttgaacgatgttaaaatatggtgtagaaattcttgtgaaatattgcaagaggcgagtttaaaattcttgcagatggccttatttgtgtatttgtctttttattttatctgtataattttttttgtcagatattctgggggtttaaagtcacatcctatgtgaggggggaaaagtttaacatgaacttaacattttttgcactgtaacgggccgggcacacacttaaactcagttactgtaccctacagggtaagtctacatcctctctgacagccacagcactcacatcaatccctggacgttagggattccctccatggacattttccctgttttttatgggaaactctggagaagctggaatggtacatggcagggggatatttttttgagatggatttaaatgtaaccccaaaagatggaagaccaaaaaagaccaaacacaccccacacggcagtctttgccagtatcctgacagagaactcacaggaagttactttcaagcacttgcccagtactatggatattccaagtacctttgcagcatttcctctgcccattgcctttcaatgaaggccagaggccatccctgggatatttaggaccctattatactgtaaggaatcataagtattaaagtgccggtccatataccatgtgaggttttccttttgccttgagtggaccagtagcacctgtatcattgaaactcattttgtatcaggagcaattttgcttgcagaaagctatgaaataaaacacgtcccttaactgcattgcctatggaattaattttttttccccagggaaaactagtgtattttttttatgagcaatatcaatttggagtgaccaaaagatacttaaaaatgggtttattttgatttctcatctgaaataatcatgttctggatattagacctattatactgtaagaatataagtataaagtgcgttcatatacatgtgaggttttcttttgcttgagtggacagtagcacctgtatcattgaactcattttgtatcagagcaattttgcttgcagaaagctatgaaataaaacacgtcccttaacacgcaattatggtaaaccatggttgacaaacagcaaaatgtcaactccttgtaaagcagcagagtgctcagactttcccg

SEQ ID NO: 134589 - DNA, 426 bp, Homo sapiens
ggggtcagcttgaatttcctaggtctaatctaataagaagtttttattttttttctaaccacttcacagttcactgttcctcctaataagttatatttaacatctgaccacctttcccacccaccttgcttaacccaaaatgtcaatatcataataaacgagagcaacagtagttggcctctaggaaaaaactccatcaaaaagcaagaactaactagacacacccatctacaaagctgctcattaaccagacaggaagacaatgggagaactatagccctgcagggagatggcacatacctcatggcaaatgagtgacaggttatgttcacatgtaggagatttataatcctccctcaccccaaataatatgatggcttttctcttggaactaaaagatagtcttccaaaggatagaaatatttt

SEQ ID NO: 134590 - DNA, 3342 bp, Homo sapiens
ctagcagtttttatgcctgatttgtttccctctgaagtctgtcatgcctgcagccccagactgtactcttccttgcacacagctcagaggaacatagacgatggtgtcagctgttggacttgcagccccacttcctgccagccccggcttccctgagaaggaagagggccgcctctcttgtttcatacccttccccattcttggcttggttacattgtgcttgtcaaataagcactcagctcccctctgagatgaatgcatattcccggaggtgtcccctggacatgctctgagaatgttcccatgcttgctttggttactcagaaccccgaaatccacgggagggatgagggtggttggctggcaggaggggctgctggagggctgaacaaatgcccgtgtggggtgctggtctcctggccaactgtgtccaggctttcttttgctttctcctgctttctccattatcttatctttcaggaccttagaagtgtttcctgaagtttcctcatcttttacagatacataacttccactgtcactttcattataatctggctcaaaagcagcttcatcagtgtctactttgcactttctgtctgacacggtgccattgggggattcatcctcatggctgggtttgttctcctgttggttatcttccccagctccattttgcttggacactggctgaggttcctttaacttgtgtacaatgaagaggtgcttgggactggggaacttggtgtcttcttttatttctgtttcctcctcattggtggcatctgtcatttctttcaggtcagggtccttgaggctgtgcatcagctggacgtgcttctctagcatcaatcgtttggtaaaggtacgtctggagtctgggcagtgcgagcaggcatacactttcctgatgcctttgtgcttgatccggttgtgctggcacaggtggcggcagggatgtttcttcatttgcttcccttgctccttcctcacgtgggatatgtacacatctctctgaatgaacaggcggtcacactcccaacacgtccacccaggactggccactttcttggtttccactgattttttcacaggagatggagatttcttttccaatttctctttcccattcatggatttggtgtcctctttgttctgatttgatgccattggacaaataggacacttgtagaagacttcacagtgagaaccttgaatgtgagactgcagggcagccacatcagagtatacaacattgcaatgcacacatcgaaaaccaactctcctcatgtagtgcagacagttcttggtgacatgggtctggaagtgcaccgacctgcagatggccccgcactcagggcaggtgtagagagatttgtgctgatggattctctggtgtgatgcgtaactgcactggttaggaagcagcatctggcagatagtgcaagtcttttgtccacgtgtatctgcagcttcgatgcgcatgctctgtctgtcatagtgctgggtcagactcttttcaactgcaaaggagtccccacactccaagcacttgtacccacgcgttggtaacgtgatccctgcattggtgggaggactcaggtttggaatgtaaacagggactggattgacactgctcagcaccttgttgaaagcttccaccacagaactctgcaaggacgacaccacctggactcgagacacctttttggggggttgcgaggctgctgcattgattattgcctgctttatttgttgctgagcctgaggcaaaaggttaatgttggcaaggtgcacagtctttggcacgagtttggcgttggcccggctgggtgccggcaccacgacagtttgctgctggatggcgttggcggctttaatgatggcgctgctggcgctctgtttaggggtgagctctgcaggtgaaactgcattggtcatgaccgtggactggagaggcgccctgaggagagaggaaaggatggcagctgatgctggagatgacagaaggaatgtcacagaggccatcacagacgccgtctgctcagaagatttcttcccagagtcaagatccacttctggcaataccctggtcactgttctcttgatttccccagaagacatcttaatggtttttatgcggactttgaggattgctggtgcggacccagactcaggagcccagctggcttcacccagtggatcccgcaccggggccgcaggtggagctgcctgccagtcccgcgccgtgcgcccgcactcctcagcccttgggtggtcgatgggactgggcgccgtggagcagggggcggcgctcctcggggaggctcgggcagcacaggagcccacggaggggcagggaggctcaggcatggcgggctgcaggtcctgagccctgcccttccccttgtgaatccctccaggctcagggattccagggattccagggattccctcccattcccgtttaaggacaacgcggatggtaagcactcccccttctaccacgtgaggacacagcaagaaggaacatcgatgaaccaggaagcaggccctcaccagacactgaatctgctggcaccttggccttgggcttttccagcctccatattcatttgggtcatccttactgctgtgtcctgcatccatttgctggagaaggacctcactgatatccgatttgctaataacctgaaactttccagctccagagcctgagctagactcaatgtcagtgatgatgtcgttgaccttcggggacagattctgcttttgccctggtgggtctgggttgagatgcattgcatttgatcttgctggagaaatttccagtcttctcagcccgtggcagagttgagtaattgtgacagattgacagcttgttacagagaagtttgcccacacctgagctgtaggataaaattcaggcttcttcgcacacacctgtggccatttgtcactgacacccctgcctccctgatccctcctgctttgataaccttccatgctcttagcaactcccagctgccggcagatgccctgcatgggccatttccacctctgtgctttgccccttctcttctctccatccttgctgcttccttggctagacatcactgactcatccttgaagaaatccccttctccaagaaggcttcctgacctcccctctttccctttcatcctgtttggtttagtggctccctccctgggtcctacggtaacttcatgtttaactttttgagaaactgtcagattggtttccatgcagctgtagcattgtacattcccacaaacaatgtctgagggttccagcttctctacatccttgcgaacactcat

SEQ ID NO: 134591 - DNA, 6002 bp, Homo sapiens
  misc_feature (1)...(6002): n = a,t,c or g
atgcaagctaccaagactgaatcaggaagaaatggaaaacctggacagcccagtaacaggtgtcattatttgcttaatcaaggctgggttgctaactctgggaaaggaggaagaaccaacattccagataaggagcttaaatctggagatgacccagaaaatgttcacatcacttcctttcaatatttggccttagctgccttcccacggggcagggctcgggacctgcagctcgccatgactgagcctccccacccctccgtgggctcctgtgcagcccgagcctccctgacgagcgctgccccctgctccacggcgcccagtcccatcaaccacccgaaggctgaggagtgtgggtgcacggcacgggactggcaggcagctccacctgcagcccgggtgcgggatccactgggtgaagccagctgggctcctgagtctgagtatgtatgtaactgctctgtggttggaagcctgaatgtgaatcgctgcaaccagaccacagggcagtgtgagtgtcggccaggttatcaggggcttcactgtgaaacctgcaaagagggcttttacctaaattacacttctgggctctgtcagccatgtgactgtagtccacatggagctctcagcataccgtgcaacagttctgggaaatgccagtgcaaagtgggtgtcattggctctatatgtgaccgatgccaagatggatattatggctttagtaagaatggctgcttgccctgccaatgcaataatcaggtctgccaggtgcgatgccctcacaggtgcttgtttaaactgccacgaaaatagcaaaggaaatcactgtgaagaatgtaaagaaggattttatcatagtcctgatgccactaaagaatgtcttcgctgcccttgttcagcagtgacatctacaggcagctgctctataaaatcgagtgaattggaacctgaatgtgaccagtgtgaagatggttacataagcccgaactgcaataaatgtgaaaatggctattacaattttgacagcatctgtagaaagtgccaatgtcacggtcatgtgtacctaatctcaactccaaagatttgtaagcccgagagtggtgagtgcatcaactgcctccataacaccactgggttttggtgtgagaactgcctataaggttatgttcacgacctcgagggaaattgcatcaagaaagaagttattcttccaacacctgaaggttctaccattttggtttccaatgcctctttgaccacatcagtgcccacccctgttataaatagtacttttatcccctacaatccctgtagactatcttttcagtaagcacttctgaaaacagcacttcagctttagctgatgtatcatggacccaatttaacatcatcattttgacagtcatcatcattggtgtggtgctgctaatgggatttgagggggctggatatatgtaccgcgagaaccaaaaccggaaactcaatgcccccttttggaccatcgagctgaaagaagacaatatcagtttcagcagctaccatgacagcattcccaatgcagatgtttcgggattggtggaagatgatggcaatgaagtggctcccaatgggcagatgaccctgacgacgcccatacataactacaaagcctaaggagctagaactgttctgaattgttaaaccacagtgcttgctaagacagagtcagcccctgggccagacaaagcctggctagagtttgctgagaaagcaaaggcaaatagtgcatctgaaattttcaggtacaaatttgtaatgcgcttagcctatctattgctcttagttttcccatgaagatctgaagcgttcactgtcattaggacttgaagtaaagtatatttttgtaccaaaccacatgggagtatggaaaggctgaaccccatagtgcagcccaaaaccactttgacctccagatagactcctggggaagcattcaccaagccagtggtaacaagatgatgaatgtggagggggaaaagactgctggaagacttcatctccattcctgaaacattttttttaaaacagtgtcagggattatattcgttttactatacaaaaggacatcattgaggaaaagcttgtttctaggctgtatcacagtaaataatcttgattgtttctagaacaggggtagaaaagtcccaagatcttcagaagggcttggttttttcctcccaggattcttgctcagtgatgagttgaaagcacaggataagcttctaagggaggaaggcagcattggggagcaggaggctgatggtcctcctcagggtctcagtgtaaatgataaattgtctaaaaataaggaatattcctgcctctagagaaattaaggtgtacatagttaatgtagcatatctggtcgacgttgtatttgtatctatttgtaaaaaaaaaatcatgtcatattttatcatctggaattttatttgtacagcagttaatggtgttgtaaaaagaaaaatatggggattgcttaaaatactgtaaaatagatggcaatattgctagagctgggactctggtgagcatccgtcatttttagtccttcttgaggacattgctgaaatttataagagggcgaaggtttctttctttcctttctcagtctaaaagtagagttatatgctctttgacttaactatgattcaagcaatagattttgaagtcagtaatcgttaagctgggacataggatgcattctccaaaaacattaatttaattagacattagccaccctatatattttacatagattaatataaaacatatcctcattaaaaaatgtttttcttgaatgtaaaagatagtcttccaaaggatagaaatattttagttccaagagaaaagccatcatattacttgggatctgtagttttcatgcctatgaaatatttataatcctccctcaccccaaataaaaaatctcctacatgtgaacatagcctgtcactcatttgccatgaggtatgtgccatctccctgcagtgctatagttctcccattgtcttcctgtctggttaatgagcagctttgtagatgggtgtgtctagttagttcttgctttttgatggagttttttcctagaggccaactactgttgctctcgtttattatgatattgacattttgggttaagcaaggtgggtgggaaaggtggtcagatgttaaatataacttattaggaggaacagtgaactgtgaagtggttagaaaaaaaataaaaacttcttattagattagacctaggaaattcaagctgacccctttgcctaacttccctagagaaaaacctagaacttggtcatccctttataggagacccctaagttgttctcagggtttggagatgatgttctggagggagtacaagcaaataatctacttctggtaatctgagggtgctttgcgtatttggccattgctcagaagaatagaggttacattatattacattatatgaaaattatttagtttttctatagccctttgtagtttgcaaagcacttttccatatgtgtgtcctctcttccacaccatagccccctgaggaagtaattgttgtccccattttatagatgaaaaggctgaggcacagaggagctaaatatcttgttcaaggctatacaatgtgtgtgattattaggcttggaatcagggcctctaactctaaagcacatgttttttcaactatatgcagaaattgcctagccatggacacaagaaagctgggaggaagagttctacttgtggatgtttttaattttttttaaatatcaggagcaatccagggccatacagctatgaagcacttagtgaaaagaacacaagaagatttactaactgaagttagtattagtgattagaaaacaaaactgccagtttgtgcttcattaaggtgaactcatctctccaagcaggaagggaaaatttgctttccctagcagttgctgcatatgtgtgtacagactgcacaattcttaggaatttttgcaaaatggcatacctgtctttctcccagatacaccgccccctgccccccccaaaaaaggtcaggattaaaggtggtgagaagtgaacatttattaaacagaagttaaaccaatagagagaaaggaggtttgttggagtctaagaggattttgaccatgtagaaattccttgaaacagaccttaaaaggtattgaaaaattgaatcacaaagaaagtttacctttaaatacttgttaatggctcctagatcatggttataatttttctcaatgggaaaaaaagtcttaaaatttgttttaaataagatcctctaatgtctcgagctttttgattctggaaataatttgctttaaaatataaatcaatcagaaagtgatctaccactgaaatcattctaggaaactagcatgggatgcactgcacaatgttctttcctctaaaggcatgggccccataaactgtggcatctggcagcaggatgccatcagtgcctttagaaagcctaattttggggccgggtgcggtggctcacgcctggtaattcccagcactttgggaggccgaggcgggtggatcacaaggtcaggagttcgagaccagcctggtcaacatggcgaaatcccgtctctactaaaaacacaaaaattagccgggtgtacgtgcctgtagtctcagctacttgggaggctgaggcaggagaatcacttgaacctgggaggcagaggttacagtgagccgagatggcgccatttcactccagcctgggcgacagagcaagactctgtctcaaaaaaaaggaagaaaaagaaagcctaatattgggagaatgtttgtgtaaggattggaaatctgtttatttttaaataagatagcactgatgtgaatcttgtttggaaattacagatactgccattaagcgatgcttttatcttcattaattcattttggtaagcgcctatgcatttctgatggttaggtgccctaggtagtgttaagtatgtccgtgtcctcccttactcccctctcgctccctctaccctctatcccctagggttcttttattaatggaatttctccagttactagagaaaaaaatgacatttgaaaactaaagctcatttatattaatactaaggtcctgtgggcctagtgccgttactcttcccagtgatacctaagattttaagagtaagagaacagaggaaacatggggatgagaggagagaggttttttagacaacatttgtaggacaccctcaaattatatcactgttctctagcgccaatattcccaggtaaattgaccattaaagcaatactcactgacctactagtttattttggtcagctgagtaccatcaggatatttaaccctttaagtggctgttttggggagtagaaaactcaaaggcaacaatacttcttcttgaccagctttgattgggaatggggttattagatcaattcaccttggtcctacactttttagggatgcttgggtgaaccttaacccccccacttataatggaaccatccctgggttccctatatttggggcctatgtggggtagggaattgtttacttggtttcggcagcagccagcccctagaaaggttaagccccggggcttccagatctaaggttagtcccaaaagcctaaatgatttaaagtccaagttgtaatgcttaggcataagccccnctataatacattaaattataggccgagcaattagggaatgttttctaaaacattaaacttgtatttatgtcgactaaaattctaacacaaacttaaaaaatgtgtctcatacatatgctgtactaggcttcatcatgcatttctaaatttgtgtatgatttgaatatatgaaagaatttatacaagagtgttatttaaaattattaaaaaataaatgtatataatttgtacctaaaaaaaaaaaaaaaaaactcnagggggggc

SEQ ID NO: 134592 - DNA, 420 bp, Homo sapiens
tgcaaacatgaatctggagattcttctgggtgtataaaaccccctaaatcaccactttccccagaattaatacaagtcgaggatttgacgcttgtatctcagctttcttcttcagtgataaataaaactagtgagcacagatttttaaaaaatagttatttatcctataagatacattaaaaacagtttgattgtagttatattgtatttttatgaagttgctttttaaaaactcaagtggatatgatagggaaggcttgaaactatttcaggggcaaaaaccatagacatttcttactgatttattgcttagagactactgctggttgagaatcctttccatttaataacacagattccactgtagtttgactctcctcaactcataatccaagcatactgagaggcctgattcataac

SEQ ID NO: 134593 - DNA, 483 bp, Homo sapiens
atgttggtccgttttgagcgctggagtcatcgttatgatgagtggatttactgggatagcaatagattgcgaccctctgagagaccagcactaagaaaagaagggctaaaagatgaggaagatttctttgattttaaagctggagaagaagttctggctcgttggacagactgtcgctattaccctgccaagattgaagcaattaacaaagaaggaatatcgaaaacagaaaaaaaagtgaaattggaagacaaaagctcaacagcatttggtaagagaaaagaaaaagataaggaaagaagagagaagagagacaaagatcactacagaccaaaacagaagaagaagaaaaaaaagaaaaagaaatctaagcaacatggtgtgcatgcagagacgggacaatgtttgtcggaaatacagcagatggaacaagcagaatttggtggggctgcagacatgaccgccaaaactcctgattcttag

SEQ ID NO: 134594 - DNA, 1173 bp, Homo sapiens
tcaattctaaaagagaatactgaagaaaggatctaagatgagaaaaagcccccaaatcgccctggaatcacttttgagattggtgctcgtttggaggcactggactacttacaaaaatggtatccatcacgaattgaaaaaattgactatgaggagggcaagatgttggtccattttgagcgctggagtcatcgttatgatgagtggatttactgggatagcaatagattgcgaccccttgagagaccagcactaagaaaagaagggctaaaagatgaggaagatttctttgattttaaagctggagaagaagttctggctcgttggacagactgtcgctattaccctgccaagattgaagcaattaacaaagaaggaacatttacagttcagttttatgatggagtaattcagttgtttaaaaagaatgcacattaaagccatgcccgaggatgctaaggggcaggattggatagctttagtcaaagcagctgctgcagctgcagccaagaacaaaacagggagtaaacctcgaaccagcgctaacagcaataaagataaggataaagatgagagaaagtggtttaaagtaccttcaaagaaggaggaaacttcaacttgtatagccacaccagacgtagagaagaaagaagatctgcctacatcttagtgaaacatttggacttcatgtagagaacgttccaaagatggtctttccacagccagagagcacattatcaaacaagaggaaaaataatcaaggcaactcgtttcaggcaaagagagctcgacttaacaagattactggtttgttggcatccaaagctgttggggttgatggtgctgaaaaaaaggaagactacaatgaaacagctccaatgctggagcaggtatgaaatggtagcatttgatttttttcaaggttcccactggaatgatcacggagctctagtatctacgtaattgaaattccccttttgatcagatatgggaataggaagctaattaattgatgatatatttttaactctgccttctccaaggtatacagataactacagacttcattagtgtttgatttcatagactggcattaaagcctttgtctccaaaatttgaaggcctggagacaggcatcccagggtataagcttccagctggatcacctttaac

SEQ ID NO: 134595 - DNA, 1642 bp, Homo sapiens
ctaaaagatgaggaagatttctttgattttaaagctggagaagaagttctggctcgttggacagactgtcgctattaccctgccaagattgaagcaattaacaaagaaggaacatttacagttcagttttatgatggagtaattcgttgtttaaaaagaatgcacattaaagccatgcccgaggatgctaaggggcaggtgaaatcccagcatccactaagctggtgttgtcctatcgacccagctggatcgtgtaaccagtctatgggaagtgaggattggatagctttagtcaaagcagctgctgcagctgcagccaagaacaaaacagggagtaaacctcgaaccagcgctaacagcaataaagataaggataaagatgagagaaagtggtttaaagtaccttcaaagaaggaggaaactttcaacttgttattagccacaccagacgtagaggaaggaaggaagatctgcctacatctagtggaaacatttgtagggacttcatgttaggaggaacgttccaaagatggtctttccacagccagagagcacattatcaaacaagaggaaaaataatcaaggcaactccgtttcaggcaaagagagctcgacttaacaagattactggtttgttggcatccaaagctgttggggttgatggtgctgaaaaaaaggaagactacaatgaaaccagctccaatgctggagcaggcgactttcacctaaacctcaaagtcagaaaaaaaatgaagctgacattagcagttctgccaacactcagaaacctgcactgttatcctcaactttgtcttcagggaaggctcgcagcaagaaatgcaaacatgaatctggagattcttctgggtgtataaaaccccctaaatcaccactttccccagaattaatacaaagtcgaggatttgacgcttgtatctcagctttcttcttcagtgataaataaaactagtcctccacagcctgtgaatccccctagaccttttcaagcataagtgagcggagaagaagatctcagcgtttaggcaccttaccccatgcctgatgattctgtagaaaaggtttcttctcccctctccagcccactggatggggaaaagtattctcccatccagttcttcaaaaatcagccaagaatcttccagtacccagaggtgcctgatgttgcaacatttgcccacttgagaagctgggaccctgtctcccttcttgacttaagtcgtggttcagaagttacagcaccggtagcctccagattcctcttaccgtaatgaatgtcccagggcagaaaaagaggatacacagatgcttccaaatccttcttccaaagcaatagctgatggaagaggagctccagcagcagcaggaatatcgaaaacagaaaaaaaagtgaaattggaagacaaaagcttcaacagcatttggtatcaggagttgggatttctcagcactgctaatgaagatcccctcttatagtccaataagcttatcaggacttccagagtcatgacatgaacagtttaattgaacccatccactctgggcaggtaagagaaaagaaaaagataaggaaagaagagagaagagagacaaagatcactacagaccaaaacagaagaagaag

SEQ ID NO: 134596 - DNA, 1208 bp, Homo sapiens
  misc_feature (1)...(1208): n = a,t,c or g
ggcacgagccgtaggctccttcagggcctgagccatcccgcgtgtcttgcgctcggtggaaatgcccagccgagggacgcgaccagaggacagctctgtgctgatccccacccgacaattcgaccccacacaaggaggatctaagcagcaagattaaagaccaaaaaattgtggtggatgaactttctaaccttaagaagattagggaagtatataggcaacaacagaccagcaatatattctttcttgcagaccgaacagaaatgctgtctgagagcaagaatatattggatgaactgaaaaaagaataccaagaaatagaaaacttagacaagaccaaaatcaagaaatagtcaacctgatttcacataacaatgtgtggcatttgttgttctgtaaacttttctgctgagcatttcagtcaagatttaaaagaggacttactatataatcttaaacagcggggacccaatagtagtaaacaattgttaaagtctgatgttaactaccagtgtttattttctgctcacgtcctacacttgaggggtgttttgactacccagcctgtggaagatgaaagaggcaatgtgtttctatggaatggagaaatttttagtggaataaaggttgaagctgaagagaatgacactcaaattttgtttaattatctttcctcctgtaagaatgaatctgagattttgtcactcttctcagaagtacaaggtccctgggtcatttatatattatcaagcatctagtcattatttatggtttggtagggatttttttggtcgccgtagcttgctttggcattttagtaatttgggcaagagtttctgcctctcttcagttgggcacccaaacatctggaattggcaaatcagtggcaagaagttccagcatctggactttttcagaattgatcttaagtctactgtcatttccagatgcattattttacaactgtatccttggaaatatatttctagggagaatattattgaagaaaatgttaatagcctgagtcaaatttcagcagacttaccagcatttgtatcagtgggtagccaaatggaaggccaaactgtatccttggaaaaacctgttgttcctttaaatatggatgttgccacaagctggcattgggagactcatgcagtatttttcccatgtgccacctacaggngaggtacttcaagtctttctta

SEQ ID NO: 134597 - DNA, 2734 bp, Homo sapiens
  misc_feature (1)...(2734): n = a,t,c or g
ctaacggcgggccaggaatttgattttgggggccctataaaaaaaatttttccttgcaagcccggggttgtaaaatttgatccttttaaacgggcgcccccnnnnnnnnnnnnnnaattgtaaaaataagccagcccctttcttcctagtgaagtgggagaaacggtttacactgtccgatgagaaacacttccgttctttggtaaccctgctagggggcgccgctagattccatcctatttctccgatgaaagtatcaggctgtgtaggaagcgtggcagcatctgcttctggggaggcccagggagcttttactcatggcggaaggcaaattgggagtaggcgtcttacatggcaggagcaggaccgagagagggggggtattgagaaggggcaaatcctgtcttcagcagcagacattgctgccacagtacagcacacaatggcatgtcatcttgtgaaaagaacacatcgggctattctgttttgtaagcagagagacttgttacctcaaaataatgcagtactggttgcatctggtggtgtcgcaagtaacttctatatccgcagagctctggaaattttaacaaacgcaacacagtgcactttgttgtgtcctcctcccagactatgcactgataatggcattatgaaatgcatgaatggtattgaaagactacgtgctggcttgggcattttacatgacatagaaggcatccgctatgaaccaaagtatgtggctccttcagggctgagccatcccgcgtgtcttgcgctcggtggaaatgcccagccgagggacgcgaccagaggacagctctgtgctgatccccaccgacaattcgaccccacacaaggaggatctaagcagcaagttggcacccaaacatctggattggcaaatcagtggcaagaagttccagcatctggacttttcagaattgatcttaagtctactgtcatttccggatgcattattttacaactgtatccttggaaatatatttctagggagaatattattgaagaaaatgttaatagcctgagtcaaatttcagcagacttaccagcatttgtatcagtggtagcaaatgaagccaaactgtatcttgaaaaacctgttgttcctttaaatatgatgttgccacaagctgcattggagactcattgcagtaatatttccaatgtgccacctacaagagagatacttcaagtctttcttactgatgtacacatgaaaggaagtaattcagcagttcattgatgtcctgagtgtagcagtcaagaaacgtgtcttgtgtttacctagggatgaaaacctggacagccaaatggaagttttggaaaacgtgtgatagggaaaggcaaatgttggcaatcctgttttctgggggggcttggatttccatggttattggcaaccctgctggaccgtcatattcctttagatgaaccactcgtccttcttaatgtagctttcatagctgaagaaaagaccatgccaactacctttaacagagaagggaataaacagaaaaataaatgtgaaataccttaccctaaaaatttctctaaagatgttgctgctgctgctgctgacagtcctaataaaacatgtcagtgtaccagatcgaatcacaggaagggcgggactaaaggaactacaagctgttagcccttcccgaatttggaattttgttgaaattaatgtttctatggaagaactgcagaaattaagaagaactcgaatatgtcacttaattcggccattggatacagttttggatgatagcattggctgtgcagtctggtttgcttctagaggaattggttggttagtggcccaggaaggagtgaaatcctatcagagcaatgcaaaggtagttctcactggaattgggtgcagatggagcaacttgcagggttattctccgtcatccgtgtccgctttcaagtcgcatgggcttggaaggattggaattaaggaaataatgatggaactgggtcgaatttcctccctagaaatccttggccgtgatgacaggagttattggtgatcatggaaaagaagcaagatttcctttcctgggatgaaaatgttgtctcctttcctaaattcctctgcccgatttggggaaaaagcaaaccttgactttaccccccgaggaattggtgaaaaattaccttttaacgccttgcagcctgtggaacttggtccttacagcctctgctcttctgcccaaacgggccatgcagatttggatcaagaattgcaaaaatggaaaaaattaatgaaaaggcatctgataaatgtggacggctccaaatcatgtccttagaaaatctttctattgaaaaggggaccaaattgtaatgtgattccccatgttaccaaattaaaattagttttttttttaatattttaaaggaaggaaccccgccggcttaactatggtttaatatagtagttttaaagttcatttggttgaattttcattttttcctgtcacagagcttctaaaaccatggaatttccttagtgatagggaatatcttttgttgttcataataagccccttttgatcacacctgagtttatgctaatgcggtgacttagggtgaggtctctaaatagcctttaacacctgcagcttgggaggccaaggcagagggatctcttgagtccaggagtttgagaacagcctgggcaacatgatgaaacctcatctctacc

SEQ ID NO: 134598 - DNA, 499 bp, Homo sapiens
  misc_feature (1)...(499): n = a,t,c or g
gtgggcaggattccgaggtcgagccacgcgtccgcttcatagagtctgacagtccctgttcctctgaagcactttcaaagaaagaactgtctgccggagagctgtataagcgactcgagaaactcattattgaggacaaagcgaatgatgaacagatctttgactgggtagaggctaatctagacgaaatccagatgagttcacctacattccttagagctttaatgactgctgtttgtaaagcagctattatagatttgctgcggatgttttttgattgtctatatgacgaggaggtgatctccgaggatgccttctacaaatgggagagcagcaaggaccctgcagagcagaatgggaagggcgtggctctgaaatctgtcacggcattcttcacgtggctgcgggaagcagaagaggagtctgaggataactaaaacttcaaatacacaaaatgaaacaaaagaaacaatttaagtatttttttaaaaagtttcan

SEQ ID NO: 134599 - DNA, 552 bp, Homo sapiens
gcagaaacatcgaatgaatgctgaaattcctagtctggtttcttcagtggtgtgtttgtgttttagtacaacctgcaaaagagttactccattgtctaaaaatgcaaatgagaatttccaaatatacaaaatgcctccaagctcaaatagctataactgtaccaaagacatggaagaaaccaaaagatcggacccgaaccactgaagagatgttagaggcagaattggagcttaaagctgaagaggagctttccattgacaaagtacttgaatctgaacaagataaaatgagccaggggtttcatcctgaaagagacccctctgacctaaaaaaagtgaaagctgtggaagaaaatggagaagaagctgagccagtacgtaatggtgctgagagtgtttctgaggccgactcttctaccttcagagtggacactgctgttatcaagcagagagtgccgatcttactcaagtacctagactcagatacagagaaggaactgcaagcactttatgcactacaagcatcgatagtaaaacttgatcaacctgcca

SEQ ID NO: 134600 - DNA, 1260 bp, Homo sapiens
atggctcctaaaacaaaattttttaccaatgcaaatttcactttaaacattggttatacaccctatgcctgggagaagccaaaaccagatccagtgttaaagtctccttccccagtccttaggctagtcctcagtggagagaagaaagaacaagaaggccagacatctgaaactactgcaatagtatccatagcagagcttcctctgcctccatcacctaccactgtttcttctgttgctcgaagtacaattgcagcccccacctcttctgctcttagtagccaaccaatattcaccactgctatagatgacagatgtgaactctcatccccaagagaagacacaattcctatacccagcctcacatcttgcacagaaacatcagaccctttaccaacaaatgaaaatgatgatgatatatgcaagaaaccctgtagtgtagcacctaatgatattccactggtttctagtactaacctaattaatgaaataaatggagttagcgaaaaattatcagccacggagagcattgtggaaatagtaaaacaggaagtattgccattgactcttgaattggagattctcgaaaatcccccagaagaaatgaaactggagtgtatcccagctcccatcaccccttccacagttccttcctttcctccaactcctccaactcctccagcttctcctcctcacactccagtcattgttcctgctgctgccactactgttagttctccgagtgctgccatcacagtccagagagtcctagaggaggacgagagcataagaacttgccttagtgaagatgcaaaagagattcagaacaaaatagaggtagaagcagatgggcaaacagaagagattttggattctcaaaacttaaattcaagaaggagccctgtcccagggctaactaaggcagaagaaggaaatgaagaggaaggaccaaatgccacgaacaaatcagatttccaggaggtttttagtttgcccagatccatcacaggaatcactatctatggcagctatagacatacagaatgtacttatgaaataacaaggcttgataagtcaaaattactctttgatctcaggttactaggaaataagaaggcccaagaagagggagggagagagatggaagaactgccggttggtggagcagtcagaacatacatatttctcgatcaagttggccgtcttacatggtttgtggtgccccaaaacaattacaacagtaacatcaaagatcactga

SEQ ID NO: 134601 - DNA, 396 bp, Homo sapiens
ggcacgagcattcccagcgtatcagaaaaccattgttttagcctaatggctctaagagtagcccaggagaagctgccatggatgagattggacttctgcgggttccaaagctggtgcttaccgtttcagctgatgtaacttttcagtaaaaatttttgttatcttttgtggcagggaatgctctggaacatgtattaagctttcttttgctttttcatgcagatcaaccaacccaaattgccaatgcgaactctggatcctcgaattttgcctcgaggaccagactttacaccagcctttgctgattttggaaggcagacacctggtggaagaggcgtacctgtaagtgcaagttccctacaactcacttagttagacactggcacagactccatg

SEQ ID NO: 134602 - DNA, 6181 bp, Homo sapiens
tttcgtagaaaatccaccggcatcgcctgagccccgctaccgagaagggcgccgcttcctccggggagggggataaagatcccccgccgccggcccatgaggatattgccgtgaaaggcacagcgactgcagcaggaaccggacccggcaccggagcggcggcggcggcggcggcggcagcggtcccccctcctcacccgaacatcagggccctccagactcaggcgccccaacaaattcctagaggacctgtgcaacaacctcttgaggatcgaatcttcactcccgctgtctcagcagtctacagcacggtaacacaagtggcaagacagccgggaacccctaccccatccccttattcagcacatgaaataaacaaggggcatccaaatcttgcggcaacgcccccgggacatgcatcgtcccctggactctctcaaaccccttatccctctggacagaatgcaggtccaaccacgctggtataccctcaaacccctcagacaatgaattcacaacctcaaacccgttctccgtttttcccaaaaggcctcaaaatacagcctccctagagctaccatcccgaacagcaagtccttcccattcgtccctggtgcacagacacccactgcagtgtaccagggttaattcaggcacatcatggatgggttaaccatctgcccttgccgtacccagtgccccaggggcctcagtactgtataccacagtaccgtcatagtggccctccttatgttgggcccccccaacaatatccagttcaaccaccggggccaggtcctttttatcctggaccaggacctggggacttccccaatgcttatggaacgcctttttacccaagtcagccggtgtatcagtcagcacctatcatagtgcctacgcagcaacagccgcctccagccaagagagagaaaaaaactataagaattcgggatccaaaccagggaggtaaagacataacagaggagattatgtctggaggtggcagcagaaatcctactccacccataggaagacccacgtccacacctactcctcctcagcagctgcccagccaggtccccgagcacagccctgtggtttatgggactgtggagagcgctcatcttgctgccagcacccctgtcactgcagctagcgaccagaagcaagaggagaagccaaaaccagatccagtgttaaagtctccttccccagtccttaggctagtcctcagtggagagaagaaagaacaagaaggccagacatctgaaactactgcaatagtatccatagcagagcttcctctgcctccatcacctaccactggtttcttctgttgctcgaagtacaattgcagcccccacctcttctgctcttaggtagccaaccaatattcaccactgctatagatgacaggatgtgaactctcatccccaagagaagacacaattcctatacccagcctcacatctttgcacagaaaacatcagaccctttaccaacaaatgaaaatgatgatgatatatgcaagaaaccctgtagtgtagcacctaatgatattccactggtttctagtactaacctaattaatgaaataaatggagttagcgaaaaattatcagccacggagagcattgtggaaatagtaaaacaggaagtattgccattgactcttgaattggagattctcgaaaatcccccagaagaaatgaaactggagtgtatcccagctcccatcaccccttccacagttccttcctttcctccaactcctccaactcctccagcttctcctcctcacactccagtcattgttcctgctgctgccactactgttagttctccgagtgctgccatcacagtccagagagtcctagaggaggacgagagcataagaacttgccttagtgaagatgcaaaagagattcagaacaaaatagaggtagaagcagatgggcaaacagaagagattttgggattctcaaaacttaaattcaagaaggagccctgtcccagcttaaatagctataactgtaccaaagacatggaagaaaccaatagatcggacccgaaccactgaagagatgttagaggcagaattggagcttaaagctgaagaggagcttttcattgacaaagtacttgaatctgaacaagataaaatgagccaggggtttcatcctgaaagagacccctctgacctaaaaaaagtgaaagctgtggaagaaaatggagaagaagctgagccagtacgtaatggtgctgagagtgtttctgagggtgaaggaatagatgctaattcacgctccacagatagttctggggatggggttacattttcatttaaaccacaatcctgtaagcctactgatactgaagggaagaagcagtatgacagggagtttctgctggacttccagttcatgcctgcctgtatacaaaaaccagagggcctgcctcctatcagtgatgtggttcttgacaagatcaaccaacccaaattgccaatgcgaactctggatcctcgaattttgcctcgaggaccagactttacaccagcctttgctgattttggaaggcagacacctggtggaagaggcgtacctttgttgaatgttgggtcacgaagatctcaacctggccaaagaagagaacccagaaagatcatcacagtttctgtaaaagaagatgtacacctgaaaaaggcagaaaatgcctggaagccaagccaaaaacgagacagccaagccgatgatcccgaaaacattaaaacccaggagctttttagaaaagttcgaagtatcttaaataaattgacaccacagatgttcaatcaactgatgaagcaagtgtcaggacttactgttgacacagaggagcggctgaaaggagttattgacctggtctttgagaaggctattgatgaacccagtttctctgtgcgttacgcaaacatgtgtcgatgtctagtaacgctgaaagtacccatggcagacaagcctggtaacacagtgaatttccggaagctgctactgaaccgttgccagaaggagtttgaaaaagataaagcagatgatgatgtctttgagaagaagcagaaagaacttgaggctgccagtgctccagaggagaggacaaggcttcatgatgaactggaagaagccaaggacaaagcccggcggagatccattgggcaacatcaagtttattggagaactctttaaactcaaaatgctgactgaagccatcatgcatgactgtgtggtgaagctgctaaagaaccatgatgaagaatccctggagtgcctgtgtcgcctgctcaccaccattggcaaagacttggactttgaaaaagcaaagccacgtatggaccagtactttaatcagatggagaaaattgtgaaagaaagaaaaacctcatctaggattcggttcatgcttcaagatgttatagacctaaggctgtgcaattgggtatctcgaagagcagatcaagggcctaaaactatcgaacagattcacaaagaggctaaaatagaagaacaagaagagcaaaggaaggtccagcaactcatgaccaaagagaagagaagaccaggtgtccagagagtggacgaaggtgggtggaacactgtacaaggggccaagaacagtcgggtactggacccctcaaaattcctaaaaatcactaagcctacaattgatgaaaaaattcagctggtacctaaagcacagctaggcagctggggaaaaggcagcagtggtggagcaaaggcaagtgagactgatgccttacggtcaagtgcttccagtttaaacagattctctgccctgcaacctccagcaccctcagggtccacgccatccacgcctgtagagtttgattcccgaaggaccttaactagtcgtggaagtatgggcagggagaagaatgacaagccccttccatctgcaacagctcggccaaatactttcatgaggggtggcagcaagtaaagacctgctagacaatcagtctcaagaagagcagcggagagagatgctggagaccgtgaagcagctcacaggaggtgtggatgtggagaggaacagcactgaggctgagcgaaataaaacaagggagtcagcaaaaccagaaatttcagcaatgtcagctcatgacaaggctgcattatcagaagaggaactggagaggaagtcgaaatctatcattgatgaatttctacacattaatgattttaaggaagccatgcagtgtgtggaagagctgaatgcccagggcctactacatgtttttgtgagagtgggagtggagtccaccctggaaaggagccagatcaccagggatcacatgggccaactactctatcagctggtacagtcaggaaaaacttcagcaaacaggactttttcaaaggtttttcagaaactttggaattggcagatgacatggccattgatattccccatatttggttgtaccttgctgaactggtgacccccatgttaaaagaaggtggaatctccatgagagaacttaccatagaatttagcaaacctttacttcctgttggaaggagctggggtcttgctatctgaaatattgcacctactatgcaaacaaatgagccataagaaagtgggagccttatggagggaggctgacctcagctggaaggactttttaccagaaggagaagatgtacataattttcttttggagcagaagttggacttcattagagtctgacagtccctgttcctctgaagcactttcaaagaaagaactgtctgccgaagagctgtataagcgactcgagaaactcattattgaggacaaagcgaatgatgaacagatctttggactgggtagaggctaatctagacgaattcaggatgagttcacctccatcccttagagctttaatgactgctgtttgtaaagcagctattatagccgactcttctaccttcagagtggacactgctgttatcaagcagagagtgccgatctacctcaaggtacctagactcagatacagagaaggaactgcaagcactttatgcactacaagcatccgatagtaaaacttgatcaaccctgccaatttgctgcggatgttttttgatgggtctatatgacgaggaggtgatctccgaggggtgccttctacaatggggtgtgcaggcaaggggcccccgcagagcagaaatgggaagggccgtggcctctgaaatcctgtcacggcattcttcaccgtggcctgcgggaaacagaaagaggagtcctgaggataacctaaaacttcaaatacacaaaatgaaacaaaagaaccaattttaagtattttttttaaaaagtttcacgtccttcgcccaatcacagtgcagcaaggccaattyytcgcagaaacccccacgtgttgcacgagtgggagaggggaaagagaaaaaaaggtgatcatggaggaaaaaggtactggataaaagtaaacttcaaaccttagggcgggagcactaaaaccaaaatacatgtattatttatagaaaatattttctgttttaatcttttctttttaaacaaggactcatacttaaaaaaatgtttagcaaaaaaaaaaaaaagttgagaacttttaatttattttaaggactgcaaatgccagtgtaattttttaatttgcagtttctgtaaacaacttgtataatagaaaagcagagaatgaaaatttccctccccttcaagatgcacctcatgtttgttttaaggtatagccatttagtcccagatttgagaaagtttggggtgaaccaaggttaagaaagattttttttttttttggccatcaaatcatttctgcctgcctctcagcttgcttcagaaaattttaaaaaaatcacaatagtaatcaaaacatacataacattgaaacagaaggaaatgctgtggacccacagaactcccaagaattgtttaaaaaaaaaaaagtgctaccctgagaaaagtactcttaatatctcttgaaatctttagagcaactttaaggcttgtaaatacatagaacaaatatttaaaaaaacaaaaagaaattgactcagtactatttcttttcactttgaaaatataaagaacaaaataaagacaaacattgcaagtttaaaaaaaaaaaaaaaaaag

SEQ ID NO: 134603 - DNA, 327 bp, Homo sapiens
gagaagacgaaagccaacatcaagtgggtgaaggagaacaaggaggtggtgctccagtggttcacagaaaacagcaaatagtccccagcccttgaagtcacccggcacctgtcgcccagtccctgggctgatctcagggaagcccagctccagggccagatgagcagaagctctcgatggacaatgaacggccttgctgggggccgccctgtaccctctttcacctttccctaaagaccctaaatctgaggaatcaacagggcagcagatctgtatatttttttctaagagaaaatgtaaataaaggatttctagatgaaaaaaaaa

SEQ ID NO: 134604 - DNA, 2808 bp, Homo sapiens
atggccaagggcttctatatttccaagtccctgggcatcctggggatcctcctgggcgtggcagccgtgtgcacaatcatcgcactgtcagtggtgtactcccaggagaagaacaagaacgccaacagctcccccgtggcctccaccaccccgtccgcctcagccaccaccaaccccgcctcggccaccaccttggaccaaagtaaagcgtggaatcgttaccgcctccccaacacgctgaaacccgattcctaccgggtgacgctgagaccgtacctcacccccaatgacaggggcctgtacgtttttaagggctccagcaccgtccgtttcacctgcaaggaggccactgacgtcatcatcatccacagcaagaagctcaactacaccctcagccagggcacagggtggtcctgcgtgccccccgacattgacaagactgagctggtggagcccaccgagtacctggtggtgcacctcaagggctccctggtgaaggacagccagtatgagatggacagcgagttcgagggggagttggcagatgacctggcgggcttctaccgcagcgagtacatggagggcaatgtcagaaaggtggtggccactacacagatgcaggctgcagatgcccggaagtccttcccatgcttcgatgagccggccatgaaggccgagttcaacatcacgcttatccaccccaaggacctgacagccctgtccaacatgcttcccaaaggtcccagcaccccacttccagaagaccccaactggaatgtcactgagttccacaccacgcccaagatgtccacgtacttgctggccttcattgtcagtgagttcgactacgtggagaagcaggcatccaatggtgtcttgatccggatctgggcccggcccagtgccattgcggcgggccacggcgattatgccctgaacgtgacgggccccatccttaacttctttgctggtcattatgacacaccctacccactcccaaaatcagaccagattggcctgccagacttcaacgccggcgccatggagaactggggactggtgacctaccgggagaactccctgctgttcgaccccctgtcctcctccagcagcaacaaggagcgggtggtcactgtgattgctcatgagctggcccaccagtggttcgggaacctggtgaccatagagtggtggaatgacctgtggctgaacgagggcttcgcctcctacgtggagtacctgggtgctgactatgcggagcccacctggaacttgaaagacctcatggtgctgaatgatgtgtaccgcgtgatggcagtggatgcactggcctcctcccacccgctgtccacacccgcctcggagatcaacacgccggcccagatcagtgagctgtttgacgccatctcctacagcaagggcgcctcagtcctcaggatgctctccagcttcctgtccgaggacgtattcaagcagggcctggcggctgtgaacaaccggtccatccaactccccaccaccgtgcgggacatcatgaaccgctggaccctgcagatgggcttcccggtcatcacggtggataccagcacggggaccctttcccaggagcacttcctccttgaccccgattccaatgttacccgcccctcagaattcaactacgtgtggattgtgcccatcacatccatcagagatggcagacagcagcaggactactggctgatagatgtaagagcccagaacgatctcttcagcacatcaggcaatgagtgggtcctgctgaacctcaatgtgacgggctattaccgggtgaactacgacgaagagaactggaggaagattcagactcagctgcagagagaccactcggccatccctgtcatcaatcgggcacagatcattaatgacgccttcaacctggccagtgcccataaggtccctgtcactctggcgctgaacaacaccctcttcctgattgaagagagacagtacatgccctgggaggccgccctgagcagcctgagctacttcaagctcatgtttgaccgctccgaggtctatggccccatgaagaactacctgaagaagcaggtcacacccctcttcattcacttcagaaataataccaacaactggagggagatcccagaaaacctgatggaccagtacagcgaggttaatgccatcagcaccgcctgctccaacggagttccagagtgtgaggagatggtctctggccttttcaagcagtggatggagaaccccaataataacccgatccaccccaacctgcggtccaccgtctactgcaacgctatcgcccagggcggggaggaggagtgggacttcgcctgggagcagttccgaaatgccacactggtcaatgaggctgacaagctccgggcagccctggcctgcagcaaagagttgtggatcctgaacaggtacctgagctacaccctgaacccggacttaatccggaagcaggacgccacctctaccatcatcagcattaccaacaacgtcattgggcaaggtctggtctgggactttgtccagagcaactggaagaagctttttaacgattatggtggtggctcgttctccttctccaacctcatccaggcagtgacacgacgattctccaccgagtatgagctgcagcagggatggacacctgccgcagccctgaccatcattacacttccgatagctgagggccacacaactgtgatgagaggaatctcctctcacttccccagctcccgagcccccagggcagacctcgactaccctgtgctcctatga

SEQ ID NO: 134605 - DNA, 239 bp, Homo sapiens
ggcgcctcagtcctcaggatgctctccagcttcctgtccgaggacgtattcaagcagggcctggcggctgtgaacaaccggtccatccaactccccaccaccgtgcgggacatcatgaaccgctggaccctgcagatgggcttcccggtcatcacggtggataccagcacggggaccctttcccaggagcacttcctccttgaccccgattccaatgttacccgcccctcagaattcaa

SEQ ID NO: 134606 - DNA, 654 bp, Homo sapiens
atgcaggctgcagatgcccggaagtccttcccatgcttcgatgagccggccatgaaggccgagttcaacatcacgcttatccaccccaaggacctgacagccctgtccaacatgcttcccaaaggtcccagcaccccacttccagaagaccccaactggaatgtcactgagttccacaccacgcccaagatgtccacgtacttgctggccttcattgtcagtgagttcgactacgtggagaagcaggcatccaatggtgtcttgatccctaaacagcagcaaaacgaaaaataccaagtgcctcaattcgatcaatcaacgattaaaaatattgagtctgcaaaaggacttgatgtgtgggacagctggccgctgcaaaacgctgacggaacagtagctgaatacaacggctatcacgttgtgtttgctcttgcgggaagcccgaaagacgctgatgacacatcaatctacatgttttatcaaaaggtcggcgacaactcaatcgacagctggaaaaacgcgggccgtgtctttaaagacagcgataagttcgacgccaacgatccgatcctgaaagatcagacgcaagaatggtccggttctgcaacctttacatctgacggaaaaatccgtttattctacactgactatccg

SEQ ID NO: 134607 - DNA, 3728 bp, Homo sapiens
  misc_feature (1)...(3728): n = a,t,c or g
tggatctcctctctccaggcggagcgtgcccctgcccagtccagtgaccttcgcctgttggagccctggttaatttttgcccagtctgcctgttgtggggctcctcccctttggggatataagcccggcctggggctgctccgttctctgcctggcctgaggctccttgagccgcctccccaccatcaccatggccaagggcttctatatttccaagtccctgggcatcctggggatcctcctgggcgtggcagccgtgtgcacaatcatcgcactgtcagtggtgtactcccaggagaagaacaagaacgccaacagctcccccgtggcctccaccaccccgtccgcctcagccaccaccaaccccgcctcggccaccaccttggaccaaagtaaagcgtggaatcgttaccgcctccccaacacgctgaaacccgattcctaccaggtgacgctgagaccgtacctcacccccaatgacaggggcctgtacgtttttaagggctccagcaccgtccgtttcacctgcaaggaggccactgacgtcatcatcatccacagcaagaagcttaacttcccccctaagccaggggcacagggtggtcctgcgtggtgtgggaggctcccagccccccgacattgacaagactgagctggtggagcccaccgagtacctggtggtgcacctcaagggctccctggtgaaggacagccagtatgagatggacagcgagttcgagggggagttggcagatgacctggcgggcttctaccgcagcgagtacatggagggcaatgtcagaaaggtggtggccactacacagatgcaggctgcagatgcccggaagtccttcccatgcttcgatgagccggccatgaaggccaggtttcaacatcacgcttattccaccccaagggaccttgacagccctgttccaacattggtttcccaaaggttcccagcaccccacttccagaagaccccaactggaatgtcactgagttccacaccacgcccaagatgtccacgtacttgctggccttcattgtcagtgagttcgactacgtggagaagcaggcatccaatggtgtcttgatccggatctgggcccggcccagtgccattgcggcgggccacggcgattatgccctgaacgtgacgggccccatccttaacttctttgctggtcattatgacacaccctacccactcccaaaatcagaccagattggcctgccagacttcaacgccggcgccatggagaactggggactggtgacctaccgggagaactccctgctgttcgaccccctgtcctcctccagcagcaacaaggagcgggtggtcactgtgaattgctcatgagctggcccaccagtggttcgggaacctggtgaccatagagtggtggaatgacctgtggctgaacgagggcttcgcctcctacgtggagtacctgggtgctgactatgcggagcccacctggaacttgaaagacctcatggtgctgaatgatgtgtaccgcgtgatggcagtggatgcactggcctcctcccacccgctgtccacacccgcctcggagatcaacacgccggcccagatcagtgagctgtttgacgccatctcctacagcaagggcgcctcagtcctcaggatgctctccagcttcctgtccgaggacgtattcaagcaagggcctgggcgtcctaacttccacaacttttggcctaccagaacaccatctacctgaacctgtgggaccacctgcaggaggctgtgaacaaccggtccatccaactccccaccaccgtgcgggacatcatgaaccgctggaccctgcagatgggcttcccggtcatcacggtggataccagcacggggaccctttcccaggagcacttcctccttgaccccgattccaatgttacccgcccctcagaattcaactacgtgtggattgtgcccatcacatccatcagagatggcagacagcagcaggactactggctgatggatgtaagagcccagaacggatctcttcagcacatcaggcaatgagtgggtcctgctgaacctcaaggtgacgggctattaccgggtgaactacgacgaatagaactggaggaagattcagactcagctgcagagaagacccactcggcccatcccctgtcatcaatcgggcacagatcattaatgacgccttcaaccctggccagtgcccattaaggtccctgttcacttctgggcgctggaacaacaccctctttcctggatttgaaggaggagacagtaacatgccctggggaggccgccctgagcagcctgagctacttcaagctcatngtcnngttggaccgctccgaggtctatggccccatgaagaactacctgaagaagcaggtcacacccctcgttcattcacttcagaaaataataccaccacctgggaggggagatcccaggaaaacctggatgggaccagttacagcgaggttaatggccatcaggcaccgcctggttccaacgggtttccaggagtgtgagggagatggtctctgggcctttttcaaggcagtgggatgggaggaaccccaataattaacccgatccaccccaacctgcggtccaccgtcttactgcaacgctatcgcccagggcggggaggaggagtggggacttcgcctggggagcagttccgaaatgccacactggtcaatgaggcttgacaagttccgggcagccctggggcttgcagcaaagagttgtggatcacgtgaacaggttacctgagcttacaccctggaacccggattttattcccggaaggcaggacggcaacctctaccatcatcaggcattaccaacaacgtcattgggcaaggtctggtctgggacgtttgtcacgagcaactggaagaagctttttaacgatttatggtggtggttcgtctcctttctccaccctcatccagggcagtgacacgacgatttctccacctgagtatgagctgcaggcagctggagcagttcaagaaaggcaacgaagaaaacaggcttcggctcaggcacccgggcccctgagcaaagccctggacgaagaccgaaagccaacctcatccaggcagtgacacgacgattctccaccgagtatgagctgcagcagtggttcacagaaaaaacagcaaaataagtccccaagccccttgaaggtcacccgggcccccatgcaagggtgcccaacatgtgtcccaatcccagcgggctgggtgcaggggccttccattccttggaagcccgagggcaccaggtgtccttcccccttcaaagggacaaaagtctcccagccccacgttctctctggcctgtgagccaagtctagttccctgatgacccccaggctgcctgagcaccctccccagcccccntgccccttcatgccaaacccccgccctaaggcctgggcatgggcacctgttcgccccagtgccctgggggttggatctcagggaagccaagctccaagggccagatgagcagaagctctcgatggacaatgacacggccttgctggggggccgccctgtaacctctttcaactttccctaaagacccctaaatctgaggaatcacacagggccagcacgatctgtatatttttttctaagagaaaatgttaaattaaagggttttctcgatgaaaaaaaaaaaaaaaaaaaaaacactt

SEQ ID NO: 134608 - DNA, 429 bp, Homo sapiens
caccccaggccaagatcatccatgacaactttggtactgtggagggactcgtgaccacagtccacaccatcactgccacccagaaaactgtggatggcccctccaggaaactgtgtcataacagccgcagggctctccagaacatcatccttgcctctaccggcactgccaagcctgtgggcaagggcatcctggcctacactgagcaccaggctgtctcctccgacttcaacagtgacacccactcctccacctttgatactggggctggcattgccctcaatgaccactttgtcaagcttatttcctgttatgacaatgaatttggctacagcaacagggtggtggacttcatggcccacatggcctccaaggagaacctgagctccacaggactcaatgaaaaagcaactgtaacagaagagatag

SEQ ID NO: 134609 - DNA, 4466 bp, Homo sapiens
ctcactgccggcttcctcactggaatgtcgtaagctcgcacaatgttcaccagcagctttatgtctccatcagacaggttttgggctgtcaccttcttccgaccttttctccttggccgcagtggtcgcttttgttctgccagcttgaaaaggcttaggcccaaaatgctttcacggagatgatatgcaagaaacacttccagctgtggtgctgcaaccaggtttcctcgtccaccccagaagcttgtgggtggggtctcagccacctctactgccatgcgacaggagagtaagggaatgtctggcactgggagactgatattgggaacttcttcttctactatcatatcagcaagaagaaaatattgttttgcaattaagaaacgatttatcactgattctctaacctgctggaggtacttggctactatggccctatgggtgtctatgtgttccttggtttctattacatttctgtctcgtaaccgtttctcatagtcctggaataccttttccataatttctcggtcatagactggaacttgcttataatttcggaattctggcacctcttggcttctaagatgaagaagcctaaatcgtttggatctatttaattcttgatctgaaacaaagttaaactcctgttgcagctgctccagtctaaagaaatcagggacataggattcaccactggtagcaaccgagataagctgcatcaaaggggcattgttggggtcatttgggtcgagcttggactctgctgcccacttggccaattttttcatgtctgtcagtcctgatgtgccaatagatgagatggcatctgctttcttcaaagcactccgaaatccgatgttctgctgtgacaatggaggaattaaaggtatcccgttttctccaatggcccatgccacactatgagacactttccctgaggtcatcagagtcagctggttactgccatcagcttcaaatgagaagggcactccacttccaactccctcgtggtccagtgtcacatgctgattactgctaaactccacttcttcagtaggagcccttccagtgacaacagtagtctcaggaataggcagaaacacttctgctagcaaggtgggactactgtgtccgacagtttcatagaccttctgcttgtagaactgccttggcattcttatctcaagcctggctagaagctctgagcccatcagtggaggcatggctgggcacctgcaggaggggaggccttcttgccttctctcctgtctttctgagtctgccagtgggtgtctcctggcccacttcctttccttcctgcctgcctcattactgtcttctgctcttccttctagctctctatccggtcttctcatgttaatcttggtcttcctgatatcagcttttcctactgctaagaggacagaggaagaggagcccttcaagtgttccaggccatcagcctcagcagaagccccagagcagatggaatagagagtccacgtggaccccacagcaggggcagggacctcacaggggctgtgtccagtgaccacgtatctgaaggctgccccagttctcctctccagtgcagagttgggcaactctctacttttacctcctgggttcattagaagagctgcccaccacagcttgggaacaggaccctggaggcgctggccttggtcagccaccccctttaattggtcaattgtggtaaggtccagggggtccttgaagtggggcttatgtggccaggatggcatctgaagtgttaaactctccggccagttgactatttgcaaattgaaaatctgcccaaagtgaactcggaagtctgctcctagtggccgactgactgtcctggacacctccttgttgttgaacagcacttttaagtacactgagcgcttctttacatcctcccttctcgagacctccgctctggggcactggtcattgggtgttacgcttcctgccaggcttagctccgggaccagcgtgggctcccaaggcctcctcctgctctgggctgctctctccctcacctcctgctctatcactgcccgatcagtgggctctggagggctgggcttcacaaggtcctcctcgggatacggctctgcaatctcatcaccgggatgttcttctgctgcttgtttccttttcttcttcttggccctctgttgagttagaggcaacatgatatcaaacaggaattttggaatttcatttaagagcacagtcttcatagccagatggacttgcactttcctccaggccttccactgttgtaacgacgttctgtattcttccatcttctgtgcgtactcctccgtgtgctcttctaacagttcacttatttcagcttgaatttctgcttcatatgcttcttcatctgctttctggtcagctttttcctttctcaaaacaagtttcaagggagtatttgtaaatctctggaactctcgaagggatttcatctctttccaaacttttatgatagtcttaagcaatgttctatctttttcttgttcagcatcacggaattttcttgtttgtcgaatttcagatttatactcattgatggttttttggatggtatcgagagactgatgaggtttttctggatcaaggccagtctgaacagcatttcttaaagcttggagcttatcagtaagaaatttcgccttgtttctctggtgtcttgcaaggtactggtcatataactgggccagcttggctgccaaaacatgctctcggctaaaacagggatgatgagtgaagattaaccctgaaatatcaatgtccagttggaaatttccaggagggtctccagatctgatcacatgctgactactgtgaacgtattttacagcctttttatacagtgtttcaagctctgccttaatgctctgctcctgtgttagtactggcggccttgaaggaaatggcttgatggggtttggcagagctaggatcctgccgtcatctccaaaccatcttctttcggggtcctgcatcagcaatctgttctccatgatgttctgattggtgcgtgccacctctggtcttaccccggtgtaaaggccttcatcttccaggaacctgggctgtacattctcaggaagctttttatatgtagggactgtctgcctactgggtatgaagagcatttctctttccatctgcagccgatcatggatgctttcataatctgcaggtctgactgctacaaaatcgtcagccacgtgatctaagcccaataggaagtcctcggcatcatcaccattaagcagttcttcctcatccatttcctttcctcctccttgtgcaggtggttcttcttcttccccttcctcctcctcttgattagttcccgctctatgtcttgcttttggtttttcctctgatccttctggttcgggatcaaagttgaaagtaaagaagttataggcctcttctgcagaagggaagccaggtggaacctggggtttaggcttgatttttcgtgcagaatcatggaacttgactcttgagtaactttgggagtcaacttcttgttgagtcctttctacctctttccctggcacagagctgaatccccctatatccccactggctgtcaactccactgagctcctcaagggtgagctgtcactgtcatcactgggtgttctgagcctatcggacacctctgtgccaaattcagtctccaattctttcttactgggacttcgtaagcgtctgggccgaggagtggggatttcctgcagcaatgcactttctgctttggacctcgctgcttgcaatttctccctcatgcgtcccctcatggaaaattctgcaaagcctgttctggaagttgaaggaattggaggtaagccttcgatgctggggctggcattgccctcagtgaccactttatcaagctcatttcctggtatgacaatgaatttggctatagcaatagagtggtggacctcatggcccacatggcctccaaggagtaagaccctccgtgggcctctccggactgtcatactcaggaggcgggtcttgggctcctcctgcacaggctcctgggggttgccaaggtgggatttttcggacaccatttccttggggacagcagttggtggctgtttctttcttggctgtcttcgaacctttgagttcttattctgtcttcccatgtctgcatcctcatcattttcaatgaactcctctgtaattatttttactttttcttccctgggattcattttggctgggatgggtcccctctctcctggctcccatccatcttctatccctgtctgttctgagttttgcccaagaagttcatctctgtgcactgcatcaccaagactatctgggcacctggagtcatgggctttgaccagtgaggggtataaataggagacatgtgataggatggtggtgccctcttcatcttccaccat

SEQ ID NO: 134610 - DNA, 1211 bp, Homo sapiens
cagacagccgcatcttcttttgcgtcgccaggcgagccacatcgctcaaacaccatggggaaggtgaaggccctagtcaacggatttgatcgtattgggcgcctggtcaccagggctgcttttaactctggtaaaggggatattgttgccatcaatgaccccttcattgacctcaactacatggtttacatgttccaatatgattccacccatggcaaattccatggcaccgtcaaggctgagaacgggaagcttgtcatcaatggaaatcccatcaccatcttccagggagcgagatccctccaaaatcaagtgggggtgacactggcgctgagtacgtcgtgggagtccactgggcgtcttcaccaccatgggagaaggctggggctcattttgcaggggggagccaaaagggtcattcatcttttgccccctctactgaagccatcatgttcatgatgaaagtgaattatgagaagtatgacaacagccttaagatcatcagcaatgcctcctgtaccaccaactgcttagcgcccctggccaaggtcatccatgacaactctggtattgttgaaagactcatgattacagtccatgtcatcactaccacccagaaaactgtggatggcccttgcaggaaactgcggcctgatggccacagggctctccagaacatcatacctgcatctactagcactgccaaggcaatggtcaaggtcatccctgagctgaacaagaagctcactggcatggcctcccatgtccccactgccaaggtgttggtcgtggacccgacctgccatctggaaaacctgccaaatattatgacatcaagaagatgatgaagcaggcttcagaggatcctatcaagggcatcctgggctacactgagcaccagattgtctcctccgacttcaacagtgacacacagtcttccacctttgatgctggggctggcattaccctcaacgaccactttgtcaaggctcatttcctggtatgacaatgaatttggctacagcaacagtgtggtggacctcatggcccacgtggcctccaaggagctttctggttactctttgaaagtttcttttgctgtgcagaagctctttagtttaattagatccaatttgtcaattattgcttttgatgcaattgttttcggtgtctttgtcatgaaatctttgcctgtttctatatgcagaatg

SEQ ID NO: 134611 - DNA, 603 bp, Homo sapiens
  misc_feature (1)...(603): n = a,t,c or g
cccactgccaacgtgtcagtggtggacctgacctgccgtctataaaaacctgccaaatatgatgacatcaagaaggtggtgaagcaggcgtcggagggccccctcaagggcatcctgggctacactgagcaccaggtggtctcctctgacttcaacagcgacacccactcctccacctttgacgctggggctggcattgccctcaacgaccactttgtcaagctcatttcctggtatgacaacgaatttggctacagcaacagggtggtggacctcatggcccacatggcctccaaggagtaagacccctggaccaccaagccccagcaagaagcacaagaggaaaagagagaccctcactgctggggagtccctgccacactcagtcccccaccacactgaatctcccctcctcacagttgccatgtagaccccttgaagaggggaggggcctagggagccgcaccttgtcatgtaccatcaataaagtaccctgtgctcccaaaaaaagagaggaagaacatgccacaattagtnnnnnnnnnnncagaaaatcccctccctaaaaattatcatgtaaacccctgtgggggggggcgggcg

SEQ ID NO: 134612 - DNA, 3399 bp, Homo sapiens; identical to SEQ ID NO: 121454

SEQ ID NO: 134613 - DNA, 3129 bp, Homo sapiens; identical to SEQ ID NO: 121455

SEQ ID NO: 134614 - DNA, 553 bp, Homo sapiens
aagatgcctaagagagcagccgttgtggccagggaaattaattacactgtcttagtgacaagtgggtgatcagaaaacaagaagcgcgtgtggaagggaacatgaatcagcagcattaagttcgagtaagagcaatactctaatgaccgtgggcccccaagaaactgaaaccactccacattggctttctcttctcacgttgtcaagcaacacgtaagtctcgcatgctgcatcctggctctctctcagggaagacaggcaggtggtaaattgcagaacacgttaccaggtttgagaatgtcagaatgccgttgtcctgggtcaagaggttggaacgaaacaggccaccgctcagggataagaggactcccgggaggggctggtcatcctcagcttttatctggggatgagaaggtgagaccagagcaaggttaaactcctactacctatgaaaataacagttccacaagtcaagaggtcatttttacaaggtttttttcttttattgttactcaaaggaggacaggggacctaatcgaattccaccgcactg

SEQ ID NO: 134615 - DNA, 891 bp, Homo sapiens; identical to SEQ ID NO: 132547

SEQ ID NO: 134616 - DNA, 4713 bp, Homo sapiens
atggggtctacaggtgtgtacaaagtgacccctcgctcctgccaccggtttgagcaagcgttctacacctatgacacgtcttcacctagtatcttgacattgacagccattcgccaccatgtccttggaactatcaccaccgacaaaatgatggatgtcactgtgactatcaagtcttccatcgacagtgaacccgccttggtcttaggccctctgaagtctgtgcaggagctgcggagggagcagcagctggctgagatcgaggcccgcaggcaggagagggagaaaaacggcaatgaggaaggtgaagaaagaatgaccaagcctcccgtgcaggagatggtagatgagttacaaggccccttctcgtatgatttctcttactgggcgcgtgtcctctgttttgtggggacaggacccgccaaactgaagtatattaattattttaggtctggagagaaaatcactgttacaccgtcatctaaagagctgctcttttatcccccttcaatggaagccgttgtcagtggagaaagctgcccagggaagctgatcgagatccacgggaaggcaggcctgtttttagaaggccagatccaccccgagttggaaggagtcgagattgtcatcagtgaaaagggggcaagttcaccgctgatcacagtctttactgatgacaaaggtgcctacagtgttggccccctgcacagtgacctggagtacacggtgacctcacagaaggagggctatgttctgactgcagtggaaggaaccatcggagacttcaaggcctatgccctggcaggcgtcaccctccacagccaggatgtcctcatgctccctggtgacctcgttggcttgcagcacgacgctggccctggcgccctcctgcactgctcgccggctcccggccaccctggtccccaggccccgtacctctccgccaacgcctcgtcatggctgccccacttgccagcccagctggagggcacttgggcctgccctgcctgtgccctgcggctgcttgcagccacggaacagctcaccgtgctgctgggcctgaggcccaaccctgggctgcggctgcctgggcgctatgaggtccgggcagaggtgggcaatggcgtgtccaggcacaacctgtcctgcagctttgacgtggtctccccagtggctgggctgcgggtcatctaccctgccccccgcgacggccgcctctacgtgcccaccaacggctcagcctcggtgctccaggtggactctggtgccagcgccacggccacggctcgctggcctgggggcagtgtcagcgcccgctttgagaatgcctgccctgccctggtggccaccttcgtgcccagctgcccctgggagaccaatgataccctgttctcagtggtagcactgccgtggctcggtgagggggagcacgtgatggacgttgtggtggaaaacagcgccagccgggccaacctcagcctgcgggtgacggcggaggagcccatctgtggcctccgcgccacgcccagccccgaggcccgtgtactgcagggagtcccagtggtcctgctggctggctcctcaggctacctggtgggctttaaattcctggaaagtcacggctctgacagcggctccgctaactcattccaccgtctcatttcacgaaatgaatttaaaactccgctccctgacctcacacgagtccccaggtacagccccgtggtggaggccggctcggacatggtcttccggtggaccatcaacgacaagcagtccctgaccttccagaacgtggtcttcaatgtcatttatcagagcgcggcggtcttcaagctctcactgacggcctccaaccacgtgagcaacgtcaccgtgaactacaacatcaccgtggagcggatgaacaggatgcagggcctgcgggtctctacagtgccagccgtgctgtcccccaatgccacgctggcactgacggcgggcgtgctggtggactcggccgtggaggtggccttcctgtggacctttggggatggggagcaggccctccaccagttccagcctccgtacaacgagtccttcccggttccagacccctcggtggcccaggtgctggtggagcacaatgtcacccacacctacgctgccccagctgcacttggaggcggtgccgtcctcaccaggcagccctcagtgctgctgcacctgtgctccgtcccgcacgtggcttgggagcctgggacccttaaggctgggccgcaggtgagtacagtcctgaccgtgctggcatctaatgccttcgagaaccggacgcagcaggtgcctgtgagcgtgtgcgcctccctgccctctgtgagcgtgtgcgcctccctgactggggcctgctggtaccccagagtgctgatccgcagtggccgggtgcccattgtgtccttggagtgtgtgtcctgcaaggcacaggccgtgtacgaagtgagccgcagctcctacgtgtacctggagggccgctgcctcaattgcagcagcggctccaagcgagggggatacaccttcacgctgacggtgctgggccgctctggcgaggaggagggctgcgcctccatccccctgtcccccaaccgcccgccgctggggggctcttgccgcctcttcccactgggcgctgtgcacgctctcaccaccaaggtgcacttcgaatgcatgggctggcatgacgcggaggatgctggcgccccgctggtgtacgccctgctgctgcagcgctgtcgccagggccactgcgaggagttctgtgtctacaagggcagcctctccggctacggagccgtgctgcccccgggtttcaggccacaattcgaggtgggcctggccgtggtggtgcaggaccagctgggagccgctgtggtcgccctcaacaggtctctggccatcaccctcccagagcccaacggcagcgcaatggggctcacagtctggctgcacgggctcaccgctagtgtgctcccagggctgctgcggcaggccgatccccagctcgtcatcgagtactcgctggccctggtcactgtgctgaacgagtacgagcgggccctggacgtggcggcagagcccaagcacgagcggcagcgccgagcccagatacgcaagaacatcacggagactctggtgtccctgagggtccacactgtggatgacatccagcagatcgctgctgcgctggcccagtgcatgaggaagctgcctgaacaggacatcgcacaaggatcctacattgccctgccattgacgctgctggttctgctggccggttacaaccatgacaagctcattcctttgctgctgcagttgacaagccggctacagggagtcggcgcgctcggccaggcagcctctgacaatagcggcccagaagatgcaaagagacaagccaagaaacagaagacaaggcggacacttgcaacatccatcaacaccagccgagagcccagtacagacgaccagctcccagcccacaatcagaccatgccacagagacacgcacgccgtagcgcacccccaagagcctacgaccgcaaaacaagacaagaagagaacccacaccaaacgagaagtcacgccgctgcgaagcgccgcgagagaccgccccacgacctacagaaacaagcaaccacgcggctgatccccgccggaccgagacgcagagacgggacatccccgagacggacacaaccaccaccgaacacgcgacgcccagcggcggcgggccacctagcacgatttcggcgagccgcgcccggcgcccgcggcgcccgccctcccacagcccgaagggggcgagaagaactcgaccccgcccacatctacgccgccgcccccggactaccaaccccgcccagggcgggaaggacgccccccaccccggaaaggcgagacaggaacacgcgacgccggcggacccgagaagagggagaaggcgagtttagacccgtgtctttcctgaagactatcttcccgtctcaaaatggacatgatggatccacggatgtacagcagagagccaggaggtccaactgccgtagacaggaaggaattaaaattgtcctggaagacatctttactttatggagacaggtggaaaccaaagttcgagctaaaatccgtaagatgaaggtgacaacaaaagtcaaccgtcatgacaaaatcaatggaaagaggaagaccgccaaagaacatttctctacagagaaactaagacctgacgatgacatctgccgccgctcgacatcaaaacattatagaaaattcacgaagggatctacggaggtcctcagcaaatggcagcccctgggtcctgcgggagttcaggtgtctctgagaaacactgggaccgaagcaaagatccagtccacagttacacagcctggcggaaattcatgcctgtcacctctgtcaaacccagtcgaatgttctgtgactggtccctgctgtgctgcaaggattggttttatgccagaaatccttgagattaagggagacgtaagcactcctctttccgatcagcacatggagcacccctcttggcacacagtgccatctctatttcccaagccttcaagcaaaagtctaaagaaaaataggcaatttgaatttgctaaaacacttgatatgcatcgcacgttcacgacattctcttgcttccgccagcagagatga

SEQ ID NO: 134617 - DNA, 4369 bp, Homo sapiens
tgaggggcgggacccggctgccggcggtgggtctagctggggttaggtttgtccatgctggtgggccagggcgcggggccgctggggcccgcggtggtcaccgccgcggtggtgctgctgctgagcggcgtggggccggcgcacggctcggaggacatcgtggtgggctgcggtggcttcgtcaagtcggacgtggagatcaactactctctcatcgagataaagctgtacaccaagcatgggactttgaaataccagacagactgtgcccctaataatgggtactttatgatccctttgtatgataagggggatttcattctgaagattgagcctcccctagggtggagttttgagccgacgaccgtggagctccatgtggatggagtcagtgacatctgcacaaagggtggggacatcaactttgtcttcactgggttctctgtgaatggcaaggtcctcagcaaagggcagcccctgggtcctgcgggagttcaggtgtctctgagaaacactgggaccgaagcaaagatccaggccacagctacacagcgctggcggaaagtttgcattttttaaagttctgcctggagattatgaaatcctcgcaactcatccaacctgggcgttgaaagaggcaagcaccacagtgagtgtaaccaactccaatgccaatgcggccagtcccctcatagttgctggctacaatgtgtctggctctgtccgaagtgatggggagcccatgaaaggcgtgaagtttcttctcttttcttctttagtaactaaagaggatgaccctgggctgcaatgtctcaccagtgccctgggttccagcccccaatacgagaagtctggtgtaatttgtgctacacggtctccagagaagatggctcgttctctttctattccttgccaagtgggggctacactgtgattccgttctatcgaggggagaggattacctttgatgtggcgccttccagacttgacttcacagtggagcatgacagcttgaaaatcgagcccgtgttccacgtcatgggattctccgtcaccgggagggtcttgaacggacccgaaggagattggtgttccagaagcagtaagtcaccctgaataaccaaatcaaagttaaaacaaaagcttgatgggctcattcccgccttgagaacataaccacagggacatacaccatccatgctcagaaagagcacctctacttttgaaacggtcaccatcaaaattgcaccgaacacacctcagctggctgacattgttgcaacagggttcagtgtctgtggtcggatatcaatcattcgcttcccggacaccgtcaagcagatgaataaatacaaagttgtcctgtcatctcaagacaaggacaagtctttggtcaccgtggagacagatgctcatggatcattttgttttaaagcaaaaccagggacttacaaagtgcaggtgatggttcctgaggcagaaaccagagcagggctgacgttgaaaccccagacatttcctcttactgtgaccaacaggcccatgatggatgtggcctttgtacagttcttggcatcagtttctgggaaagtctcttgtttggacacctgtggtgacttgctggtgactctacagtccctgagccgccagggtgaagaagcggagcctccagctctccggcaaggtcaacgccatgactttcacctttgacaacgtgctccctggaaaatacaaaataagcatcatgcatgaggattggtgctggaagaacaagagcctggaggtggaagtgctggaggatgacatgtctgcagttgagttcaggcagacgggctacatgctgagatgttccctgtctcacgccatcactctggaattttatcaggatggaaatgggcgtgagaatgtggggatttataacctctccaaaggagtcaaccgattctgcctgtccaagcctggtgtgtacaaagtgacccctcgctcctgccaccggtttgagcaagcgttctacacctatgacacgtcttcacctagtatcttgacattgacagccattcgccaccatgtccttggaactatcaccaccgacaaaatgatggatgtcactgtgactatcaagtcttccatcgacagtgaacccgccttggtcttaggccctctgaagtctgtgcaggagctgcggagggagcagcagctggctgagatcgaggcccgcaggcaggagatgtgtttattacggcaaagaggaaggcgaagaaagaatgaccaagcctcccgtgcaggagatggtagatgagttacaaggccccttctcgtatgatttctcttactgggcgcggtctggagagaaaatcactgttacaccgttcatctaaagagcttgcttcttttatccccctttcaatgggaagccgttgttcagtgggagaaagcttgcccggggaagctgattcgagatccatgggaaggcaggcctggttttataaggccagatccaccccgagttggaaggagtcgagattgtcatcaagtgaaaagggggcaagttcaccgcttgattcacagtctttactgatgacaaaggtggcctacagtgtttgggccccttgcacagtgaccgggagtacacggtgacctcacagaaggagggctatgttctgactgcggtggaaggaaccatcggagacttcaaggcctatgccctggcaggcgtaagctttgagataaaagctgaggatgaccagcccctcccgggagtcctcttatccctgagcggtggcctgtttcgttccaacctcttgacccaggacaacggcattctgacattctcaaacctgagccctggccagtattacttcaaacccatgatgaaggagttccggtttgagccatcctcacagatgatcgaggtgcaggaaggccagaacctggaagatcaccatcacggggtacccgaaccgcttacagttgcttatggcacagtgtccttccttaaaccgagagcccgaacaaggggttggccatgggaagcggtgggccaagaacgactgcaagcattttacggagaagacaccggtgacagacgaagaggggcaagttcagattaccgtggattgctgccggggatgtgtgtaccacggttcagctcaaggccagaaggcaacggaccacattgagcgggcgctcccccaccatagggtgattgacggttgggaataatgacatcagatgatgtaaacatcataagttttccggcagattaatcaatttgatttaagtgggaaatgtgattcacttcctctggaataccttccctacattatggggttcaagcttttacaaaagcgaaaaacctcgacaatccaatccagacagtttcccttggccaagtccctgttcttccatttccccccactgctcagagatgggcgagaactatgtttgtgcttctgggactccacacttcccagatcccagtattgactaccatcttgcctcaagttttcttttcaccgcagttggggctaaccattaaacacatcaccttggatttttatttcccacggagggaagctgcctggaacagggacattcgcacaaaggatccttacattgccttggccattgaccgctgctggttctgctgggccggttacaacccatgacaagctcattcctttttgctgctgcaagttgacaaagccggcttacaggggagtcggcgcgctcgggccaggcaagccctcttgacaatagcgggccagaaagatgcaaagagacaagccaagaaacagaagacaaggcggactttaaggaaggaaggggacagttgcagtctcatttggggacaggccacagccagggggttccggccactacccggccctgtggattaaaagcccaaaaagcatgcgtcaagctaactttcagcctgtgctgctgggcccggcaccccatgtccccttgtccactgtggcatcctgcacccatcctcaccccttccgtagaagcccctcgttgcaattgcaattgaaatggaccctcctgtcactctggcttgaacagaatttaatttttcttgagtcaaattattaatttaataattaatttttggtcaaaagaagtattttaagctgtgctgtggtgtgagaaaggcaattcttgatcttcagccttttttttgcaagaagagttccagttgatgtggtgtttggttccatggcggggtaccctaggaattcatactgttttattcacttccctttgcatgtgagatcctgctggaaaccacggcaacctgtatcctctattaggaggtaaaaatcaataaaatggcccattcatttgtgttgtagctcaaaaaaaa

SEQ ID NO: 134618 - DNA, 427 bp, Homo sapiens
gaggaagagaccgttccgaccacagccggagcctctccagggcctcctcgtaacaagaagaatcgggagctccgtcctcagagaccaaaaaatgcttacatcttaaagaagtctcggatctctaagaagcctcaggtcccgaagaaaccccgagaatggaagaacccagagccttcagcagcagcatcataaggaggcgaaggccaagcccacgggggcccggccatctgccctggacagatttgtgcgctgagccagactccagggttgcctgggaacagtctctccccaagatcacctgtagggaaatgagtgttccctggaacaaggaggtgggggcagtgtggccccttccccaactgggggtggacagctgtctcctggggtgggttggtattaaagaggaaagcgattttttggataatga

SEQ ID NO: 134619 - DNA, 433 bp, Homo sapiens
ctggggccggtgagcccaacttcgatggcctggagagtaatccatacagaagccggaagcagcgccaggagtgggaggtgaaggccctgctagagaaggtacctgcagagcttatttgtctggacccacgagccctggccgaggtggatgtcatctccctggagcagggaaagaaggagcagagccttcagcagcagcatcataaggaggcgaaggccaagcccacgggggcccggccatctgccctggacagatttgtgcgctgagccagactccagggttgcctgggaacagtctctccccaagatcacctgtagggaaatgagtgttccctggaacaaggaggtgggggcagtgtggccccttccccaactgggggtggacaacagtcttctcgggtgggttggtattaaagaggaaaaagattttttgg

SEQ ID NO: 134620 - DNA, 731 bp, Homo sapiens
cgagaatggaagaacccggagtcccagcgcggcttgtccggggcccaagatccattcccaggccccgcccccgtccctgtggaagtggtccagaagttctgtcgcattgacaaatcccgaaaggtgaggtccagccggagagttgggaagtgctggaggcagggagtgtctgggtgagttggatggaggctgggacaggtagctctcctgtgaccccacttatcctgtgggtcttctgccactcctccccaccaacaatgttacagctaccacattctaaagccaaaactcgaagccgacttgaggtggctgaagctgaggaagaggaaacaagtatcaaagctgctcgttctgagctgctgcttgctgaagaacctgggtttctggaaggggaggatggggaagacacagcctgccacttctcactctgtgcctgtgtcctccccgtctccggtccccaggacaaggtccggcagagccttcagcagcagcatcataaggaggcgaaggccaagcccacgggggcccggccatctgccctggacagatttgtgcgctgagccagactccagggttgcctgggaacagtctctccccaagatcacctgtagggaaatgagtgttccctggaacaaggaggtgggggcagtgtggccccttccccaactgggggtggacagctgtctcctggggtgggttggtattaaagaggaaagcgattttttggaaaa

SEQ ID NO: 134621 - DNA, 621 bp, Homo sapiens
ttaattggtctggacccagagcccctggccgaggtggatgtcatctccctggagcagggaagaaggaagcagatagagaggctgggctatgacccgcaggctaaggctcccttccagccaaagccaaagcagaagggccgcagctccacggcaagcctggtgaagaggaagaggaaggtcatggatgaggaaaaacagggtaaaatgaacaattggcaatgggccgggccttcccaaaggctgcaccctccctgcttgtgccctctgcccttgtcagcctgcccacttcctcactctgtgccctgtgtccctcccgtctccggtcccccaggacaaggtccggcagagccttcagcagcagcatcataaggaggcgaaagcccaaagcccacgggggcccggccatctgccctggacagatttgtgcgctgagccagactcccagggttgcctgggaacagtctctccccaagatcacctgtagggaaatgagtgttccctggaacaaggaggtgggggcagtgtggcccctttcccaactgggggtggacagctgtctccctggggtgggttggtattaaagaggaaagccgattttttggataaaaaaaaaaaaaaaaa

SEQ ID NO: 134622 - DNA, 2122 bp, Homo sapiens
tttcaagccgactgtgtggcagctgagaggagttttgcacgtggatcgcctgtttgtttgggcgagtatggagacagcccccaagccgggcaaggatgtccttttccaagaaagacaaacttcagaccaagagaaagaaacctgcggcgatactgggaggaagagaccgttccgaccacagccggagcctctccagggcctcctcgtaacaagaagaatcgggagctccgtcctcagagaccaaaaaatgcttacatcttaaagaagtctcggatctctaagaagcctcaggtcccgaagaaaccccgagaatggaagaacccggagtcccagcgcggcttgtccggggcccaagatccattcccaggccccgcccccgtccctgtggaagtggtccagaagttctgtcgcattgacaaatctcgaaagctaccacattctaaagccaaaactcgaagccgacttgaggtggctgaagctgaggaagaggaaacaagtattcaaagcttgcttcgttctgagctgctgctagctgaagaaccttgggtttctggaaggggaggatggggaagacacagcaaagatatgccaggctgacattgtggaggctgtggacattgcaagtgcagccaagcactttgacttgaatctgcggcagtttggaccctacagactaaactactctcgaactggaagacacctggcttttggagggcgccgaggtcatgtggctgcccttgattgggtaacaaagaagcttatgtgcgagatcaacgtcatggaggcggtgcgggacatccggtttctccattctgaggcactgcttgctgttgctcagaaccgctggctccacatctatgacaatcagggcattgagctccactgtatccgccgctgtgaccgagtaacacggcttgagttcctgcccttccacttgctcctggatacagcttcagaaacagggtttctaacctacctggatgtgtcagtggggaagattgtggcagctctgaatgctcgagctgggccggctcgatgttatgagtcagaacccttacaatgccgtcatccatatcggacacagcaatgggtactgcgtctttatgggagtccagctatggaagggagccactggcaaaagattctctgttcatcgtgggttggggtccggggctgtggcaagtagattcttacaggcacgttacatgggccacctctgggccttaggaccaccagcttgaagatctttttgactttgcgaggggacgttacccagcctcttgagcactcgggaccctgccccatgggagcagggcacctggccttctcccagagggaattgcttggttggccggattgggtgacgttgtcaacatctgggcagggcagggcaaggccagcccacccttccttggacagaccttacttcacccaccgggttttaaggccctgtgcatggccttcagttctgcccctttgaagatgtgctgggggtggggcacacataagggcatcaccagcatgctgggtccctggggccggtgagcccaacttcgatggcctgggagagtaatccattacagaagccggaagcagcgccagggagtgggaggtgaaggccctgctagagaaggtacctgcagagcttatttgtctggacccacgagccctggccgaggtggatgtcatctccctggaaacagggaaaagaaggaaacagatagagaggctgggctatgacccgcagggctaaggctcccttcccagccaaagccaaagcagaaggggccgcagctccaaggcaaaccctggtgaagaggaagaggaaggtcatgattgaggaccacaagggggcaaggtccggcagagccttcagcagcagcatcataaggaggcgaaaggccaagcccacggggggcccgcccatctgccctggacagatttgtgcgctgagccagactcccagggttgcctgggaacagtctctccccaagatcacctgtagggaaatgagtgttccctggaacaaggaggtgggggcagtgtggccccttccccaactgggggtggacagctgtctcctggggtgggttggtattaaagaggaaagcgattttttgga

SEQ ID NO: 134623 - DNA, 455 bp, Homo sapiens
agcctggcggagctgcctgtcacccatcctgccggagtgaggcctcccatccctggaccgccttatgtggcctcccctgacctctggtcccactgggaagactcagccctgcccccaccaagcctgaggcctgtgcagcccacctgggagggctcctcagaggcaggcctggactgggctggggccagcttctccccagggactccgatgtgggcggccttggatgagcagatgctgcaggagggcatccaggcatcgcttcttgacgggccagcccaggaaccccagagcgcaccatggctgtccaagtcctctgtctcctctctgcggctgcagcagctcctactctgtctaaagagggccacagtggggagcaggggcacctctggaggcaggagaggccccccagcatgctgccctagtacgtgtttagaataaaaaccagtttgtttttc

SEQ ID NO: 134624 - DNA, 425 bp, Homo sapiens
cgcgccagccggtcggcaggggtcacgcggccgggtgtgcgcggaatggattcagggttctcgggtcgcgcccgggagctagagtcctgactcccagccggggtccccgaccggcctttcggggttgccgggcgcgctctgcaaaggggaaactgaggcccaaggaaattgagtatctctgcaaagtcaccagctgagttcgaaccagacagatcctgggaccccctactctatccgccaccggaagaatctccgtccttgtctttccattctgccctcccggcttcccagcctcccatccctggaccgccttatgtggcctcccctgacctctggtcccactgggaagactcagccctgcccccaccaagcctgaggcctgtgcagcccacctgggagggctcctcagaggcaggcctggactg

SEQ ID NO: 134625 - DNA, 1562 bp, Homo sapiens
gcagcctgcgggccccccggcggtttcatagtgaccggcttgaggcctggccaaatcctccccttcacgcagggcctcgaaggccgcaggccccgcccacgtggcgggaggcccggagctcagggcgcgaggaccgccacacaatggaggccaaggcgggcaaggtgcttgagagggtattggtgagataaaagctccagtaataacttgttattgttttcttttatccccagcacacagccccaggaccacccttgaccgtcctcaaccaagcgatgcatgccaggggcccccatggccaactgtccccagcactgcctctggcctcctcagtcctgatgctgctgatgaacctggcacacctgggacagccttggatgttggggccactaacctggcacataagccccttctctctcccagtgcaccggctgctgacccatgccctgggccacacggccctgccaggcctgctcctgagcctgctgctcctgcccactgtgggctggcagcaggagtgccacctgggcacgctgagattcctgcatgcctcagccctgctcgccctggcttctgggctgctggcagtgctgctggcaggccttgggctgtccagtgcagccggcagctgtggatacatgcctgtccacctggccatgctggctggggagggacaccgccctagacggccccgtggggcactgccaccgtggctgtcgccgtggctgctgcttgccctgaccccactgctcagctctgagccacccttcctgcagctcctttgcggcctccttgccggcctggcctgtatcctttgcctgagcccagggcccgtggggatgtgtgggttctgtgggtgggtgcctgggaaggaagtggcacaaaggggtgaaggcccaagcaataccaaggagccgtgcacacacattgcctggcctgtggcgtgggcccacccctggctgcttttggttttccttgaccggccgccctgccccgggcagacagatgcagctggggccttccggtggctggaaccctcagagcgacggctgcaggtgctgcaggagggcgtcttgtgcaggaccttggcggggtgggatgccagtccaggtggtgggcactgtggcagggctgccagtcaggccctcttctcttcccactcctccaggcctcccatccctggaccgccttatgtggcctcccctgacctctggtcccactgggaagactcagccctgcccccaccaagcctgaggcctgtgcagcccacctgggagggctcctcagaggcaggcctggactgggctggggccagcttctccccagggactccgatgtgggcggccttggatgagcagatgctgcaggagggcatccaggcctcagaggtggggtcccctggtataggggccggggtggccctgacactccccacttctccccccacccccaacaggctgcagcagctggagcgcatgggcttccctacggagcaggcggtggtggcactggcagccacaggccgtgtggagggtgccgtgtcactgttggttggaggacaa

SEQ ID NO: 134626 - DNA, 1912 bp, Homo sapiens
  misc_feature (1)...(1912): n = a,t,c or g
tgggtgctgactaccgtagcttacgaagttcgaccgccctggaattccccggncgacccacgcgtncgcccacgcgtccgcggagatcggcgggagggttgggggaagggacccggactagaacaactgctgactaatccgcgggccgcggggaatgggtggcgcgccagccggtcggcaggggtcacgcggccgggtgtgcgcggaatggattcagggttctcgggtcgcgcccgggagctagagtcctgactcccagccgggggtccccgaccggccgtttcggggttgccgggcgcgctctgcaaaggggaaactgaggcccaaggaaattgagtatctctgcaaagtcaccagctgagttcgaaccagacagatcctgggacccccgtactctatccgccaccggaagaatctccgtccttgtctttccattctgccctcccggcttcccagtaagcacacagccccagggaccacccttggaccgtcctcaaccaagcgatgcatgccagggggcccccatgggcaaactgtccccagcactgcctcttggcttcctcagtcctgatgctgctgatgagcaccctgtggctggtgggggccggccccggcctggtcctggccccggagctgttgctggacccctggcaggtgcaccggctgctgacccatgccctgggccacacggccctgccaggccttgctcctgagcctgctgctcctgcccactgtgggctggcagcaggagtgccacctgggcacgctgagattcctgcatgcctcagccctgctcgccctggcttctgggctgctggcagtgctgctggcaggccttgggctgtccagtgcagccggcagctgtggatacatgcctgtccacctggccatgctggctggggaaggacaccgccctagacggccccgtggggcactgccaccgtggctgtcgccgtggctgctgcttgccctgaccccactgctcagctctgagccacccttcctgcagctcctttgcggcctccttgccggcctggcctatgcagctggggccttccggtggctggaaccctcagagcgacggctgcaggtgcctgcaggagggcgtcttgtgcaggaccttggcggggtgctggcccctgaggctccttgccaccccgggtagcctggcggagctgcctgtcacccatcctgccggagtgaggcctcccatccctggaccgccttatgtggcctcccctgacctctggtcccactgggaagactcagccctgcccccaccaagcctgaggcctgtgcagcccacctgggagggctcctcagaggcaggcctggactgggctggggccagcttctccccagggactccgatgtgggcggccttggatgagcagatgctgcaggagggcatccaggccttcgcttcttgaacggcccagcccaggaaccccagagcgcaccatggctgtcccaagtcctctgtctcctataatgcggctgcagccagctggagcgcatgggcttccccctacggaggcagcggtggtggcactggccagccacaggccgtgtggagggtgcccgtgtcactgttggttggaggacaaagtggcacatgagaccctggttacccatggaaagggtgggcctgcccactccgagggtccctgggcctccctagcccaggcagagagtggggcacaggccaggccctttgggtgcttaagggctgggcctgcatgtgggtagcccgagctccctactctgtctaaagagggccacagtggggagcaggggcacctctggaggcaggagaggcccccccagcatgctgccctagtacgtgtttagaataaaaaccagtttgtttttcaacctggacctccttgggggccaaaaaaaaaaaaaaaaa

SEQ ID NO: 134627 - DNA, 401 bp, Homo sapiens
ctcgatgaggcaatatctggccctcaagtccttcttcagtctctccacgttgcggatattggtcagttcttcaagtcccacaagaaggaccatggctccaaacaccatttggagtagtctctccagcctcagctcagagatgcccacctcagatgacagaacaatgagggtgatgcacagtcgtgttctcggtcctcgcagagctcagctgcacctccagattctgcccaaacatgtggactccattgagggaaccgatgacagagaacgggaggtggggactgtcagtgcgggtcttggagcatggcggtaatcagagtaactcggcctgtggtccggagccgccagagggcgagatggggagctgattggaagaggattaacttcccgcattaatcccc

SEQ ID NO: 134628 - DNA, 1840 bp, Homo sapiens
ggaagaggtaagcggttactcactccatggctgcagcaaggagaggcggcggcggcctcggctgaagaaagaagaaatcttcccaaggctgcagacaccgacggatttgctttgggagccagagtagctgccgccaccagagtccggagccatgagcggctttaattttggaggcactggggcccctacaggcgggttcacgtttggcactgcaaagacggcaacaaccacacctgctacagggttttctttctccacctctggcactggagggtttaattttggggctcccttccaaccagccacaagtaccccttccaccggcctgttctcacttgccacccagactccggccacacagacgacaggcttcacttttggaacagcgactcttgcttcggggggaactggattttctttggggatcggtgcttcaaagctcaacttgagcaacacagctgccaccccagccatggcaaaccccagcggctttgggctgggcagcagcaacctcactaatgccatatcgagcaccgtcacctccagccagggcacagcacccaccggctttgtgtttggcccctccaccacctctgtggctccagctaccacatctggaggcttctcattcactggtggaagcacggcccaaccctccggtttcaacattggctcagcagggaattcagcccagcccacggcacctgccacgttgcccttcactccggccacgccagcagccaccacagcaggtgccacacagccagctgctcccacacccacagccaccatcaccagtactgggcccagcctctttgcgtcaatagcaactgctccaacctcatctgccaccactggactctccctctgtacccctgtgaccacagcgggcgcccccactgctgggacacagggattcagcttaaaggcacctggagcagcttccggcacctccacaacaacatccaccgctgccaccgccaccgccaccaccaccaccagcagcagcaccaccggctttgccttgaatttaaaaccactggcgccagccgggatccccagcaatacagcagctgccgtgaccgctccacctggccctggcgcagctgcaggggcggctgccagctccgccatgacctacgcgcagctggagagcctgatcaacaaatggagcctggagctagaggaccaggagcggcacttcctccagcaggccacccaggtcaacgcctgggaccgcacgctgatcgagaatggagaaaagatcaccagcctgcaccgcgaggtggagaaggtgaagctggaccagaagaggctggaccaggagctcgacttcatcctgtcccagcagaaggagctggaagacctgctgagcccactggaggagttggtcaaggagcagagggcgaccatctacctgcagcacgcggatgaggagcgtcagaaaacctacaagctggctgagaacatcgacgcacagctcaagcgcatggcccaggatctcaaggacatcatcgagcacctgaacacgtccggggcccccgccgacaccagtgacccactgcagcagatctgcaagatcctcaatgcgcacatggactcactgcagtggatcgaccagaactcggccctgctgcagaggaaggtggaggaggtgaccaaggtgtgcgtgggccggcgcaaggagcaggagcgcagcttccggatcacctttgactgagcgacagcagccctggggcccgcaggtccctagggagttcatgaggggaatgcgccctgttgtctgtagtttggggttgtggcaagatacttgtttgtttgtttctttctttcacagacg

SEQ ID NO: 134629 - DNA, 446 bp, Homo sapiens
acccatctcgccctctggcggctccggaccacaggccgagttactctgattaccgccatgctccaagacccgcactgacggtccccacgtgagggaccgcggtgggagtcctaaatgggggaggaggggacgggcggcactgtgcatctgctgtgcctcgcggcctccagcggggtccccctattctgcaggagcagtcgcggcggcgcccccgcccgtcagcaggtggggccttggacgcctgtatctaaaccgaagggggttcggtgtttttgactctgggtcttcaaggcagtaggggctggggaagtttcagtgttgaatttgtaggaccgaggaggcaatggaccaataagcctggttccccaaagaggcactgccaggtcatatggaaagaggatggggctgggagctggcacacttgggtcctaagggggaaggagatg

SEQ ID NO: 134630 - DNA, 386 bp, Homo sapiens
cggcctcccggttgggaccgcgcgagggcggggcgcggaagaatccgggagggccgtgctccgccacccagtatatatctgtccccagtccccggggccgcctcattccctgtcctcggatcacagtctcttctcactacagtgtcgccgcctctgcctgcgtagccccggccatggctctgtagcctcgacccctttgtgcccccggcccgtctccgcgctcaccacgcctgcgctctccgctcccaccttctttcttcagccgaggccgccgccgcctctccttgctgcagccatggagtgagtaaccgcttacctcttctccaactgcctttcccgccctttcgcagctcgtggccctctttagggagccctgggacgccctc

SEQ ID NO: 134631 - DNA, 573 bp, Homo sapiens
aggaatccggttggtggcggctggggacgcccgaggccgtgctgctcccctggctggtggggtccctgtcgccgcagaccgctcgcgactacccggtgtacctgccgcacgggagccccacggtcccacaccggctcctgaccctgactctgctgccgagcctggagctgtgtctactctgcgggccgagcccacccctcagccagttgtatccacagcttctggagcgctggtggcagccactgctggacccgttgcgggcctgtctgccgttgggaccccgggcgctgcccagtggcttcccccttcacacagacatcctcgggctgctgctcctccacctggaactgaagcgctgcctcttcaccgtggagcccttgggggataaagagccttcaccaaaacagcgccggcgcctcctccgaaacttctataccctggtcacctccacgcacttcccaccagagccagggccaccagagaagacagaagatgaggtctaccaggcccagctgcccagagcttgctacctggtgttggggactgaggaaccacgcacaggagtgcgtctgg

SEQ ID NO: 134632 - DNA, 487 bp, Homo sapiens
acaagagtcgctgttccaaaagtgaagcctgtcgtctgtgtggccggagtctgggtggcaagtgagaacaggccggtggaaggggtacttgtgcctggttgaaagggagccccaaatttaatccctccagtgccagaggtggagaaagaaaaccctgtagcaggtgtggttgctgccgtctttgcagtgccaaacgtgaacccgcctgtaggggccccagtgcctccaaaattaaacccgctcatggctccggactctggtggcggcagctactctggctcccaaagcaaatccgtcggtgtctgcagccttgggaagatttcacgcctgcgctctccgctcccaccttctttcttcagccgaggccgccgccgcctctccttgctgcagccatggagtgagtacccgcttacctcttctccaactgcctttcccgccctttcgcagatcgtggccctctttagggagccctggggggtggacgaaa

SEQ ID NO: 134633 - DNA, 585 bp, Homo sapiens
gtacatgctgctcatcccgcagcagctgctgaccacgctagtgccggtgttccggaactcgcgcctggtccagttccacttcaccaaggacctggagacactgaagagcctgtgccggatcatggacaatggcttcgccggctgcgtgcacttttcctacaaagcatcgtgtgagatccgcgtgcttatgctcctgtactcttcagagaagaaaatcttcattggcctcatcccccatgaccagggcaactttgtcaacggcatccggcgtgtcattgcaaaccaccaacaggttcttccaccgaaacctggagcaggagcaacagcaacgagggatgggggggtagtggttaccccgggctgggcccctccaggagtcacagattgaggcccccgcaagagactgtgcttgggagcctgtggccagcagcccccacttgcacccctgcccccaggtgacatgcttctgagcagggggcccctggggacttcaactgcccagcaacatggaggatggtgtcctgaggcctccaaggacggtccccacccctctacgtttccccaataaagccttttaaaaacctg

SEQ ID NO: 134634 - DNA, 830 bp, Homo sapiens
ctcaatggagtccacatgtttgagcagaatctggaggcgccgctgagctctgcgaggaccgacaacacgactgtggcgcggaaaagcttccatgacagcatcaccctcattgttctgtcatctgaggtgggcatctctgagctgaggctggagagactactccaaatggtgtttggagccatggtccttcttgtgggacttgaagaactgaccaatatccgcaacgtggagagactgaagaaggacttgagggccagttattgcctcatcgacagcttcctgggggactcggagctcatcggggacctgacccagcgtgtggactgcgagattcctccagaggggtccctcttgcaggaagccctctccgggttcgctgaggccgcgggcacgaccttcgtcagtctggaggtgtccggccgggtggtggcagcaacagagggttggtggtggctggggacgcccgaggccgtgctgctcccctggctggtggggtccctgccgccgcagaccgctcgcgactacccggtgtacctgccgcacgggagccccacggtcccacaccggctcctgaccctgactctgctgccgagcctggagctgtgtctactctgcgggccgagcccacccctcagccagttgtatccacaggctgctgctcctccacctggaactgaagcgctgcctcttcaccgtggagcccttgggggataaagagccttcaccagaacagcgccggcgcctcctccgaaacttctataccctggtcacctccacgcacttcccaccagagccagggccaccagagaagacagaagatgaggtctacc

SEQ ID NO: 134635 - DNA, 1413 bp, Homo sapiens
atgggacttaaactggggaacatcctgagctttggggctaccaggaaacccaaacctgcctcagtggatgccaacaccaagctgacgcggtcactgccctgccaggtctacgtgaatcatggcgagaacctgaagacggagcagtggccccagaagctgatcatgcagctcatcccccagcagctgctgcgatttcttgagaagatgtcgaataaacgcgtcacgtcgtacccgaccaccgtacgacgagacacgacagcagttatgctagttgaagcagacgaatgggtgaagtatgagcccaacctcctggttcgggcctgcaaccagctgggccagttcctgcagcaccgggagaccaacctgcgctacctggccctggagagcatgtgcacgctggccagctccgaaagctcttgtaacaacgacgtgcctgtctgcatacagcgagagaaagcggagtatatccgtgcgtttcccttcgtcccacttcgacgccagtgctgctggtcttctgatgaggcagagagttacacaggtcacacgacggagcgcgtgtatgttgaggaggcccccgcgccggagagcccgcagaccgccgagcccacactccgctcccgcccgggccccgggcacgcgtgccgccttgtggttcggccgcggcgaccccactccggcggcggtcccccgagcttggtacggctcagcccgtgtgccccgaagccgcgcgcccgcgccgagcatgctgagatcggtggagcccgcagcagaccttgtggatcggggagtctggcgcgcgattgggctggtgccgcctatcctcaggccggagtcttgaggtattgctccggagaagcgcctgggatcgggtcggcggttgctatacgcagcgctaaagggatgaaggttgaactccagctgggatgtcctgatgtggatgggacaagccctcaacaggaggcgcagaaaatcttcaaagccaaccagcccatggacgcagaagttactaaggccaagcctatcgggatggcggctgctcgagtggatactctggagacgaacccggaaaacggcgtgggcggcgagatcatgcagacgaaagcgtgcagccctcaacaggaggcgcagaaaatcttcaaagccaaccaccccatggacgcagaagttactaaggccaagcttctggggtttggctctgctctcctggacaatgtggaccccaaccctgagaacttcgtgggggcggggatcatccagactaaagccctgcagatctctagctacctctacttaaatactgctcttgtggacttgcctggtgtggcggcctcccaggcatgtgactctcagcaggtgacttggcttctctacgttgctaatggtgcctactcggcatgtaacaggcctggatga

SEQ ID NO: 134636 - DNA, 440 bp, Homo sapiens
gaccgcaagcaaaagaagagagacccagaaacaagtcggcggctctgaggctacgccagcggaagcgggcagagggtgaagccctggagggcgaagtcccaggggctggaaggcacggaattcgcgagctgaaggaacgggcagagtccgtggagcgcgagatccagtacgtcaaggaccatgctcatcgaggtttacaaggcccggagccagaggacccgtagctgctagaagggcaggggtgtggcttctgggggctggtcttcagctctggcgccttcatccccctgcctctaccttcattccaaacccctctcggccgggtgcagtggcttatgcttgtaatcccagcactttgggaggccaagggcaggaggatcgtttgaggcccaggaggtcaataccagcctgggcaaccatagtaagaccctgtctctatt

SEQ ID NO: 134637 - DNA, 2469 bp, Homo sapiens
ggacagcatggacagtgtcaagcagagtgcggccctgtgcctccttcgactgtacaaggcctcgcctgacctggtgcccatgggcgagtggacggcgcgtgtggtacacctgctcaatgaccagcacatgggtgtggtcacggccgccgtcagcctcatcacctgtctctgcaagaagaacccagatgacttcaagacgtgcgtctctctggctgtgtcgcgcctgagccggatcgtctcctctgcctccaccgacctccaggactacacctactacttcgtcccagcaccctggctctcggtgaagctcctgcggctgctgcagtgctacccgcctccagaggatgcggctgtgaaggggcggctggtggaatgtctggagactgtgctcaacaaggcccaggagccccccaaatccaagaaggtgcagcattccaacgccaagaacgccatcctcttcgagaccatcagcctcatcatccactatgacagtgagcccaacctcctggttcgggcctgcaaccagctgggccagttcctgcagcaccgggagaccaacctgcgctacctggccctggagagcatgtgcacgctggccagctccgagttctcccatgaagccgtcaagacgcacattgacaccgtcatcaatgccctcaagacggagcggggacgtcagcgtgcggcagcgggcggctgacctcctctacgccatgtgtgaccggagcaatgcccagcagatcgtgtcggagatgctgcggtacctggagacggcagactacgccatccgcgaggagatcgtcctgaaggtggccatcctggccgagaagtacgccgtggactacagctggtacgtggacaccatcctcaacctcatccgcattgcgggcgactacgtgagtgaggaggtgtggtaccgtgtgctacagatcgtcaccaaccgtgatgacgtccagggctatgccgccaagaccgtctttgaggcgctccaggcccctgcctgtcacgagaacatggtgaaggttggcggctacatccttggggagtttgggaacctgattgctggggacccccgctccagccatccagtgcagttctccctgctccactccaagttccatctgtgcagcgtggccacgcgggcgctgctgctgtccacctacatcaagttcatcaacctcttccccgagaccaaggccaccatccagggcgtcctgcgggccggctcccagctgcgcaatgctgacgtggagctgcagcagcgagccgtggagtacctcaccctcagctcagtggccagcaccgacgtcctggccacggtgctggaggagatgccgcccttccccgagcgcgagtcgtccatcctggccaagctgaaacgcaagaaggggccaggggccggcagcgccctggacgatggccggagggaccccagcagcaacgacatcaacgggggcatggagcccacccccagcactgtgtcgacgccctcgccctccgccgacctcctggggctgcgggcagcccctcccccggcagcacccccggcttctgcaggagcagggaaccttctggtggacgtcttcgatggcccggccgcccagcccagcctggggcccacccccgaggaggccttcctcagcgagctggagccgcctgcccccgagagccccatggctttgctggctgacccagctccagctgctgacccaggtcctgaggacatcggccctcccattccggaagccgatgagttgctgaataagtttgtgtgtaagaacaacggggtcctgttcgagaaccagctgctgcagatcggagtcaagtcagagttccgacagaacctgggccgcatgtatctcttctatggcaacaagacctcggtgcagttccagaatttctcacccactgtggttcacccgggagacctccagactcatctggctgtgcagaccaagcgcgtggcggcgcaggtggacggcggcgcgcaggtgcagcaggtgctcaatatcgagtgcctgcgggacttcctgacgcccccgctgctgtccgtgcgcttccggtacggtggcgccccccaggccctcaccctgaagctcccagtgaccatcaacaagttcttccagcccaccgagatgggcggcccagggtttcttccagcgctgggaagcagcttgagcctccctcaacagggagggcgcagaaaatcttcaaagccaaccaccccatggacgcagaagttactaagggccaagcttctggggtttgggctctgctctcctggacaatgtggaccccaaccctgagaacttcgtgggggcggggatcatccagactaaagccctgcaggtgggctgtctgcttcggctggagcccaatgcccaggcccagatgtaccggctgaccctgcgcaccagcaaggagcccgtctcccgtcacctgtgtgagctgctggcacagcagttctga

SEQ ID NO: 134638 - DNA, 1654 bp, Homo sapiens
ttttttttttcaggtttttaaaaggctttattggggaaacgtagaggggtggggaccgtccttggaggcctcaggacaccatcctccatgttgctgggcagttgaagtccccaggggcccctgctcagaagcgtgtcaccagtctctgcgggggcctcatctgtgactcctggaggggcccagcccggggtaaccactaccccccccatccctcgttgctgttgctcctgctccaggttccgctgcaggacctgctgctggttggcaatgacacgccggatgccgttgacaaaattgcccttggtcatgggggatgaggccaatgaagattttcttctctgaagagtacaggagcataagcacgcggaatctcacacgatgctttgtaggaaaaagttcacgcaagcccgcgaagccattgtccatgatccggcacaggctcttcagtgtctccaggtccttggtgaagtggaactggaccaggcgcgagttccggaacagcggcactagggtggtcagcagctgctgcgggatgagctgcatgtacagcttccttggccactgctcggtcctcaggatctccccctggttcacgtagacgtgggatggcagccacctcttggaccgactgttgggctcaggcctgggcttttgggggagaggcaaagaggagccctcagggctggagacccccaatgccagtgtcccctcccagccacagtccgtgaggatctgggggtcccaagtccctgggctgccgagtgctcacctcctgccactccatgacaccactccatgccagaaacttgttgttgacgatctggactgggcctgagttgacaccaccaggtcccactgcctgttggaagggaacggggtgggaagaggggcccaggctcctgggaaacctgtctgtctgtcctggggcctgccatccctccctccgagccttggcctgttagccccagctgggtccattctctagtcccaggggaacaggccctgcccctcatctgctcacagccccccatggctccccagtggcctgagacaggtcccggccctcacctggtgcacaggacctgcagagtctgcctcaactggcaaggcatgaccaggacacgtggttaccaggcagggccttccagccgcaggacgatcccaacccctgcccagctccccgctccgctggcttccctgccgccgcgccaagacccaccctccagccctgcagagccgcccagtggccgcttttccatggagccctggtgggaacccgcccggcatcctccgggctcccctgcagctccttgctccagccatcgcatcacactccgcccacaccaagtctggctgcccaaccagggcagtggggtctaatccccctctgtccccagaggggctgtgcttggctggcacacctgcttgcgggtggtgatgacctgccggatggcactgacgaagccgctctggtcgtaggggatgaggcccatgaagatcttcttcttggacgagtacaggagcatgagcacgcgcacctcacagggggagatgtgggggaacagcatgcagcccgcgaagccgttgcccatgatgcggtagaggcctttgagagacaccagacaccttgttggtgaaatggaactggaccatc

SEQ ID NO: 134639 - DNA, 7043 bp, Homo sapiens
atgatggggggacagcaggcacccccagggctggggccaattctggaggaccaagccaggccctcacagaatctgggttacctgttcatttctgtgctggtgaactcgaactcggagctgatccgcctcatcaacaacgccatcaagaatgacctggccagccgcaaccccaccttcatgtgcctggccctgcactgcatcgccaacccgaggccgccgccgcctctccttgctgcagccatggaagtcgtgagacgctatagagtacgacggacatgcattgacgcagcgatcatgctcagcgagagcagagtgatatatcatgactggtcgctaactacgatctacgccggatatgacctagtgctcctgtatcgtcgtcactctagagactcagaagacgacgacagacgacatgaggagctaccgagactagcgagcgacgtgcagacgcagacacgcctgctgctgactcatagcacgtccacacgaacatcccctgaggccttgtgcatgccaggctccatgtcgggtgacaccagggacacagatgagtcagaaccaagctctgctcttacggagctccctgtccttctggcagggagcttctggagcgctggtggcagccactgctggacccgttgcgggcctgtctgccgttgggaccccgggcgctgccagatggcttcccccttcacacagacatcctcggcaaaagaagagagaccagaacaagtcggcggctctgaggtaccgccagcggaagcgcaggagggtgaggccctggaggcggagtgccaggggctggaggcacggaatcgcgagctgaaggaacgggcagagtccgtggagcgcgagatccagtacgtcaaggacctgctcatcgagaccaccctagtgccgctgttccggaactcgcgcctggtccagttccacttcaccaaggacctggagacactgaagagcctgtgccggatcatggacaatggcttcgcaggcactgtggccccaggaggggtgagcggcccttccccagcccagctggatggccccagccctcggtccttaatgcaagtcggttatgcctgtaggttgaaaggcatcagggaggaaaatgggaccagaatgccagaggatgcggctgtgaaggggcggctggtggaatgtctggagactgtgctcaacaaggcccaggagccccccaaatccaagaaggtgcagcattccaacgccaagaacgccatcctcttcgagaccatcagcctcatcatccactatgacagcaacagagggttggtggcggctggggacgccgaggccgtgctgctcccctggctggtggggtccctgccgccgcagaccgctcgcgactacccggtgtacctgccgcacgggagccccacgtgtcccccggccgcgcgctcacagttccggatgtcggagatgaacaccgcgagcccccgcatcccatcgcccttggacacggccggcatgatggcggtggtgtcggctccaggcctggccgcagtgggacctggtggtgtcaactcaggcccagtccagatcgtcaacaacaagtttctggcatggagtggtgtcatggagtggcaggagcccaggcctgagcccaacagtcggtccaagaggtggctgccatcccacgtctacgtgaaccagggggagatcctgaggaccgagcagtggccaaggaagctgtacatgcagctcatcccgcagcagctgctggacacgctaggctcctggcagcgctgtgtgaccacgtgtgagacagccctgaagcaagggaaacgggtcgccatcgacaacacaaacccagacgccgcgagccgcgccagatggcagcctgagcgaggagacccccgccggcccccccacctgctcagtgcccccagcctcagccctacccagacagcagtacgccaagtccctgcctgtgtctgtgcccgtctggggcttcaaggagaagaggacagaggcgcggtcatcagatgaggagaatgggccgaaacccaaacctgcctcagtggatgccaacaccaagctgacgcggtcactgccctgccagggctccctaaagagggccacgagctgcgaaagggcgggaaaggcagttggagaagaggtaagcggttactcactccatggctgcagcaaggagaggcggcggcggcctcggctgaagaaagaaggtgggagcggagagccaggcgtgggttacctgttcatttctgtgctggtgaactcgaactcggagctgatccgcctcatcaacaacgccatcaagaatgacctggccagccgcaaccccaccttcatgtgcctggccctgcactgcatcgccaacgtgggcagccgggagatgggcgaggcctttgccgctgacatcccccgcatcctggtggccggggacagcatggacagtgtcaagcagagtgcggccctgtgcctccttcgactgtacaaggcctcgcctgacctggtgcccatgggcgagtggacggcgcgtgtggtacacctgctcaatgaccagcacatgggtgtggtcacggccgccgtcagcctcatcacctgtctctgcaagaagaacccagatgacttcaagacgtgcgtctctctggctgtgtcgcgcctgagccggatcgtctcctctgcctccaccgacctccaggactacacctactacttcgtcccagcaccctggctctcggtgaagctcctgcggctgctgcagtgctacccgcctccaggtaatgaacgccgtgcactccccaacccggggtggcctgctgctggcatctgggggcctcctgctccacggcgcaccagcttgttcctctatctggtgaattttcctgcggaaaattctgcagaaaaatctgcggaaccattttttgctggaacgcttgacagctcttgcatacacttgaaaacacgtcacattctaggaaacgtggtgattggtgctcctgtgagctgctggctggcatctgtcagtggtggagagctctgggggcctctaggccaggaggatggcaccgagtgtgcctgcagtggcctcttgctgaatggacacttggaggatgcggctgtgaaggggcggctggtggaatgtctggagactgtgctcaacaaggcccaggagccccccaaatccaagaaggtgcagcattccaacgccaagaacgccatcctcttcgagaccatcagcctcatcatccactatgacagtgagcccaacctcctggttcgggcctgcaaccagctgggccagttcctgcagcaccgggagaccaacctgcgctacctggccctggagagcatgtgcacgctggccagctccgagttctcccatgaagccgtcaagacgcacattgacaccgtcatcaatgccctcaagacggagcgggacgtcagcgtgcggcagcgggcggctgacctcctctacgccatgtgtgaccggagcaatgccaagcagatcgtgtcggagatgctgcggtacctggagacggcagactacgccatccgcgaggagatcgtcctgaaggtggccatcctggccgagaagtacgccgtggactacagctggtacgtggacaccatcctcaacctcatccgcattgcgggcgactacgtgagtgaggaggtgtggtaccgtgtgctacagatcgtcaccaaccgtgatgacgtccagggctatgccgccaagaccgtctttgaggcgctccaggcccctgcctgtcaacgagaacatgggtgaaggttggcggctacatccttggggagtttgggaacctgattgctggggacccccgctccagcgtggccacgcgggcgctgctgctgtccacctacatcaagttcatcaacctcttccccgagaccaaggccaccatccagggcgtcctgcgggccggctcccagctgcgcaatgctgacgtggagctgcagcagcgagccgtggagtacctcaccctcagctcagtggccagcaccgacgtcctggccacggtgctggaggagatgccgcccttccccccgagcgcgagtcgtccatcctggccaagctgaaacgcaaagaaggggccaggggccggccagcgccctggacgattggccggagggacccccagcagcaacgaccatcaacgggggcatggagcccaccccccccagactgtgtgacgcccctcgccctccgccgacctcctggggctgcgggcagacccccttttcccgcagcacccccggcttctgcaggagcagggaaccttctggtggacgtcttcgatggcccggccgcccagcccagcctggggcccacccccgaggaggccttcctcagcccaggtcctgaggacatcggccctcccattccggaagccgatgagttgctgaataagtttgtgtgtaagaacaacggggtcctgttcgagaaccagctgctgcagatcggagtcaagtcagagttccgacagaacctgggccgcatgtatctcttctatggcaacaagacctcggtgcagttccagaatttctcacccactgtggttcacccgggagacctccagactcatatcctctcaggcccggcccagcctcctgcctctccacgtcggccttcctcaccgtggggaagccggctgacccagctggctgtgcagaccaagcgcgtggcggcgcaggtggacggcggcgcgcaggtgcagcaggtgctcaatatcgagtgcctgcgggacttcctgacgcccccgctgctgtccgtgcgcttccggtacggtggcgccccccaggccctcaccctgaagctcccagtgaccatcaacaagttcttccagcccaccgagatggcggcccaggatttcttccagcgctggaagcagctgagcctccctcaacaggaggcgcagaaaatcttcaaagccaaccaccccatggacgcagaagttactaaggccaagcttctggggtttggctctgctctcctggacaatgtggaccccaaccctgagaacttcgtgggggcggggatcatccagactaaagccctgcaggtgggctgtctgcttcggctggagcccaatgcccaaggcccaagatgtaccggctgaccctgcgcacccagcaaggagccccgtctcccgtcacctgtgtgagctgctggcacagcagttctgagccctggactctcgccccgggggatgtggccgggcaactgggcaagccccttggactgaggcaagttttggtggatgatgggggacctccactggtgacagagaagacacccagggtttgggggatgccctgggactttcctccggccttttgaatctttactttcagaccatctgctgctgtttacattctggggggttagggggagtccccctccctccctttcccccccaagcacagaggggagaggggccagggaagtggatgtctccatcccctcccaccccacccttgttgtagcccctcctacccccctccccatccaaggggcttgtgtattattgtgagcgaataaacagatagaccgcttacagccccatgtctgggtccatcaccccctgctaggtagtcaaagaagtggggtgagcgcatgcagagtgtgggtggccaggcttcgcagcccactgggtgggactctgtgggagacagcagcagcagcagccgccgaagccccagctgcaaggccaccagacgcactcctgtgcctggttcctcagtccccaacaccaggtagcaagctctgggcagctgggcctggtagacctcatcttctgtcttctctggtggccctggctctggtgggaagtgcgtggaggtgaccagggtatagaagtttcggaggagcggccggcgctgttctggtgaaggctctgctttatcccccaagggctccacggtgaagaggcagcgcttcagttccaggtggaggagcagcagcccgaggatgtctgtgtgaagggggaagccactgggcagcgcccggggtcccaacggcagacaggcccgcaacgggtccagcagtggctgccaccagcgctccagaagcgtggggctcccgtgcggcaggtacaccgggtagtcgcgagcggtctgcggcggcagggaccccaccagccaggggagcagcacggcctcgggcgtccccagccgccaccaaccctctgttgctgccaccacccggccggacaccaccagactgacgaaggtcgtgcccgcggcctcagcgaacccggagagggcttcctgctgagagtcacatgcctgggaggccgccacaccaggcaagtccacaagagcagtatttaagtagaggtagctagagatctgcaagagggacccctctggaggaatcacgcagtccacacactgggtcaggtccccgatgagctccgagtcccccaggaagctgtcgatgaggcaataactggccctcaagtccttcttcagtctctccacgttgcggatattggtcagttcttcaagtcccacaagaaggaccatggctccaaacaccatttggagtagtctctccagcctcagctcagagatgcccacctcagatgacagaacaatgagggtgatgctgtcatggaagcttttccacaccacagtcgtgttctcggtcctcgcagagctcagctgcacctccagattctgcccaaacatgtggactccattgagggaaccgatgacagagaacgggagctgctgacgggcgggggcgccgccgcgactgctcctgcagaatagggggaccccgctggaggccgcgaggcacagcagatgcacagtgccgcccgtcccctcctcccccatttaggactcccaccgcggtccctcacgtggggactgtcagtgcgggtcttggagcatggcggtaatcagagtaactcggcctgtggtccggagccgccagagggcgagatgaggaaaagattggaagaggattaacttcccgccttcttcacccaactcaaacagacacgaaatcgtcgacccgggaattc

SEQ ID NO: 134640 - DNA, 636 bp, Homo sapiens
gacttgaagcaggagctccagaacttggtcgcccatcccagaaaaagaaaaaaccaaactgcagaagcagagagaggatgagctaatccagaagatccacaaactggtgcagaagagagacttcctggtggacgatgcggaggtcgagcggttaagggagcaagaagaagacaaggaaatggctgatttcctgagaatcaagttaaaacctctagacaaagtaaccaaatctccacccatatagcagtcccagagggcccatctgtaaagatcgagcttgtgtgtggtgtcgtggtcacatctcccggggccaccacagagatgccagcaggatgccactttgccagcccgacacacggacctttgtaaagaacagcaacaggcaggagaggcagcgtgtgaccagattgtgtcccgtcattgggtggcatatgttaactagctgccaaacaacttcaacccgtgtaattcatgtacatttgcaacagccagcccggtacagcctgtgtgacttttctgtatgtgtgtgtgtgtcgtgaccagcctaagtagttagcataactcaagatgctgatgtgcagtcacccatcagagaaaataaaaatggaaaccacgttcccagcaaaaaaaaaaaaa

SEQ ID NO: 134641 - DNA, 452 bp, Homo sapiens
tttcgtttctggtcctttttcctcagagatcacttcaataaaaaaatgtatgaggaatttagacaacttgcttgggaagatgcaaaagaaaattacaggtcagatattttcctttacaccttcaagggaggttttattattttcctcctcctttttttcctttaccccaggtagatccgatagagggagtttttagaaaataatttttaaaactagtactgaagtagcctgattttgaaccgtgaaagtagcacaatataactagagggagacctgtattagttttctatttctgcattgcaaattaccccaaaactccataggttaaaacaataaacatttgttagttcacagcattttaaaagtttttactttttttcttgattatggaagtaatccatgtaaatagtaaatcattttaaaagtacaaaaagtatgaagaagtttgtctt

SEQ ID NO: 134642 - DNA, 2971 bp, Homo sapiens
tgcggcacaggctgaagtctgtcctcaaggtgtatgatggtcgcagagcaaggctgtgccctggaaccatgtcagggtctgtcccatggtgcagcccttggggtcctgatggttgtatttccctgtcctccctgcaacaagatcagctggacatcatctcccatggcggagacaacccatgatgcccagaggagattgagctggagatggcaaaaattcagcgtctccgggaagtcttggtccgccgggagtctgagctcaggttcatgtcatttgaggagcaatacaatgaggatcacaaaaagggtgtcattgatctcttcacagcagacagcttaaaaaccatgaccagacttgtgacaggggtgtggctcgcttacttggctgccactgcatcaaaccccttgcaggagggggagcatgcaggtgagcagattggggctgggggctgcaggtccaggcttgagggtggagccctcacctgggaccctgtccttctgccgcctgtccgtatcagcaggatgctactgctgctgctgatacctggggaattgccagggatagcgtttaagctcatgaatcctacgaaagctgaaccaatgcacatgtttatcatcttggaaccatttgatttgaggaaattgatggatgacatccagctctgcaaggacatcatggacttgaagcaggagctgcagaacttggtcgccatcccaggctgtaccagaagcatgatgctggtgtctgctcagctgctggaaggcctcaggaaacttataatcatggcggaagacaagggagcagacatgtcacgtgcccagagcaggagcaagagacctcccaaaatgctcatctgtctccttgttgatgtcttctttccagaaaaagaaaaaaccaaacttgcagaagcagagagaaggatgagctaatcccagaagattccacaaactggtgcagaagagagacttcctggttggacgatgcggaggtcgagcggttaaggggagcaagaaggaagacaaggaaatggctgatttcctgagaatcaagtgtaaaacctctagacaaagtaaccaaatctccagccagctcccgggcagagaagaaagcagagcccccgccttagcaagcccacggtggccaagacggggctggcattgatcaaggattgttgcggggccacccagtgcaacattcatgttagcccccacgtggggtgccctgggccatggggacccccccccaccctcttgtctttatagcccccatttcaccggggcccaagagctctccaaggcagaaggggttgaagggcaagcccgtggactgttcaccagagggccatgggcacggcagggcgggcctggggcaccctgttacagagttttaggcagttaggggagttttttcaccgttcgacatggttcctccccagagcatgcccgaaccccaggagtcttgtctcactgtttatccaaacaccaggaaaggtcctccctcaaaaaagcatatctccacttctctctagctgtatctaacccaccgtgtgaatgaactggggagaggggcatgctccccaagctgtgtgtagttcgtgacttcttcaacaatctaggcaccatgttcgggacacgtttccccattccaccctccttaggttctgctcttcaggagcttagggcacatggggcacaggttcccctcccgtctgttcctcttcccaggcaactgtggcctgggagggttcccacatggggcccccgtgttttttgggggcaccacccatataggcagttcccagagggcccatctgtaaagatcgagcttgtgtgtggtgtcgtggtcacatctcccgcttccccccatcctgtgtctgggcacaagttcacatcaaggacaagcgtccattgtgctctcagtctgcctcaggtgtgtgcctggagggggcctggactggcatggatcccagtgtgcagaagagcccagcagggaaaccggaaagcctctgaatgtccaaaggcccagaagccagttgaagaaatggggacccccagaagtagattgcctgacccctgggcactccccacccattcccggggcccacccacagaagaatgcccagcaggatgcccactttgcccagccccgacaacaccggacctttgtaaaaggaaccagccaaccagggcagggagagggcagccgtgtgacccagattgtgtccccgtcatttgggttggcatatgttaactaagctgcccaaacaactttcaaccccgtgtaattccatgtacatttggcaaccagccagccccggtacagccctgtgtgacttcctctgtatgtgtgtgtgtgtcggtgaccagcctaagtagttaggcattaattcaaggtgctgatgttgcagttcacccttcaggggaaattaaaatggggaaaccacgtttcacagcattttaaaagtttttactttttttcttgattatggaagtaattccatgtacatagtaaattcattttaaaagtacaaaaagtatgaagaacgtttgtcttaaaaaaaaaaaaaaattattcctccaactagagaccactctgatgtttcgacgtttttaaaaaagtctttttttgtgcattttttcatcgttgacatcatattgtgatatcatttataaccagttttttcctacttattataccaccatcttccacatcattaaaagctctttgtaaacattaaacactcttcataaatcatgccaatgtctgtttagtaatccatcttgtggatgtactgtaattcatctaatcatttcctcactattggatgtgtagactggttctaggttttcttataaatagtgtcttggattagccaggcatggtaatgggtgcctgtaatcccagctactttttgtattttagtagagatggggtttcaccatattggtcaggctggtctcgaactcctgac

SEQ ID NO: 134643 - DNA, 339 bp, Homo sapiens
cggcgcggtctatggctgcgacttctctaatgtctgctttggctgcccggctgctgcagcccgcgcacagctgctcccttcgccttcgccctttccacctcgcggcagttcggaatcaacagtgagacaattatgaaaccagcttcaatttcagaggaagaattgttgaatttaatcaataaactgaataatgatgataatgtagatggcctccttggtcagttgcctcttccagagcatattgatgagagaaggatctgcaatgctgtttctccagacaaggatgttgatggctttcatgtaattaatgtaggacgaatgtgtttggatcagtattcc

SEQ ID NO: 134644 - DNA, 1182 bp, Homo sapiens
atggctgcgacttccctcatgtccaggttggctgcctggctgctgcagcccgtgcacagctgctccctctgccctcgccccttccacctcacggcagttacagatgaagctgttgtaatttctggaaggaaactggcccagcagatcaagcaggaagtgcggcaggaggtagaagagtgggtggcctcaggcgacaaacggccacacctgagcatgatcctggttggcgagagttctgcaagtcactcctacgtcctcaacaaaaccagggcagctgcagatgtgggaatcaacactgcctcttccagacatattgatgagagaaggatctgcaatgctgtttctccagacaaggatgctgatggctttcatgtaattaatgcagggcgaatgtgtttggaccagtattccatgttaccggctaccccatgcggtgtgtgggaaataattaagcgaactgacattccaaccctagggaagaatgtggttgtggctggaaggtcaaaaagtgttgaaatgcccattgcaatgttactgcacacagatggggtgcatgaacgtcccggaggtgatgccactgttacaatatcttatcgatatacttccaaagagcagttgaagaaacatacaattcttgcagatattgtaatatctgctgcaggtattccaaatctgatcacagcagatatgatcaaggaagaagcagcagtcactgatatgggaataaatagagttcatgatcctgtaactgccaaactgaagttggttggagatgtggattttgaaggagtcagacaaaaagccggttatatcactccagttcctggagttaaattcgaacgcagtcaggcaccgtgtatgaaatctaacaatgcgctcatcgtcatcctcggcaccgtcaccctggatgctgtaggcataggcttggttatgccggtactgccgggcctcttgcgggatatcgtccattccgacagcatcgccagtcactatggcgtgctgctagcgctatatgcgttgatgcaatttctatgcgcacccgttctcggagcactgtccgaccgctttggccgccgcccagtcctgctcgcttcgctacttggagccactatcgactacgcgatcatggcgaccacacccgtcctgtggatctacccactagtcaattcaccatcttgttga

SEQ ID NO: 134645 - DNA, 2274 bp, Homo sapiens
ccggcgcggtctatggctgcgacttctctaatgtctgctttggctgcccggctgctgcagcccgcgcacagctgctcccttcgccttcgccctttccacctcgcggcagttcggggaatctctccctaggtcaggttggagtgcagtgctgcaatcacggcttactgcagccttgacctcctgggctcaagtgatcctcccacctcagcttaaatgaagctgttgtcatttctggaaggaaactggcccagcagatcaagcaggaagtgcggcaggaggtagaagagtgggtggcctcaggcaacaaacggccacacctgagtgtgatcctggttggcgagaatcctgcaagtcactcctatgtcctcaacaaaaccagggcagctgcagttgtgggaatcaacagtgagacaattatgaaaccagcttcaatttcagagggaagaattgttgaatttaatcaataaacttgaataatgatgataatgtagatggcctccttgttcagttgcctcttccagagcatattgatgagagaaggatctgcaatgctgtttctccagacaaggatgttgatggctttcatgtaattaatgtaggacgaatgtgtttggatcagtattccatgttaccggctactccatggggtgtgtgggaaataatcaagcgaactggcattccaaccctagggaagaatgtggttgtggctggaaggtcaaaaaacgttggaatgcccattgcaatgttactgcacacagatggggcgcatgaacgtcccggaggtgatgccactgttacaatatctcatcgatatactcccaaagagcagttgaagaaacatacaattcttgcagatattgtaatatctgctgcaggtattccaaatctgatcacagcagatatgatcaaggaaggagcagcagtcattgatgtgggaataaatagagttcacgatcctgtaactgcggggacccgggttggttggaaatgtggattttgaaggagtcagacaaaaagctgggtatatcacgtccagttcctggaggtgttggccccatgacagtggcaatgctaatgaagaataccattattgctgcaaaaaaaggtgctgaggcttgaagaagcgagaaagtgctgaagtctaaagagcttggggtagccactaattaactactgttgtcttcctgtgtcacaaacagcactccaggccagcttcaagaagcaaagcaggccaatagaaatgcaatatttttaatttattctactgaaatggtttaaaatgatgccttgtatttattgaaagcttaaatgggtgggtgtttctgcacatacctctgcagtacctcaccagggagcattccagtatcatgcagggtcctgtgatctagccaggagcagccattaacctagtgattaatatgggagacattaccatatggaggatggatgcttcactttgtcaagcacctcagttacacattcgccttttctaggattgcatttcccaaagtgctattgcaataacagttgattacttcatttttaggtaccaaaccttttygagttccaacycgatccaaaccaaaggaaaagtgttsgcthagagaaaatttggggaaaaggtkgaaaaagaaaaaatvggtbagtaattgagcagaaaaaaattcaatttcatatatgctactcgattggcaaccagatttcatctcaagtragaactygmattcggytmaggaaaaaagaaaactggcatggttaatcattttcctaagctgtccttttgaggcttagtccagtttattgggaaaatgtttaggattattccttgctattagtactcattttaggtatgttacccttcagtaagttctcccccattttaagtttttcctaggacctgaaaggattccttttcctacattaatccatgtgtgttgtcatatttgggcttttgctataataccttaacttcattggttaaatttttgtattgtatagtttctttggtgtatcttaaaacctatttttgaaaaaccaaacttggcttgataatcatttgggcagcttgggtaagtacgcaacttacttttccaccgaaagaactgtcgagcagctgcctgcttttctgtgatgtatgtatcctgttgacttttccagaaattttttaagagtttgagttactattgaatttaatcagactttctgattaaagggttttctttcttttttaataaaacacgatctgtctggtatggtatgaatttctgaaaaaaa

SEQ ID NO: 134646 - DNA, 2085 bp, Homo sapiens
atggcggccagtgatgtaaactgtggcgcctgctttgcagagctgcaaggcaatgccacggccaatacccctggaggcaccagtcaccacacacacttggccattcatgggagctgccatgactcacaggcaaaggaggcaggccgtaagcggcaaccctggccgcctccggatgggcgctcggagccggctccagattcgcacccgcacctgagcccggaagctctgggatatttccgccgggcgctgtcagcattgaaagaggctcccgagactggggaagaacgagatctgatggtgcacaatataatgaaggaagtagagactcaggccctagctttgtccacgaacaggactggcagtgagatgctgcaggaactgttgggattcagtcccttgaaaccgctttgtcgcgtgtgggctgctctgcgctctaacttgcgcactgtggcctgtcaccgatgcggggtccatgtattacaaagtgctttgctacagctccctcgattgctggggagtgctgcagaggaggaggaggaggaggaggaggatggaaaggatggtcccacggagaccctggaggagctggtcctgggactagccgctgaggtgtgtgatgattttcttgtctactgtggagacacacatggcagcttcgtggtcagaactctgcttcaggtgttaggagggactattctggagtctgagagagccaggccccgtggttcccaatcatctgaagcacagaagaccccagctcaggaatgtaagccagctgattttgaagtccctgaaacctttttgaatcgccttcaggacctgagctcctcctttttgaaggacattgcagtgtttatcactgataagatctccagcttctgtcttcaagtggctttacaggttttacaccgcaaacttgcccagttttgcgctcatatctgcaatgctgtgattggctacctgagtgctcgcggatcctcagtagatggcaagcccctactgctatttctccgagatcaaacgagtttcagactcctggagcaggtcctgctggtgttggagcccccaagactccagagcctctttgaggagcacttgcaggggcagctgcagaccctggctgcacatcccattgccaacttccctttgcagcgcttactggatgcagtcactacccctgagctgctgtcccctgtgtttgaggagctgagccctgtcttggaagctgtattggcccagggccacccaggggtagtcattgccctggtgggggcctgtcgcagagttggggcctaccaagccaaggtcctacagctcttgttggaggcattccactgtgcagagccctcatcccggcaagtggcctgtgtgcctctctttgccactttgatggcttatgaggtgtactatggactgacggaggaggagggggcagtgcctgcagagcaccaggtggcaatggccgcagccagagccttgggggatgtgacagtccttgggtctctactgctccagcatctgctgcacttctccactcctggtcttgtacttcgaagtctgggtgccttgacgggaccacagcttctgtcccttgcccaaagtcccgctggctctcatgtgctcgatgccatcctgaccagcccctctgtgacgcgcaagttgcgccgccgtgtgcttgcagaacctaaaggggacaaatattgtggctctggcctgtaagtccccatgacaaccccgtgtgctaaaatgccatctggagtggagcagccttgagggcccggaaggaaaattgctgctgagcttggggagcagaaccaggagctgataagagccccctttcggccaccatgtggctcgaaatgtggccttgactaccttcctaaagcggcgagaagcttgggaacagcagcagggtgcggtggccaagcggaggcgggcattgaactccatacttgaagactgaggctttggatctgggactgggtgttgatgggggagggcaaaatggggtatccaccccatccctttcctggtttaaattggagtcagaagtcttaagtggtaaatatttgatatttttattgg

SEQ ID NO: 134647 - DNA, 393 bp, Homo sapiens
gtattaacaactcatcttggaattttaagccttttttgtgtaaactttaaatagtacatgaaaagtgacttaattatggcacagcctatttttaagaattctccctttgctatgatgaacaaccacctggtcatatggcagtggcatggaaatggtcctaattttgttgctaaaatagctcttttgttttgttttttggatagaatgtcaaaactggaccaatggggccaggctgaagtattgaactttttgctacgctaccaaccccgcagtgaggaagaactatttgacattctcaatctgttggatagtttcctcaagagcagtagcccaggtgtggtgatgggagctaccaaactttttctgatcttggcaaaaatgtttccccacgcc

SEQ ID NO: 134648 - DNA, 563 bp, Homo sapiens
  misc_feature (1)...(563): n = a,t,c or g
gctgagaaccctagattaaatgaagtaaactaaagattacaccttttctgctggcactaagcgaaaagcaaaaccagtggctgtctattatctcctgtgttttagacagtcaagtgttgagcacttgctcttattcctttattctctaggggaagcaagcacttatttggctacttggtgtccatggggaaagaattcctaatgctccttatgtgttagaggactttgttgagaatgtgaagtcggaaacatttccagctgttaagatggagctgctcactgctttgctgcgccttttcctctcccgacctgctgagtgccaggacatgctaggacgtttgttgtattactgcataggtgggtttttcagaaggaaatagtatttgccatgacccatagtaaaaattcttaatagctttcattgtttggtgagtcacgtctgggacccgagaagaaaatgtgaatgcttcctaggttttcctctctccttcatttttttctcctattatggntggcacaagagtaggaggaaagtggttttgtttttaatgaagtcaatctgt

SEQ ID NO: 134649 - DNA, 2410 bp, Homo sapiens
atgggcgtatgggggatcaggaccccattcatggtggtagggttggagtcaccagtgggatcttctccacgggggcagggctcctgcgtgaggcttccacaacggcgtcccgataaaagtcatgctggggcaagaacagggccagagaccctaagggaaagagcccagcagagcaataagttaccagagtgggcagaaaaaggaagtcaccctgcccgctggagcccaaatcgcggagggcgctggacactcccaaccgcgcgggagcggaggccgagccgggcactcaaagcgcgcgctgcagggaggagacaggccaaagtagccgatttccgattgcccgccgcagctccaccagagggagccgcgcagctgcgcctggagagtgagaggctcccacatcaggacgagaaggagccctcgagttaccgtgggagctgtgggagctgccctgtgactcttaggaagatgccgtaccttggctccgaggacgtggtgaaggagctgaagaaggctctgtgcaatcctcacattcaagctgataggctgcgctaccggaatgtcatccagcgagtgattaggtacatgactcaaggcttggacatgtctggtgtttttatggaaatggtgaaggccagtgccactgtagatattgtccagaagaagttggtttatctgtacatgtgcacatatgctcccctgaaaccagatctggctctcctggccatcaatacgctgtgcaaagactgctcagaccccaatccaatggtgcgagggctggcgttacggagcatgtgtagcctcagaatgtcaaaactggaccaatggggccaggctgaagtattgaactttctgctacgctaccaaccccgcagtgaggaagaactatttgacattctcaatctgttggatagtttcctcaagagcagtagcccaggtgtggtgatgggagctaccaaactttttctgatcttggcaaaaatgtttccccacgtacaaactgatgtccttgtgcgggtcaagggacctttgctagctgcctgttcttcagagagccgtgagctctgttttgttgctctttgtcatgtacgccagatcttgcatagtttaccaggtcactttagcagccactacaaaaagtttttttgctcctactcggagccccactacatcaaactacagaaagtggaggtgctgtgtgaactggtgaacgatgagaatgtgcagcaggtgctagaggagcttcgagggtactgcacggatgtgtctgcggactttgcacaggctgccatctttgccataggtggcattgccaggacttacacagatcaatgtgttcagattttaacagagttgctgggtcttcgacaagagcacattaccacagtggtggtgcagactttccgagacctggtttggttgtgtcctcagtgtactgaagctgtatgtcaggccctgcccggctgtgaagagaacattcaagatagtgaggggaagcaagcacttatttggctacttggtgtccatggggaaagaattcctaatgctccttatgtgttagaggactttgttgagaatgtgaagtcggaaacatttccagctgttaagatggagctgctcactgctttgctgcgccttttcctctcccgacctgctgagtgccaggacatgctaggacgtttgttgtattactgcatagaggaagaaaaagatatggctgtacgggaccgaggtctcttctattatcgcctcctcttagttggcattgatgaagttaagcggattctgtgtagccctaaatctgaccctactcttggacttttggatggatccggcagaaagacctgtgaatagctgggcctcagacttcaacacactggtgccagtgtatggcaaagcccactgggcaactatctctaaatgccagggggcagagcgttgtgacccaaagcttcctaaaacttcatcctttgccgcatcaggacccttgattcctgaagagaacaaggagagggtacaagaactccctgattctggagccctcatgctagtccccaatcgccagcttactgctgattattttgagaaaacttggcttagccttaaagttgctcatcagcaagtgttgccttggcggggagaattccatcctgacaccctccagatggctcttcaagtagtgaacatccagaccatcgcaatgagtagggctgggtctcggccatggaaagcatacctcagtgctcaggatgatactggctgtctgttcttaacagaactgctattggagcctggaaactcagaaatgcagatctctgtgaaacaaaatgaagcaagaacggagacgctgaatagttttatttctgtattagaaactgtgattggaacaattgaagaaataaaatcataa

SEQ ID NO: 134650 - DNA, 2975 bp, Homo sapiens
  misc_feature (1)...(2975): n = a,t,c or g
tttccacacatcagccatctttaattactaacacaattcctaaaattgattaggaaataatccaaatcccatcctcaacgcatctccttaccaacattaacctctacaacatcatcactgaaaaatggggtcaattgccaataggaatgaaaggaatgaatcaatgttctttggccaaaaacttaagaatcctgatttctagattttccactctcctttgtatctgatattatctggacttactggcagctctaataggaaagactaagaaagtgtaatagttattcatcttactctagacaagcaacaagactctgttatgattttatttcttcaattgttccaatcacagtttctaatacagaaataaaactattcagcgtctccgttcttgctgcattttgtttcacagagatctgcatttctgagtttccaggctccaatagcagttctgttaagaacagacagccagtatcatcctgagcactgaggtatgctttccatgggccgaggacccagccctactcattgcgatggtctggatgttcactacttgaagagccatctggagggtgtcaaggatgggaattctccccgccaaggcaacacttgctgatgaggcaactttaagggctaagccaagttttctcaaaataatcaggcagtaaagctgggcgattgggggactaggcatgaggggctccaggaatcaggggagttcttgtaccctctccttgttctcttcaggaaatccaagggtcctgatgcggcaaaggatgaagttttaggaagctctgggtcacaacgctctgccccctggcatttagagatagttgcccagtgggctttgccatacactgggcaccagtgtggttgaagtctgaggcccagctattcacaggtctttctgccggatcctcccaaaagtcccaagagtagggttcagatttagggcctacaacaaaaatccgcttaaacttcatcaaatgcccaactaagaggaggcggataatagaagagacctcggtcccgtaacagcccatatctttttcttcctctatgcagtaatacaacaaacgtcctagcatgtcctggcactcagcaggtcgggagaggaaaaggcgcagcgaagcagtgagcagctccatcttaacagctggaaatgtttccgacttcacattctcaacaaagtcctctaacacataaggagcattaggaattctttccccatggaccaccaagtagccaaataagtgcttgcttcccctcactatcttgaatgttctcttcacagccgggcagggcctgacatacagcttcagtacactgaggacacaaccaaaccaggtctcggaaagtctgcaccaccactgtggtaatgtgctcttgtcgaagacccagcaactctgttaaaatctgaacacattgatctgtgtaagtcctggcaatgccacctatggcaaagatggcagcctgtgcaaagtccgcagacacatccgtgcagtaccctcgaagctcctctagcacctgctgcacattctcatcgttcaccagttcacacagcacctccactttctgtagtttgatgtagtggggctccgagtaggagcaaaaaaactttttgtagtggctgctaaagtgacctggtaaactatgcaagatctggcgtacatgacaaagagcaacaaaacagagctcacggctctctgaagaacaggcagctagcaaaggtcccttgacccgcacaaggacatcagtttgtacgtggggaaacatttttgccaagatcagaaaaagtttggtagctcccatcaccacacctgggctactgctcttgaggaaactatccaacagattgagaatgtcaaatagttcttcctcactgcggggttggtagcgtagcagaaagttcaatacttcagcctggccccattggtccagttttgacattcgatttaagagatggtgagcaatgggcttattgatgacaacgcctccttcctgtttcagaatttcctctagagacctcaagcagttcacaactacaattggatcctggtcacgcagcaaactgtataattcatttaccagggcaccatctacttcagagtctccatgaagattatgcatcttggcacatccaaggactaccactctcctgacatatgaagccttatcccgcagaccattgagaataggctgttgtatatactcctgcacaccaggcatcctgaggctacacatgctccgtaacgccagccctcgcaccattggattggggtctgagcagtctttgcacagcgtattgatggccaggagagccagatctggtttcaggggagcatatgtgcacatgtacagataaaccaacttcttctggacaaatatctacagtgggcactggccttcaccatttccataaaaacaccagacatgtccaagccttgagtcatgtaccttaatcactcgctggatgacattccggtagcgcagcctatcagcttgaatgtgaggattgcacagagccttcttcagctccttcaccacgtcctcggagccaaggtacggcatcttcctaagagtcacagggcagctcccacagctcccacggtaactcgagggctccttctcgtcctgatgtgggagccatcggccggcaggccgttcgccccgcccacagatcgctcccgctacttctaggtcctccgccggatttccagcgccgcgtccgactgaccgcagacccctccctctccagttccagccttaattccccctccacgccgttctcatcgcggataggcccaatcttgctttctgcggaagtcccgcccccttgtcaagagaccaaacagaagagcgctgccggtctccccgcgagcgagcgctaagcgtagtcccgactccgaccttaggatgcccttcacgaaatcgtcgacccgggacattncnnacggtcctgcagtgggaggcat

SEQ ID NO: 134651 - DNA, 425 bp, Homo sapiens
ttttttttttgaggaatgtttcacacttggaactgaagtcattttcttttattctagtgactttttgaatgagtatgaaaaaggaaggactcccaatcctgacatagtttgcaacaagcacatcaaatttagttgcttttttcattatgctgtggataatcttggtaagtaatttgggtttaaaacatttttttttttaaagacagggtctcgctctgtcacccaggctggattgcagtggtgcgatcatgactcactgcagcctcgacctcctgggctcaagagattctcccaccccaggctcctgagtagcttggaccacaggcatgccaccatggtcgtgaattttttgtggagatggtgtcacaactgtattgtccaggctggtctcagatttctggcctcaagcagtcctcctgcctcgg

SEQ ID NO: 134652 - DNA, 1391 bp, Homo sapiens
gacttccggcaaggcgcggaagcggcggtagctgcagctggcgaagttgggcgactggcggatgcaggccttgcggcacgtccactgccgttttaccgaaggttgatttatgtattctctttaattgaccttcccgcccgcaggttaccaggtgacaggggtgtttatgaagaactgggactcactgggatgaacatggggttctgtactgccgacaaaagactgtgaaagatgctttacagagtttgccagatcttaggacatcccttttccatcaagtgtcctatggaactgaagtcattttcttttattctagtgactttttgaatgagtatgaaaaaggaaggactcccaatcctgacatagtttgcaacaagcacatcaaatttagttcctgatccttgtgttctaaaaacctcacaggggcagatgccattgccacaggtcactatgcaagaacttccctggaagatgaagaagtctttgagcagaagcacgttaagaagcccgaagggccagcctcatggagaaactgtctttctgtaggttggttcctgtataccttgggccagagagcaaacataggtggcctgagagagccctggtacgtggtggaggcgtccccaccttcacattccattctgcaggccccccggacagaccacccagccctgtacagggacctgctgaggaccagccgcgtgcactggattgcggaggagcctcccgcagcactggtccgggacaagatgatggagtgcccccctccaagggcccctctcttctacccagtgccctgtgtgctgaccctcaatcaagatggcaccgtgtgggtgacagctgtgacccctgatgccagggtctctcccctacagtttgctgtgttctacaagggggacgagtgcctgggcagcgggaagatcctgcggctggggccgtctgcctacacgctccagaagggccagcgcagagctgggatggccactgagagccccagtgacagcccagaagatggtcccaggcctgagtcccttgctctgacagagatggatctgctagaaggaaccctggagagcaggacccatggctgggcggctggtgagcagtcccagggtcccaagggccagcttgctgctgcccaaagcagaggaagccgggctggctgagggtccgaaaagcctgcagggggccgggcgacccccaggaaaagcctcagctccaggctggggctttggctgctggagcatttgctggctggtggggtggcccgagttccccttcaccgcccccagggagggtttcccacctcagagtacaccgaggggacctgcaaagggggctgtcgggacagcgtggaataaacattatttcaaggaaaaaaaaaaaaaaaa

SEQ ID NO: 134653 - DNA, 511 bp, Homo sapiens; identical to SEQ ID NO: 125908
  misc_feature (1)...(511): n = a,t,c or g

SEQ ID NO: 134654 - DNA, 509 bp, Homo sapiens
  misc_feature (1)...(509): n = a,t,c or g
ccgcctgcactccctgttaggagattactaccaggccatcaaggtgctggagaacatcgatctgagcacgaagagtatgtattcccgtgtgccagagtgccatggtcaccacatactattatgttgggtttgcatattcgatgatgcgttgttaccaggatgccattcgggtcttcgccagcatcctcctctacatccataggaccaatagcatgttccagaggaccaagtacaagtatgagatgattatcatgctgaatgagcagatgcatgcgctgctggccattgccctcacgatgtaccctatgcgtatcagatgagagcatctacctgcatctgcgggagaaatatgttgacaagatgttgcgcatgcagaatggtgacctccaagtctatgaagaacttttcaggtactcctgcaccaagttcctgtagnctgtaccgcccaactatgatactgtgcacgcgcactaccacactgagtcgttcctgcagagtttgaggcgtct

SEQ ID NO: 134655 - DNA, 2288 bp, Homo sapiens
tttttttttttttctggctccaaagatcctttactgagatccactttgaaacactttcggtccttaacttgttaactgagttgacaaggctgatggctgatctaggtaaaggtttcacggttagcaaaaacacttcctgcctataatacattcaaaaccaggttcccggaatgtgtggtgaatatcatccaaggtctctgtccccattcttcttcaggggttcggattaagctcctccaaatttgtggaatctgacggatgaagaaatccccataacgcctggcgaccttggtgtccgcgatgtggaatcatgtccttatcaaatgtagaagtcaacctctgaggctgactgaaattcaacccatccagggcttgagatacccgctgggtccacacggaggttcttcatcttgttgtttgaagacaagaagctgggatcccggaacccctgctctgtgaggtcccaggaagccaagccaggcttggccaacagggcatgggtggtgtagaagcttcaggaagctgcggatggttgaaagctgggcctgctggctgtacttcatcagaaaacacctttcagctgcttgcaggaagggcttctttgtggtaagttggggtgcacattatcatagttgggcactacaggcgaacaggaacttggggcaggagtaactgaaaagttcttcatagacttgtgggtcacctttcatgcatgcgcaacatcttgtcccccatatttctcccgcagctggaggtgaatgctctcatcgatacgcatggggtacatcgtgagggcaatggccagcagcgcatgcatctgctcattctgcttgttaatcatctcatacttgtacgtggtcctctggaacatgctcttggtcctctggatgtagaggaggatgttggcgaagacccggatggcatcctgggtaacgacgcatcatcaaatatgcaaacccaacataatagtatgtgggtgacctgggcactctgggcacacgggaatacatactcttcttgttcagttcgatgttctccagcaccttgatggcctggtagtaatctccctaacagggagtgcaggcggagaagcccgaccaggctgaagtaaccaagcattttgtagagggagtgccggcccatactcccccagccacactctcagggtcacctccgcttgtgtatacctccaactgtcggttgatgttggatttgtctgccagggaatgaaggacattgaggacactatgaacattccagattttgggattggaacgaagaaagtcaatctcctcctctgacttcttggcagtcttacaagcggtactgactgaatgacttgaaactggtagatgaactcatcgataatacccaaaacccactggttgggtagttcaaaggggagcgggacccatcggcattaagaatgtagttgaaaagattgcagtagttgtaataggattcaaacctctgctcccaaggaaggtcccccactgactttggcatatatgtgcctgtaagtataattctttggtataaaatcaggaagacagcatcattgccaaaccttgtggagcaatggcttccagcctccgggccaaggtgtattcttgaagaatctttcagtcaagcttggtccagctgttctcatagatgtcctggatctcatacaccttctggtcaatgacatcacttggagacacgacttggcctgtagctcatccacttttctggtcaatcaaatctgagacagttttgtggaaatactggatgaagtttttgatcacctcagggatcacctgataggtttggttgttcatactgacggttcataagcaaggtccttgctttggatctcctgtgtgcatgtcttatcccgctgatgattatgagtctgaggcggcttatgacccctacgcttatcccagcgactatgatatgcacacaggagatccaaagcaggaccttgcttatgaacgtcagtatgaacagcaaacctatcaggtgatccctgaggtgatcaaaaacttcatccagtatttccacaaaactgtctcagatttgattgaccagaaagtgtatgagctacaggccagtcgtgtctccagtgatgtcattgaccagaaggtgtatgagatccaggacatctatgagaacagatgctgtcttcctgattttatacaaagaattatactacaggcacatatatgccaaagtcagttttcagtcattcagtcagtaccgctgtaagactgccaagaagtcagaggaggagattgactttcttc

SEQ ID NO: 134656 - DNA, 446 bp, Homo sapiens
  misc_feature (1)...(446): n = a,t,c or g
cgcagcttcctgaagctctacaccaccatgcctgtggccaagctggctggcttcctggacctcacagagcaggagttccggatccagcttcttgtcttcaaacacaagatgaagaacctcgtgtggaccagcggtatctcagccctggatggtgaatttcagtcagcctcagaggttgacttttacattgataaggacatgatccccaaatttgaggagcttaatcgaaccctgaagaagatgggacagagaccttgatgatattcacacacattcaggaacctgttttgatgtattataggcaggaagtgtttttgctaccgtgaaacctttacctagatcagccatcagcctgtcaactcagttaacaagttaaggaccgaagtgtttcaagtggatctcagtaaaggatctttggagccagnnnnnnnnnnnnnnnnnnnnnn

SEQ ID NO: 134657 - DNA, 411 bp, Homo sapiens
  misc_feature (1)...(411): n = a,t,c or g
ccctcctaaaaaangcttgggttacttnaaccctnggtcgggcttctccggcctgnactccctgttaggagattactacccaggccatcaaggtgctggagaacatcgaactgaacaagaagagtatgtattcccgtgtgccagagtgcccaggtcacccacatactattatgttgggtttgcatatttgatgatgcgtcgttacccaggatgccatccgggtcttcgccaacatcctcctctacatccagaggaccaagagcatgttccagaggaccacgtacaagtatgagatgattaacaagcagaaaggtgacccacaagtctatgaagaacttttcagttactcctgccccaagttcctgtcgcctgtagtgcccaactatgataatgtgcaccccaactaccacg

SEQ ID NO: 134658 - DNA, 415 bp, Homo sapiens
  misc_feature (1)...(415): n = a,t,c or g
gaccctgagagtgtggctggggagtatgggcggcactccctctacaaaatgcttggttacttcagcctggtcgggcttctccgcctgcactccctgttaggagattactaccaggccatcaaggtgctggagaacatcgaactgaacaagaagagtatgtattcccgtgtgccagagtgccaggtcaccacatactattatgttgggtttgcatatttgatgatattcacacacattcaggaacctgttttgatgtattataggcaggaagtgtttttgctaccgtgaaacctttacctagatcagccatcagcctgtcaactcagttaacaagttaaggaccgaagtgtttcaagtggatctcagtaaaggatctttggagccagnnnnnnnnnnnnnnnnnnnnnnnnnnnnn

SEQ ID NO: 134659 - DNA, 446 bp, Homo sapiens
accggcccgtagatccccgttcgacccacgcgtccggctgatgattatgagtctgaggcggcttatgacccctacgcttatcccagcgactatgatatgcacacaggagatccaaagcaggaccttgcttatgaacgtcagtatgaacagcaaacctatcaggtgatccctgaggtgatcaaaaacttcatccagtatttccacaaaactgtctcagatttgattgaccagaaagtgtatgagctacaggccagtcgtgtctccagtgatgtcattgaccagaaggtgtatgagatccaggacatctatgagaacagatgctgtcttcctgattttatacaaagaattatactacaggcacatatatgccaaagtcagttttcagtcattcagtcagtaccgctgtaagactgccaagaagtcagaggaggagattgactttcttc

SEQ ID NO: 134660 - DNA, 679 bp, Homo sapiens
cggggtgatctctgggaccactggatgtgggtctggctgagtactcgtagggatcagttcctttggaatgtcttagaaccaggtgatcaaaaacttcatccagtatttccacaaaactgtctcagatttgattgaccagaaagtgtatgagctacaggccagtcgtgtctccagtgatgtcattgaccagaaggtgtatgagatccaggacatctatgagaacaggtatgggctactggctgaaagggcctctttctgggtgggactggcctggtaatatagttcctacaaataggttggcaatggtaggtgtgagctctttatatcttgtgcactgagtggaatccagtggctgagtcattatagtgagtctgagatttggccaagagggtgtgtgtggttatgatgaggttcagcattggcctccagcttttaccaggtatctggtcagcttcagcctaatttgaaataactggtccatgccaggaatagctgttactattgtttttccaatcccaaaatctggaatgttcatagtgtcctcaatgtccttcattccctggtagacaaatccaacatcaaccgacagttggaggtatacacaagcggaggtgagtgcagcaggccgacagccgtggcctgcgaatttccagctgcttgccatctgttccaaatgaat

SEQ ID NO: 134661 - DNA, 2096 bp, Homo sapiens
tccctggtcgacccacgcgtccgcccacgcgtccgggtgctcgcaagcgaggcagccatgtcttatcccgctgactgattatgagtctgaggcggcttatgacccctacgcgtgatcccagcgactatgatatgcacacaggagatccaaagcaaggaccttgcttatgaaccgtcagtatgaacaaccaaacctatcaggtgatcccctgaggtgatcaaaaacttcatccagtatttccacaaaactgtctcagatttgattgaccagaaaagtggatgagctacaggccagtccgtgtctccaagtgattgtcattgaccaagaaaggttgtatgaagattccaggaccatctattgagaacaagcttggaccaagcttgactgaaagattctttcaagaatacaccttggcccggaggctggaagccattggttccacaaggtttggcaatggatgctggtccttcctggatttttatccaaagaattatacttacaggcacatatatgccaaagtcagtgggggaccttccttgggagcagaggtttgaatcctattacaactactgcaatcttttcaactacattcttaatgccgatgggtcccgctcccctttgaactaccccaaccagtgggctctggggatatttatcgatggagttcatctacccagttttcagtcatttcaagtcagtaccgctggtaagacctgcccaagaagtcagaggaggagatttgactttcttcgttccaatcccaaaatctgggaatgttcatagtgtcctcaatgtcctttcattccctggtagacaaatccaacatcaaccgacagttgggagggtatacacaagcgggaggtgacccctgagagtgtggctgggggagtatgggccggcactccctctacatgatgtttgcattacttcagcctagtccgagcttctcccgcctgcactccctgttagggagattactaccaggccatcaaggtgctggagaacatcgaactgaacaagaagagtatgtattcccgtgtgcccagagtgcccaggtcacccacatactattaatgttgggtttgcatatttaatgatgcgtcgttacccaggatgccatccgggtcttcgccaacatcctcctctacatccagaggaccaagagcatgtttccagaggacccacgtacaagtatgagatgatttaacaagcagattgagcagatgcatgcgcttgctggccattgccctcacggatgtaccccatgcggtattgatgagagcattcacctccagctgcgggagaaatatgggggacaaagatgttgcgcatgcagaaaaggtgacccacaagtctatgaataacttttcaggttactcctgcccccaggttcctggcggctggtagtgcccacctatgataatgtgcaccccaacttaccacaaagagccccttcctgcaagcagctgaaaggtgtttttcttgatgaagtacaggcagcagggcccagctttcaaaccaatccgcagcttcctgaagcttctacaccacccatgccctgttggccaagcctggcttggcttccctggaccctcacagaggcagggagttccgggatcccaggtttctttgtctttcaaaccaccaaggatgaaggaacctcgtgttgggaccagccggtatctcaagcccttggattggtgaaatttcagtcagccctcagagggttgaccttcctacattgaataaggacatgatcccacatcgcgggacacccaaggtcccccaggcggtaatgggggatttccttcatcccgtcagatcccacaaatttggaggagcttaatccgaacccctgaaggaaggatggggacagagaccttggatgatattcaccacacatttcagggaacctgtttttgatgtaattatagggcagggaagtgttttttgctaaccgtgaaaccttttacctagatcagccatcagccttttccaactcagttaacaagtttaagggaccgaaagtgtttcaagtgggatcttcagttaaaggatctttggagccagaaaaaaaaaaccaaaaaaagtcgacg

SEQ ID NO: 134662 - DNA, 413 bp, Homo sapiens
gaattccgcacgagctcccccagggcctcctcccttaggggcaatcatgccacctcctggtgctccaatgggcctagcactgaagaagaaaagcattcctcagcccacaaatgccctgaaatccttcaactggtctaaactgcccgagaacaaactggaaggaacagtatggaccgaaattgatgatacaaaagtcttcaaaattctagatcttgaagacctggaaagaaccttctctgcctatcaaagacagcagaaagaagcagatgccattgatgacactctgagttccaaacttaaagttaaagagctttcggtgattgatggtcggagagctcagaattgcaacatccttctatcgaggttgaaattatccaatgacgaaatcaaacgggcaattctaacaatggacg

SEQ ID NO: 134663 - DNA, 621 bp, Homo sapiens
gagaaatcacatagatcaagtacttagattgttggtaaattgctatttgcaaatatgcgtgtgcacatgggcatggctttggcatggtgggaggaagggcaggggcactagagtataacaaaatgttttagaacaagttttgatgtgtttgccattctgatttattaaatttaaggcatgtgaaatatgagacgaggtgtgtctcatgtctgtatttgaagcctgcattgacattattcatttcctgtgtttaaggagctggaatatcagaagtctcagcccccacagcccggagataagtttgtgtctgttgtcagccagttcatcacagtagccagcttcagcttctctgatgttgaagaccttctagcagaagctaaagacctgtttactaaagcagtgaagcactttggggaagaggctggcaaaatacaaccagatgagttctttggcatttttgatcaatttcttcaagctgtgtcagaagccaaacaagaaaacgaaaatatgagaaagaaaaaggaggaagaagaacgtcgagctcgcatggaagctcagctcaaagaacaacgtgaaagggaacgtaaaatgagaaaagctaaagagaatagtgaagaaagc

SEQ ID NO: 134664 - DNA, 3592 bp, Homo sapiens
atggccccaagaaagagaggtggacgaggtatttcattcatcttttgctgtttccgaaataatgatcacccagaaatcacgtatcggctgcgaaatgatagcaactttgcgcttcagaccatggaaccagcattgcccatgccccctgtggaggagctggatgtcatgttcagtgaactggtggatgaactggacctcacagacaaacacagagaagccatgtttgcacttccagctgagaaaaaatggcaaatatactgtagcaagaaaaaggaccaggaagaaaacaagggagctacaagttggcctgaattctacattgatcagctcaattccatggctgctggcattcttgaaggagtgtttgtccacattgtcatcacccattgtctgcagaatcagcagcaactactacatgacaagcagggtaacaggcacttcatatgttgtttgcggtcccaccagcatcctatgctacccgcgtgttccaatgtacaccttagcagctttgacagaaagaccctctgcaaggatgcgctttgtcctttgcctgcttctcatgtgagcaggtatttaagaaaatctctgctggctttagagaaggaagaagaagaagaaagaagtaaaactatagagagtttaaagacagcactgaggacaaaaccaatgaggtttgtaaccagattcatcgacttggatggcctatcatgtatcctcaactttctaaagaccatggactacgagacctcagagtctcgaatacatacttctctcattggctgtataaaggcgttaatgaacaactctcaaggccgggctcacgtcctggctcattctgagagtattaatgtaattgctcagagtctgagcacagagaacattaaaacgaaggtggccgtgctggaaatcttgggcgccgtgtgcctggttcccgggggccacaagaaggttctgcaggccatgctgcactaccagaagtatgccagcgaaaggacccgctttcagacattaattaacgacttggataaaagcactgggcggtatcgagatgaagtgagtctcaagactgccatcatgtccttcattaatgcagtgctcagccaaggtgcaggagtggagagtttggactttagacttcatcttcgctatgaaatttctgatgttaggaattcaccctgtaatggataaattaaggaaacacgaaaattcaacattagataggcatttagacttttttgaaatgctccgaaatgaagatgaactagaatttgccaaaagatttgaactggttcacatagacacaaaaagtgcaactcagatgtttgagctgaccaggaagaggctgacacatagtgaagcttacccgcatttcatgtccatcctgcaccactgcctccaaatgccttacaagaggagtggcaacactgttcagtactggctactactagatagaattatacagcagatagttatccagaatgacaaaggacaggaccctgactccacacctttggaaaactttaatattaagaatgtcgtacgaatgttggttaatgaaaatgaagttaagcagtggaaagaacaagcggaaaaaatgagaaaagagcacaatgagctacaacagaaactggaaaagaaagaacgagaatgtgatgctaagactcaagagaaggaagagatgatgcagaccttaaataaaatgaaagagaaacttgaaaaggagactactgagcataagcaagtcaagcagcaggtggcggacctcacagcacagctccatgagctcagcaggagggccgtctgtgcttcaatcccaggtggaccctcgcctggagcaccaggagggccctttccttcctctgtgcctggatctctccttcctcccccaccacccccacctctaccaggtggccctcctcctcccccagggcctcctcccttaggggcaatcatgccacctcctggtgctccaatgggcctagcactgaagaagaaaagcattcctcagcccacaaatgccctgaaatccttcaactggtctaaactgcccgagaacaaactggaaggaacagtatggaccgaaattgatgatacaaaagtcttcaaaattctagatcttgaagacctggaaagaaccttctctgcctatcaaagacagcagagtcatgacaccctgttcaaactctctggacttcagccagttgtttggctagatacaattctcagagaggcaaaggaacattacaaaggtaatggcatgaataccattacctgtatgcatgcaacaggaaccctgcacagaaaagaagcagatgccattgatgacactctgagttccaaacttaaagttaaagagctttcggtgattgatggtcggagagctcagaattgcaacatccttctatcgagagctcagcagctgcaagcagcaagagaggaggggatgaaagcagccaccaggcacatcctaaatcggagtaaggaaatgctggcatcaacacttgtctgggaagagtgttgtatagaggaaacggaactcttgaaatttgttcctgaaaaaagtgacattgacctattggaggaacataaacacgaactggatcggatggccaaggctgataggttcctttttgagatgagccgaattaatcactatcagcaaaggttgcaatcgctgtacttcaaaaagaagtttgcagagcgtgtggcagaagtgaaacctaaagtggaagcaattcgttctggctcagaagaggtgtttaggagtggtgccctcaagcagttgctggaggtggttttggcatttggaaattatatgaataaaggtcaaagagggaatgcatatggattcaagatatctagcctaaacaaaattgctgacacaaaatccagcatcgacaaaaacattacccttttgcactatctcatcactattgtggaaaataagtaccccagtgttctcaatctaaatgaagaattgcgagatattcctcaagctgcgaaagtaaagtgttgcaataatcggagcagccacttccctcagcctggccgcatccagataagcagagtgattacggaggagctggaatatcagaagtctcagcccccacagcccggagataagtttgtgtctgttgtcagccagttcatcacagtagccagcttcagcttctctgatgttgaagaccttctagcagaagctaaagacctgtttactaaagcagtgaagcactttggggaagaggctggcaaaatacaaccagatgagttctttggcatttttgatcaatttcttcaagctgtgtcagaagccaaacaagaaaacgaaaatatgagaaagaaaaaggaggaagaagaacgtcgagctcgcatggaagctcagctcaaagaacaacgtgaaagggaacgtaaaatgagaaaagctaaagagaatagtgaagaaagcggagagtttgatgaccttgtttcagctttacgctcaggagaagtgtttgacaaagacctttctaaattgaaacggaatcgcaaacgtattaccaaccagatgactgacagcagcagagagagaccaatcacaaaacttaatttctaa

SEQ ID NO: 134665 - DNA, 4676 bp, Homo sapiens
  misc_feature (1)...(4676): n = a,t,c or g
gaatcctggtcgacgattcccgcctttccagcatgcaggggctgctcatgtaagggggacgttcctccttgcccgccgcactgattcattaaggggcactgctcagtggcgcgggggtgggcgtgcttccgtgggctgggcgctgggttcgcggcgcgccctcctgctgcctccccggagctcccgggccagtagcgtttagtcacatcaagaaatagaacagaattcagccatggccccaagaaagagaggtggacagaggtattgcattcatcttttgctgcctccgaaataatgatcacccagaaatcacgtatcggctgcgaaatgatagcaactttgcgcttcagaccatggaaccagcattgcccatgccccctgtggaggagctggatgtcatgttcagtgaactggtggatgaactgggacctcccagacaaacacagagaagccatgtttgcacttccagctgagaaaaaatggcaaatatactgtagcaagaaaaaggaccaggaagaaaacaagggagctacaagttggcctgaattctacattgatcagctcaattccatggctgctagaaaatctctgctggctttagagaaggaagaagaagaagaaagaagtaaaactatagagagtttaaagacagcactgaggacaaaaccaatgaggtttgtaaccagattcatcgacttggatggcctatcatgtatcctcaactttctaaagaccatggactacgagacctcagagtctcgaatacatacttctctcattggctgtataaaggcgttaatgaacaactctcaaggccgggctcacgtcctggctcattctgagagtattaatgtaattgctcagagtctgagcacagagaacattaaaacgaaggtggccgtgctggaaatcttgggcgccgtgtgcctggttcccgggggccacaagaaggttctgcaggccatgctgcactaccagaagtatgccagcgaaaggacccgctttcagacattaattaacgacttggataaaagcactgggcggtatcgagatgaagtgagtctcaagactgccatcatgtccttcattaatgcagtgctcagccaaggtgcaggagtggagagtttggactttagacttcatcttcgctatgaatttctgatgttaggaattcaacctgtaatagataaattaagggaacacgaaaattcaacattagataggcatttagacttttttgaaatgctccgaaatgaagatgaactagaatttgccaaaagatttgaactggttcacatagacacaaaaagtgcaactcagatgtttgagctgaccaggaagaggctgacacatagtgaagcttacccgcatttcatgtccatcctgcaccactgcctccaaatgccttacaagaggagtggcaacactgttcagtactggctactactagatagaattatacagcagatagttatccagaatgacaaaggacaggaccctgactccacacctttggaaaactttaatattaagaatgtcgtacgaatgttggttaatgaaaatgaagttaagcagtggaaagaacaagcggaaaaaatgagaaaagagcacaatgagctacaacagaaactggaaaagaaagaacgagaatgtgatgctaagactcaagagaaggaagagatgatgcagaccttaaataaaatgaaagagaaacttgaaaaggagactactgagcataagcaagtcaagcagcaggtggcggacctcacagcacagctccatgagctcagcaggagggccgtctgtgcttcaatcccaggtggaccctcgcctggagcaccaggagggccctttccttcctctgtgcctggatctctccttcctcccccaccacccccacctctaccaggtgggatgcttccccctccaccgcctcccctccctccaggtggccctcctcctcccccagggcctcctcccttaggggcaatcatgccacctcctggtgctccaatgggcctagcactgaagaagaaaagcattcctcagcccacaaatgccctgaaatccttcaactggtctaaactgcccgagaacaaactggaaggaacagtatggaccgaaattgatgatacaaaagtcttcaaaattctagatcttgaagacctggaaagaaccttctctgcctatcaaagacagcaggatttctttgtgaacagtaactccaagcagaaagaagcagatgccattgatgacactctgagttccaaacttaaagttaaagagctttcggtgattgatggtcggagagctcagaattgcaacatccttctatcgaggttgaaattatccaatgacgaaatcaaacgggcaattctaacaatggacgaacaggaagatctgcccaaggacatgttggaacagctcttgaaatttgttcctgaaaaaaagtgacattgacctattggaggaacataaacacgaactggatcggatggccaaggcttgataggttccttttttgagatgagccgaattaatcactatcagcaaaggttgcaatcgctgtacttcaaaaagaagtttgcagagcgtgtggcagaagtgaaacctaaagtggaagcaattcgttctggctcagaagaggtgtttaggagtggtgccctcaagcagttgctggaggtggttttggcatttggaaattatatgaataaaggtcaaagagggaatgcatatggattcaagatatctagcctaaacaaaattgctgacacaaaatccagcatcgacaaaaacattacccttttgcactatctcatcactattgtggaaaataagtaccccagtgttctcaatctaaatgaagaattgcgagatattcctcaagctgcgaaagtaaacatgactgagctggacaaagaaataagtaccttgagaagtggcttgaaagcagtagagacagagctggaatatcagaagtctcagcccccacagcccggagataagtttgtgtctgttgtcagccagttcatcacagtagccagcttcagcttctctgatgttgaagaccttctagcagaagctaaagacctgtttactaaagcagtgaagcactttggggaagaggctggcaaaatacaaccagatgagttctttggcatttttgatcaatttcttcaagctgtgtcagaagccagagcaagaaaacgaaaatatgagaaagaaaaaggaggaagaagaacgtcgagctcgcatggaagctcagctcaaagaacaacgtgaaagggaacgtaaaatgagaaaagctaaagagaatagtgaagaaagcggagagtttgatgaccttgtttcagctttacgctcaggagaagtgtttgacaaaagacctttcttaaattgaaacggaatcgcaaacgtatttaccaacccagattgacttgacagcagcagagagagaccaatcacaaaacttaatttctaattttccatgaatacttttttttagaaagctcattagcagccctctaaagtgactagaacgtttcattacactgccttgcaatccaaacagtggcaattttttccttcatctgtgagtgaatgtgtgaacgtgtgtatgtaaatgtatgtgtgtatatattaaaaaatgtatatagatgtctgagtgttgtctggagacctatacgtatggttaaaaagatttatgttaatgtatgtgctccaaaacctttcgtgtatgcattcacattgagtgtggctcattttctttccccgaacgccatgactgttcagaagcacaatactatctcctgaaagagataagagacattccctagattcaaaggcaaaacagaagaaacaaacaaacaaacaaacaaagcttgcaaaatattttatggtttccaagcttgatatcctttaaaattattttcattgatggaactggagttgttggaaaaacatagatttaaaatgatttttgatagctgacattgtgatgttgatgtatcacatcagtaaataggaccagctttgaatttctgacattggtgtggggatacagtctgtaaatgtttattgagaaccatcttgcacacaatttgaattatgtagaatgtcaatcaagtttttgbtatatttaaaagttggacatcaattttttcccctgatttcatccaagttatctctgccaagtgctcttgataatttcttcagatttttggaaaaaaacactatataaavtgcaatccatgctttttttaaagaacaacattgccagagtatgcttgttctaacaatatagatatataaaccttaaaaataataaaatatctcacccaagacttaaaggaagaattctctgaagggataaagcattactaaaaaaaaaaaaaaaaaaaaaaaaanttaagggggggccctttttggaaaagtttctattttcggttttgaaggaaaagctggattttttggaaaaatagggctggactaagggatccttaaaaaaggcccaaaatggcaacattagcaaaaatgcccaaatttatttatctttaagtatatttgaagggattgctggtaaaatgggggcattttaaaattgggggtcacgaaagctacctggaaaatttcagtccaaaaaaataaagctttcagggagacttgaaaaaaataaa

SEQ ID NO: 134666 - DNA, 419 bp, Homo sapiens
ccaggtggagcattacgagttccagacgcgccagctggagctgaaggccaagaactatgccgatcagatttcccggttggaggagcgggagtcggagatgaagaaggagtacaatgccctgcaccagcggcacacagagatgatacagacctacgtggagcacattgagaggtccaagatgcagcaggtcggaggaaacagccagaccgagagcagcctgccggggcggaggaaggagcgccccacctccctgaacgtgttccccctggctgacggcacggtacgtgcacagatcgggggcaagctcgtgcctgcgggggaccactggcacctgagtgacctcggccagctgcagtccagctccagctaccagtgtccacaggatgaaatgtccgagtcaggccagtcctcgcctgtgt

SEQ ID NO: 134667 - DNA, 6429 bp, Homo sapiens
tcaaagaacctgtctacacaatgtgtcacaggcacctggtgtctcaccgactctgccaccacccggcagagagaaaacagggaaccccatgtggccaggcagggtgtagctgtgcacatcagacaaacgcttctgggccaccttcctccacgctgggtccccggcctgctcctgaccctcatggtggctgcggggaattctgcagtctgattgcgcctcccctagctctccgtcaccctacagggccaccacttacccatgggacactccccctggccacaacttacctaaaggcaaacctctcaacctcctaaacatcaacgtgtagcagtgacctccaaatgcactgaaagaacccaaactcttagcggtcattcctcaccatgagtagccacaactgtttggttaaaacactgaaaatacagtacataaaaacaaaaacaaaacaaaacaaaaaacaacaaaaaaattaagaaattagaaaaacttcagaacctagagcataaaataaaaagaacttaaatgtaataatttaaaataaagaaaaatcagataaaacactcctatgagcgaaaacataaaacgctacaatttatgaagagagcgacgatgtcagacaacgcaggaggtgaaaggaaagacatcatgagaagaagagcgggcccagagcaagcgcgagaggcagcccggaggccagagagcgtcaagcaagggctccccccggctgaggctgacgtgtcttcagatgcctatgggcaggaaggtggctgtccttacctggcactgaggccagtgagctcacaggccaaaactggcagcaagcgacctggggccctgaaggagtggcctggctctgggcccctgtgctctgaggtgcactcaccggctggctgtgagaacctgctggggcccccgcactctggcttgaacggggaacaccagcaacagggaggagcctctcactccacggcacggctacaaaacctggtagctggagctggactgcagctggccgaggtcactcaggtgccagtggtcccccgcaggcacgagcttgcccccgatctgtgcacgtaccgtgccgtcagccagggggaacacgttcagggaggagtcggcgccgtgccttcgtctgtgaccaaggcagtgcttgtggagcgagggcagagtgtgggcgacctggacggcgctgcccagctgcatggctgtgcaggggacccagtggtcgccaccttctcagtcgacagacacggcagcacacggcagcgacagcacagagggcaagacaaggagacaggcgttagaaggcgtgggcagcagaatgcgcacacgccacatggatggtcagcatgtggtgatggcacagagggcgagacaaggagacaggtgttagagggcgtgggccacagcgtgcgcacacgctcatatggacggtcacacagatgctcacacggacggtcagcatgtgacgataaggagacaggtgttagagggtgtgggcagcagcgtgtgcacacgctcacacggacggtcacacgcttacacggacggtcacacagacggttgcacgctcacacggaggctcacaaggacgcctacacggttacggatgatcacacggatgctcacacggttatgcggacactcacacggacggtcacacactcacacgaacggtcacacagatgctcacacggacggtcacacggaagctcacacggacggtcacacactcacacgaacggtcacacagatgctcacacggacggtcacacggaagctcacacggacagtcacacgctcacacggacggtcacagggatgctcacacggacggtcacacggatgctcacgctcacacggacagtcacacggatgctcacacggacggtcacacggatgctcacacgctcacacggatggtcacacggatgctcacacggacggtcacacgctcacacggacggtcacacggatgctcacacggacagtcacacggaagctcacacggacggtcacagggatgctcacacggacggtcacacggatgctcacaggctcacacggtcacacggatgctcacacggacggtcacacggatgctcacacgctcacacggatggtcacacggatgctcacatggacggtgacacgctcacatggacggtcacacacggacggtcacacacacacggtcacacagatgctcacacggacggtcacacggaagctcacacggacggtcactcacacgaacggtcacacagatgctcacacggacggtcacacggaagctcacacggacggtcacacggaagctcacacggacggtcacacacggacggtcacacacacacgaacggtcacacagatgctcacacggatggtcacacggaagctcacacggacggtcacacactcacacgaacggtcacacatgctcacacggacggtcacacggaagctcacacggacggtcacacggaggctcacacggacggtcacagggatgctcacatggacggtcacacggatgctcacacggacggtcacacggatgctcacacggatgctcacatggatggtcacactctcacacggatggtcacacactcacacggacggtcacaggctcacatggatgctcacacggacggtcacacagatgctcacatggatggtcacactctcacggacggtcacacgctcacacggacgctcacacggacggtcacacggatgctcacatggatggtcacactcacacggatggtcacacacacggacggtcacacgctcacacggatgctcacacagacggtcacacagatgctcacatggatggtcacactcacacggacgctcacacgctcacacggacgctcacacggacgctcacacagatgctcacatggatggtcacacacacggatgctcacatgctcacacggacggtcacacagatgctcacatgggtggtcacactctcacacggacgctcacacacatggatgctacacggatggtcacacagatgctcacatggatggtcacactcacacggacgctcacacgctcacacggacgctcacacggacggtcacacagatgctcacatgggtggtcacactcacacggacgctcacacgctcacacggacgctcacacggacggtcacagatgctcacatgggtggtcacactcacacggatgctcacacgctcacatggatgctacacggacggtcacacatgctcacatggatggtcacactcacacggacgctcacacgctcacaccgatgctcacacggacggtcacacagatgctcacatggatggtcacactcacacggatgctcacacgctcacacggatgctcacacggacagtcacacagatgctcacatggatggtcacacacacggacggtcacacgctcacacggatgctcacacggacggtcacacatgctcacatggatggtcactctctcacacggtcacacgctcacacggacgctcacacggtcacacggatgctcacatggatggtcacactcacacggatggtcacacacacggacggtcacacgctcacggatgctcacacggacggtcacacagatgctcacatggatggtcacactcacacggacggtcacacgctcacacggatgctcaaatggatggtcacactctcacacggatggtcacacacacggacggtcacacgctcacggacgctcacacggacggtcacacagatgctcacatggatggtcacacacacggacagtcacgctcacacggacggtcacatggatgctcacatggatggtcacactctcacacggatggtcacacactcacacggacggtcacacgctcacacggatgctcacacggacggtcacacagatgctcacatggatggtcacacggacggtcacacgctcacacggacgctcacacggacagtcacacggatgctcacatggatggtcacacacacggacggtcacacgctcacacggatgctcacacggacggtcacacagatgctcacatggatggtcacacacacggacagtcacgctcacacggacgctcacacggacggtcacatggatgctcacatggatggtcactcacacggatggtcacacacacggatggtcacgctcacacggatgctcacacggacggtcacacagatgctcacatggatggtcacacacggacggtcacacgctcacacggacgctcacacggacagtcacacggatgctcacatggatggtcacacacacggacggtcacacgctcacacgagatgctcacggtcggtcacacagatgctcacatggatggtcacactctcacaggcatggtcacacactcacacggacggtcacacgctcacacggacgctcacacggacggtcacacagacgtctcacatgggtggtcacactcacacggacgctcacacactcacacggacgctcacacggacggtcacacagatgctcacatggatggtcacactctcacacggacgtcacggatggtcacatgctcacacggacggtcacacagatgctcacatggatggtcacactcacacggacggtcacacgctcacacggacgctcacacggacggtcacacggatgctcacatggatggtcacactctcacacggacggtcacacgctcacacggatgctcacacggacggtcacacggacggtcacacgctcacatggacggtcacggatgctcacatggatggtcactcacacagacggtcacacacggacggtcacacgctcacggatgctcacatggacggtcacacacggacggtcacacgctcacacggacgctcacacggacggtcacacgctcacacggacggtcacacacggatggtcacacagacggtcacacggatgctcacatggatggtcacacgctcacacggacggtcacacgctcacacggacgctcacacggtcggtcacacggatgctcacacggacggtcacacgctcacacggacggtcacacgctcacacggacgctcacacggacggtcacacggatgctcacatggatggtcacacgctcacacggacggtcacacacggacagtcacacgctcacacggatgctcacacggacggtcacacacggacggtcacacgctcacacggacgctcacggtcacacggatgctcacatggatggtcacacgctcacacggacagtcacacgctcacacggatgcttacacggacggtcacacacggacggtcacgctcacacggatgctcacacggacggtcacacacggacggtcacacgctcacacggatgctcacacggtcacacgctcacacggacgctcacggtcacacggatgctcacatggatggtcacacgctcacacggacagtcacacgctcacacggatgcttacacggacgctcacacggatggtcacacatgctcacacggacggtcacacgctcacacggacgctcacacggacggtcacacagatgctcacatggatggtcacacacacggacggtcacacggatgctcacatggacggtcacactctcacacggatggtcacacacacggacggtcacacgctcacacggatgctcacatggacgacggtcacacggatgctcacggatggtcacacggatgctcacatggacagtcacacagatgctccatggacggtcatatggatgctcacacgggcggtcacgctctcacacggacggtcacacggatggtcacacagatgctcacatggacggtcacactctcacatggacggtcacacggatgctcacatggacggtcacactctcacatggacggtcacacggatgctcacacggacaggcacacagacgctcacacggacggtcacacggatgctcacatggatggtcacactcacatggacagtcacacggatgctcacacggatggtcacacggatgctcacacggatggtcacacggactctcacatggacggtcacactctcacacggacgctcacacggacggtcacacggctgctcacacggatggtcacacggacgctcacatggacggtcacactctcacacggacgctcacacggacggtcacacggatgctcacacggatggtcacacggacgctcacatggacggtcacacgttccacacgaacgctcacgtggatgctcacatggacgctcacacgctcacatggacgctcactcacatggacacacacggaaacacggacagtcacatggaccgtcgcacactcacagacggtcacatgctcacacggatgctcacaccgatggtcacatggacgctcacacggacggccaggatgtggtga

SEQ ID NO: 134668 - DNA, 758 bp, Homo sapiens; identical to SEQ ID NO: 117112
  misc_feature (1)...(758): n = a,t,c or g

SEQ ID NO: 134669 - DNA, 1451 bp, Homo sapiens
accgctccggaattcccgggtggatacgcgcgtccgcggacgcgtgggtttctctctcagctctccgactctctttctctctcagcctctttctttctccctggctcccccactgtctgcacctcttctgtgtggcgagtggaccgcttaccccactaggtgaagatgtcagcccaagagagctgcctcagactcataaaggacttcctcttcgttttcaacctcttcttcttcgccctcggcagcctgatcttctgccttcggcatctggatcctgatcgacaaaaccagcttcttgtcctttgtggggcttgggctttcgtgcctctgcagatctgggtccaaagtcctgggccatctcagggaatctttcaccatggggcatcgccctcctggggttgtgttggggggccctcaagggagctccgctgcctcctggggcctgtattttggggatgctgctgctcctgtttgccacacagatcacccttgagaaatcctcatcttccaatcagcggggcccagttggagcgaagcttgcgggaacgtcgtaggaaaaaccatccataaagtacggcatcaaccccgaaggagaccgcgccagaagaaaatctgggactatgtgcagtccaacttgcgctggtgcggctggcactacggcagggactggttcaaagtcttcatcctgagaggtaacgggtcggaggcgcacccgcgtcactcgctcttgatacaactttatggcgacatagaactccacaatcctaaataaggtgatcgtgcaccagctcacaaggctagaacacctggcgcggtccagacacagtgcagacgatctgcgctgtccctgcagagagccacattacccggaaggggctgcgcgcagggcatacagaaagtggctgcacaacacccttatttttccatagtgggcaatttgcctgggcgtcggcctactcgaagctcgggttcatgacgctctcgaatattcctgtggaagaaaccgtggaccacggtctaccaacgggctcggctcgataccgtttaggccccgcccctccccaaagtcgcgccccgcccccggtcagcgtgcgctgggcacttcccgtgctgcctgtaaatatttgtttaatccccaggttggccgtggagccctccggcgttcacatttcccctggggacaccacgtggctgcgtgcccctgctgctgtcacctctcccacgggacctggggctttcgtccacagcttcctgtccccatctgtcggcctaccaccacccacaagattatttttcacccaaacctcaaataaaccccccgcgtttttggtaaatgaccacaaaaagggcggccgttctaaaaaagccctggaggggcccaatgttacccgtgcttgaccacgaatacctctttgcctatagcgacctcaatgactccctatctggctagt

SEQ ID NO: 134670 - DNA, 492 bp, Homo sapiens
agctccgtctggtgaacctccagatattcatcaagtccatttttcaaggccctgtagacttcttccacccttttaggctgaggctctttggggggattgttgtttttgtggcctaaattgtgcattttcttcagtttggcctgaggcttcttgagagcggaggaattttcaatgaaggagttacacctggatcgcctttcctggaggccgctgaaacccgcaaaggactggcttctaatgatcccattgggccctccaggcgaaaaagactgggatcctaccaacatgatttccgggagtctggtcggtagtccttcaccaaaaacatcatcctcttcatcgaccaggagctcctcagcatcaaaaaactgcatcttggagaggacaggcgcgagaagcagcaggcagcagccccggcagtctcagcagtcacactgccgaccgaggtgatttcctttccttgggttgcccaagccctctggagggcagctt

SEQ ID NO: 134671 - DNA, 2328 bp, Homo sapiens
ccggcggcgtcacttgtgctgggaggggagggcgggtggagacagctgcttgacagctacttcagcccaactccaggaggctgcgcttcggtgcctgcttccagctgatcgccggcacgccaggctcctttgcaagagctggcgcgcgctggagggagagggcagaggaaaggagccgaggcaaggaaaggccctttcagctaaccttttgggatctttcatacaagctgggctgtgcattgaaaaaaatgaggcggtggtgtatggggtgggggcggtgtgagggtgaggttggctgcccacggcaagggttgtgctggaaagccccgctgaagagggctgctttgtagggcactctctctaccggggctgctttggacacagctctcataaagatggcagaaagagaattgtttagctgagacattagccgaaagggaacatcctaggagacatgtcaacatgggaaacacccacatccagtcgtggtctgggcactgctttttgccctttcatttcagagcttttatagcaccttagtttactctccagatgcctacaccttccaccttgtatcatgactatttgtgtagagatggatggttccaaacatttctctatttactggagtctggagaaagagacctggaaagaagtacaaatatgcagtagaagtttggcaggttatcccatgttgcccctttctgtccatctccatcttctgtctcctggagggctcacctgtagggaccacgtcagtggccgccctgtgatgtccaggtgggtctagccaatggggatccccaacaggagatgaaagtgaggtgggaatatgcattccctggctcctccctatgaggtcaccttgggccccagtattgctggcaggagtgagagttgggggatggaaggctgtatttcagcctcttcctttcctgaccctcccccaaaaagcctcaaggggctgcttgaggaagataaatgtgaacacctgcttgcctagaccaagagcagtgcagaaagccactgactcactgtgtgcagttctcagtgttacctggtgggtcataaaggcataaacacctatctttctgggtgtattatcaatattaggaagactcacggggctatctgtgtctactgcattgtagtccttgttgtaaaacaactacaatcaccaccaccatcaccaccaccaccatgattattataatcatcatctcactaccaccaccaccaccaccaccaccacaactacaatcaccaccaccatgaccaccaccacaactacaagcaccaccaccaccactaccaccagcaccaccacaactacaatcaccaccaccaccaccaccacagctacaatcaccaccaccaccaccaccaccaccaccacaactacaatcactaccaccatcaccaccaccaccaccatcaccatcatcgtgaatatcatcatcatcacctcaccaccactaccatcaccaccaccaccacaactataactatcaccaccattatcaccaccaccatcatcaacattatcatcataatcatcatcaccataaccaccactacaaccatcactaccaatcataaccaataccactaccaccactatcatcatcatgattattatcatcatcaccttaccaccaccacaattattattatctctataatcgctaccaccactatcatcactaccaccagtccaaccactaccgccaccaccaccatcatcatcagtatcatcataatctgagccgtttgctcccacacgtgaattctgttctgttcttgaaagcaggataggaacctacactgtgcatggcccttcttttttccttttttcaattgtcatcatcattgtcatcatcatcatcagcagcagcagcacagtggtgtcaaaacaaagcaaagcagaccggagagcctcctgccagaaagatgcatttaccttcaccaaaaacatcatcctcttcatcgaccaggagctcctcagcatcaaaaaactgcatcttggagaggacaggcgcgagaagcagcaggcagcagccccggcagtctcagcagtcacactgccgaccacgaggttgaagcctttaaaaggtgtttttacagcagattttagagacttctcaccttaccaacggttataaacccgtatccttgcaaattcagcagtagagtcattagattgccctctcagcctctgcacgtgaagggtctcagggcttttcaggacatcatatgagaacggaacttgtggtaaagactaccttgccacaacaggaccccaccctgcttaccttccgctggatccac

SEQ ID NO: 134672 - DNA, 1549 bp, Homo sapiens
  misc_feature (1)...(1549): n = a,t,c or g
ccgctccgcaanttccggtcgagccacgcgtccggcgcagagctccgctggtgccacgtttatccccttacatcctcctaggacccggtcggaactcgtcgccccagcccgccgggggcgcaacgcccgaacccgcggccctcgagacgggaccgagagcatcatgggcagcactgtcccgcgctccgcctccgtgctgcttctgctgctgctcctgcgccgggccgagcagccctgcggggccgaagctcaccttcgagctgccggacaacgccacgcaatgcttccacgaggaggtggagcagggcttgaagttctccctgggattaccaggtcatcactggaggccactacgatgttgactgctatgtagaggacccccaggggaacaccatctacagagaaacgaagaagcagtacgacagcttcacgtaccgggctgaagtcaagggcgtttatcagttttgcttcagtaatgagttttccaccttctctcacaagaccgtctacttttgactttcaagtgggcgatgagcctcccattctcccagacatggggaacagggtcacagctctcacccagatggagtccgcctgcgtgaccatccatgaggctctgaaaacgggtgattgactcccagacgcattaccggcttgcgggaggcccaaggaccggggcccgagccggaaggacctttaatagccgaagtctctttactggtctgttgggcgagacgatttgccctgtttcgtgggtcagctttcagtcaggtgctactgttggaaaagcttcttcacagaaaaacgacccatcaagcagggcagtccactcctagccccggcatcctgctctagggccccttcattccccaggntgggagcagctctcctaggtcacagcctgctgggctgggtcgcgtagcccaaggtggaggcagaaccgatgctgctgtggtagccctttgcctttcaatgcccatgcttgattcttgcacctcagccagctgaaggtctcagagaccatgtaatcatgaaggcatccgaactgccattaagtgtgcagcggctgaaaagacatttacaactaggcccaggggattaagcccactgtggggaggggttggacaaggcaaatggttcaagtggccttggctgtttggcagggaactccaaagtgccccaggcctcttgggcaagctttagggccctgcctctgtttaaaaatttggnnnnaaatttggccatgggggttcatttgtcttgggtgtccctatcccatatggagaagaaagggggctctaagttctggctcttctttctttggggtttcttctgtacctgaggaaaccaggccctggggtgactttgcagaantccctgcaccctcggtganaaaaccagtgttcaagccatgcaagcagtacagaatggtgactgggtgcccttggtgagctgtgtatttcctaggaggtagaaaactgagggaaactgtgggctagtagagactaagtgtgagcgtcaaaaaaaaaaaaaaaaaagggcggccgct

SEQ ID NO: 134673 - DNA, 765 bp, Homo sapiens
atggatgactccacagaaagggagcagtcacgccttacttcttgccttaagaaaagagaagaaatgaaactgaaggagtgtgtttccatcctcccacggaaggaaagcccctctgtccgatcctccaaagacggaaagctgctggctgcaaccttgctgctggcactgctgtcttgctgcctcacggtggtgtctttctaccaggtggccgccctgcaaggggacctggccagcctccgggcagagctgcagggccaccacgcggagaagctgccagcaggagcaggagcccccaaggccggcctggaggaagctccagctgtcaccgcgggactgaaaatctttgaaccaccagctccaggagaaggcaactccagtcagaacagcagaaataagcgtgccgttcagggtccagaagaaacagcctacccaaatgagacgaaaccagaaaaacaattctgggaatatgatgaaacaagttctttaccacccccaaaagatcacactagctcatcagcattgaatccaaaccaagaagaaatcgctgaattgtcagaaaaagaattcagaagatcgagtattaagctaatcaaaaaggcaccagagaaagcactggaagtcctagccagaaaaatcagacaagagaaagaggaagtcaaactgttgctgtttgctgatgatgtgattgtgtacctggaaaaccctaaagactcatccaaaaagctcctagaactgataagtgaattcagcaaagtttcaatataa

SEQ ID NO: 134674 - DNA, 1134 bp, Homo sapiens
gcagtgcggtggaattcgcagaaaggcggaaaggagaaaatctcacgataactcctcctgaggggtgagccatttcctgccatgtagtgcacgcaggacatcaacagacacagataacaggaaacgatccattccctgtggtcacttattctaaaggccccaaccttcaaagttcaaggagtgatatggatgactccacagaaagggagcagtcacgccttacttcttgccttaagaaaagagaagaaatgaaactgaaggagtgtgtttccatcctcccacggaaggaaagcccctctgtccgatcctacaaagacggaaagctgctggctgcaaccttgctgctggcactgcatgcttgctgcctcacggaggtgtctttctaccaggtggccgccctgcaaggggacctggccagcctccgggcagagctgcagggccaccacgcggagaagctgccagcaggagcaggagcccccaaggccggcctgggaggaagctccagctgttcaccgcgggacttgaaaatcttttgaaccaccagctccagggagaaggcaattccagttcagaacagcagaaataaggcgtgccctttcagggtccagaagaaacagtcactcaagactgcttgcaactgattgcagacagtgaaacaccaactatacaaaaaggatcttacacatttgttccatggcttctcagctttaaaaggggaagtgccctagaagaaaaagagaataaaatattggtcaaagaaactggttacttttttatatatggtcaggttttatatactgataagacctacggccatgggacatctaattcagaggaagaaggtccatgtctttggggatgaattgagtcctggtgactttgtttcggatgtattcaaaatatgcctgaaacactacccaataattcctgctattcagctggcattgcaaaactggaagaaggagatgaactccaacttgcaataccaagagaaaatgcacaaatatcactggatggagatgtcacattttttggtgcattgaaactgctgtgacctacttacaccatgtctgtagctattttcctccctttctctgtacctcgaagaagaaagaatctaactgaaaataccaa

SEQ ID NO: 134675 - DNA, 945 bp, Homo sapiens
ttttacagaactcccacggacacaccatgataaggacgctgctgctgtccactttggtggctggagccctcagttgtggggaccccacttacccaccttatgtgactagggtggttggcggtgaagaagcgaggcccaacagctggccctggcaggtctccctgcagtacagctccaatggcaagtggtaccacacctgcggagggtccctgatagccaacagctgggtcctgacggcttgcccactgcatcagctcctccaaggacctaccgcgtggggctgggccggcacaacctctacgttgcgggagtccggctcgctggcaagtcaagtgtctctaagattgtggtgcacaaggacttggaacttcaaccaaatctccaaaggggaacgacatttgccctgctcaaactggctaaccccgtctccctcaccgacaagattcaagctggcctggcttccctcctgccggcaccattctacccaacaaactacgccctgctaagtcacggggcttggggaaagctgcagaacaaacgggggctgttcctgatgtcctgtcagcagggccggtttgctggccgtggactatgccacctgctcccagctctgccttggtggggcagcagcgtgaaaaccagtatgatctgtgcttgggggtgatggcgtgatctccagctgcaacggagactctggcgggccactgaactgtcaggcgatctgacgctctgtggcaggtgcacggcatcgtcagcttcgggtctcgcctcggctgcaactactaccacaagccctccgtcttcacgcgggtctccaattacatcgactggatcaattcggtgatcgcatataactaaccaaaagatgtccctgggactgtttcagacttggaaaggtcacagaaggaaaataatattatataaagtgacaactatgcaaatcac

SEQ ID NO: 134676 - DNA, 414 bp, Homo sapiens
tttcgtgggaacagctgatccgtctgttgggaggacagatatctcaaggccaggatggaagaatcaccactaagccgggcaccatcccgtggtggagtcaactttctcaatgtagcccggacctacatccccaacaccaaggtggaatgtcactacacccttcccccaggcaccatgcccagtgccagtgactggattggcatcttcaagccagctacctgcccaaaccaggagctcagctctaccagttccgatatgtgaaccgccagggccaggtgtgtgggcagagcccccctttccagttccgagagccaaggcccatggatgaactggtgaccctggaggaggctgatgggggctctgacatcctgctggttgtccccaaggcaactgtgttacagaaccagctcgatg

SEQ ID NO: 134677 - DNA, 393 bp, Homo sapiens
gcgaagagctggcaagaggagcagagtgctcaggctcagcgactgaaagacaaggtggcccagatgaaggacaccctaggccaggcccagcagcgggtggtgagtgaggccccttggcaacaggaaacgggaaattccaagggcaagttgtagagaagcctgcgtgtctaaagagaaggggagagacatggctaaagactaaacaacacaaccccaagtcctaatgcagtggagtggagggagcgtttacctccctggctgatgaatgattcactaggaactgtgatctccatctcctcctttctcctgaggccgagctggagcccttgaaggagcagcttcgaggggcccaggagcttgcagcctcaagccagcagaaagccaccctgtatt

SEQ ID NO: 134678 - DNA, 480 bp, Homo sapiens
ctgaaagtggttttggaggaaccgggatggaggaggccttcccctgtgggaatagaatcgtccactcctagccctggttgcttctgatacacagccactgcacacacacactcacactcacactcccttgtctgatgccccaaagccaattcctggggcaccctaccctctcttatttggagtttccattgacttctgtgccccaccctagccttttccataaccttaggtattcagtttggaggggttttttgtatttttgaggattcctgtattctgtatcctctcctcgcatctcctcacatggaaagaaataatgtatttgtgccttctgtgaggaatggggggaacaagtggtcccaggtatccccatttccaaggcccccctccctctccaggtccccccacagcaataaaagcttccccctgatatccatccctttgtagtttgaacaaatatatttatatgatatgtatgaa

SEQ ID NO: 134679 - DNA, 542 bp, Homo sapiens
  misc_feature (1)...(542): n = a,t,c or g
ccagcagggactaaagaagagaggacatggggaactggaaaaataagccttccaggattgtggggagaaagacgctgtgggagaggccaggatgctgcattaggcacaggataacctggggaacccaggcacatgggtcctgctctccgaagtctgcaagtcaagaagggaacagagcacgccgaccctctccctttcccctctgtctctcttagtggctttacagtgggtaccctgtcagaaaccagcactgggggccctgccacccccacatggaaggagtgtcctatctgtaaggagcgctttcctgctgagagtgacaaggatgccctggaggaccacatggatgggacacttcttttttcagcacccagggaccccttcaccttttgagtgatcttactcccttcgttacatggcacaaattacacattcatggcacacacacacttcacacacatggcataacatttagggttttcatggcccttttttctattcacattggggggttccnggatatttttgtttcccttaaggaa

SEQ ID NO: 134680 - DNA, 3464 bp, Homo sapiens
  misc_feature (1)...(3464): n = a,t,c or g
atggttggaactcagaagttccgctttcccccagtacctatgaatcctggagcccaagtggagagaattctccaaagatcccactttcagcgcagggaccccaatcctgcagttctccgtatctgccacaaggtggcagccaaagcatcgattgatccagagctagacctgatctctggacctctggtccagatcacggaaatggagcctgcaaagacccagaagccactctgggggagcccagtccagatgtggatatggtcaggccccttagcactgaaatcctcaagttggaaaaaaatggtcagctgtgcagaagacatcattcttacaaggtctgtccctgagattgaagtaaagaagaaactgctataccccagctatcagtttcccatccccaaaatggaggacaagatatctcaaggccaggatggaagaatcaccactaagccgggcaccatcccgtggtggagtcaactttctcaatgtagcccggacctacatccccaacaccaaggtggaatgtcactacacccttcccccaggcaccatgcccagtgccagtgactggattggcatcttcaaggtggaggctgcctgttttcgggattaccacacatttgtgtggtctttccgtgcctgaaagtacaactgatggttcccccattcacaccaagtgtccaagttccaagccagcttacctgcccaaaccaggagcttcagcttttaccagtttccgatatgtggaaccgccagggcccaggtgtggtggggcagagacccccctttccagttccgagagccaaggcccatggatgaactgggtgaccctggaggaggctgatgggggctctgacatcctgctggttgtccccaaggcaattgtgtttaaagaaccagctcgatgagagccagcaagaacggaatgacctgatgcagctgaagctacagctggagggacaggtgacagagctgaggagccgagtgcaggagctcgagagggctctggcaactgccaggcaggagcacacggagctgatggaacagtacaaggtgggagctgggccaggggatttccgggtcccatggggagatcacagaagagagggacatcctgagccggcaacagggagaccatgtggcacgcatcctggagctagaggatgacatccagaccatcagtgagaaagtgctgacgaaagaagtggagctggacaggcttagagacacagtgaaggccctgactcgggaacaagagaagctccttgggcaactgaaagaagtacaagcagacaaggagcagagtgaggctgagctccaagtggcacaacaggagaaccatcacttaaatttggacctgaaggaggcgaagagctggcaagaggagcagagtgctcaggctcagcgactgaaagacaaggtggcccagatgaaggacaccctaggccaggcccagcagcgggtggccgagctggagcccttgaaggagcagcttcgaggggcccaggagcttgcagcctcaagccagcagaaagccacccttcttggggaggagttggccagtgcagcagcagccagggaccgcaccatagccgaactacaccgcagccgcctggaagtggctgaagttaacggcaggcatggctgagctcggtttgcacttgaaggaagaaaaatgccaatggagcaaggagcgggcagggctgctgcagagtgtggaggcagagaaggacaagatcctgaagctgagtgcagagatacttcgattggagaaggcagttcaggaggagaggacccaaaaccaagtgttcaagactgagctggcccgggagaaggattctagccttggtacagtttgtcagaaagtaagcgggagctgaactagagctgcggtcacccttgcgttgtgctccagaaggaaaaggagcaggttacaggagggagaaacaggtgagcacccataacccaggccccgtggatgccacaggctgcccggcagctctgacagactcagaggacgagtccccagaagacatgaggctcccaccctatggcctttgtgagcgtggagacccaggctcctctcctgctgggcctcgagaggcttctccccttgttgtcatcagccagccggctcccatttctcctcacctctctgggccagctgaggacagtagctctgactcgccttggctgctcttcccatacctgtcccaatgtgctgctcccccatcttgggacaccaccccaaagcccaaccctgtctctttggcatccaggaggctgaagatgagacagtcagtcctgatggcagctgtgcagagtgggggtgaggaggccaacttactgcttcctgaactgggcagtgccttctatgacatggccagtggctttacagtgggtaccctgtcagaaaccagcactgggggccctgccacccccacatggaaggagtgtcctatctgtaaggagcgctttcctgctgagagtgacaaggatgccctggaggaccacatggatggacacttctttttcagcacccaggaccccttcacctttgagtgatcttactccctcgtacatgcacaaatacacactcattgcacacacacactcacacacatgcatacacttaggtttcattgcccatttttctatcacactgggctccatgatattctgtttccctcaagaactggcttctgttgtggcctgtttttcatcccaagatttcttcacttcatcctctcctacctgggctcttttgtcccacgggagggggtcctgttcgggaagcagtgggctgaatttattcccctggaaagtgggtttttgggagggaaccggggatggaagaaggnctttcccctgtgggaaatagaatcggtcaatcctaagccctgggttgcttctgatacacagccactgcacacacacacttcacactcacactccctttgtttggatgcccccaaagccaaattcctgggggcaccctaaccctctcttaatttggaagtttccgttgggtttaccctgaagttttctctggggtctgcaccagaggcaagcaagcatgggaacaatcatggcctctcaaggtcccttttggttctccagtttcattgggtcctctttctgttcccccccattgacttcctgtgccccacccctagccttttcccataaccttaggtattcagtttggagggggttttgtgtatttttgaggagttcctgtattctgtatcctctcctcgcatctcctcacatggaaagaaataatgtatttgtgccttctgtgaggaatmsmggggggaacaagtggtcccaggtatccccatttccaaggcccccctccctctccaggtccccccacagcaataaaagcttccccctgatatccatccctttgtagtttgaacaaatatatttatatgatatgtaaaaaaaaaaaaaaaaaa

SEQ ID NO: 134681 - DNA, 3623 bp, Homo sapiens
  misc_feature (1)...(3623): n = a,t,c or g
tttcgtcgcctagggagaaaacgtctgactccagccaccggccttcaaggcacggctttttattccttcggctggtcggcctctcgcccttcagctacctgtgcgtccctccgtcccgtcccgtcccggggtcaccccggagcctgtccgctatgcggctcctgcctctagccccaggtcggctccggcggggcagcccccgccacctgccctcctgcagcccagcgctgctactgctggtgctgggcggctgcctgggggtcttcggggtggctgcgggaacccggaggcccaacgtggtgctgctcctcacggacgaccaggacgaagtgctcggcggcatgacaccactaaagaaaaccaaagctctcatcggagagatggggatgactttttccagtgcttatgtgccaagtgctctctgctgccccagcagagccagtatcctgacaggaaagtacccacataatcatcacgttgtgaacaacactctggaggggaactgcagtagtaagtcctgggcagaagatccaagaaccaaatactttcccagcaattctcagatcaatgtgtggttatcagacctttttttgcaggggaaatatttaaatgaagtacggagcccccagatgcaggtgggactaggaacacgttcctctggggttnggagttacctggtatgccctggaaaagaattcctaagtattataattacaccctgttctattcaatggggaaggcacggaagcatggtgaaaactattagtgtggactacctgacagatgttttggctaatgtctccttggactttcctggactacaagtccaacttttagcccttcttcatgatgatcgccactccaagcgcctcattcgccttggacagctgcacctcagtaccagaaggctttccagaatgtctttgcaccaagaaacaagaacttcaacatccatggaacgaacaagcactggttaattaggcaagccaagactccaatgactaattcttcaatacagtttttagataatgcatttaggaaaaggtggcaaactctcctctcagttgatgaccttgtggagaaactggtcaagaggctggagttcactggggagctcaacaacacttacatcttctatacctcagacaatggctatcacacaggacagttttccttgccaatagacaagagacagctgtatgagtttgatatcaaagttccactgttggttcgaggacctgggatcaaaccaaatcagacaagcaagatgctggttgccaacattgacttgggtcctactattttggacattgctggctacgacctaaataagacacagatggatgggatgtccttattgcccattttgagaggtgccagtaacttgacctggcgatcagatgtcctggtggaataccaaggagaaggccgtaacgtcactgacccaacatgcccttccctgagtcctggcgtatctcaatgcttcccagactgtgtatgtgaagatgcttataacaatacctatgcctgtgtgaggacaatgtcagcattgtggaatttgcagtattgcgagtttgatgaccaggaggtgtttgtagaagtctataatctgactgcagacccagaccagatcactaacattgctaaaacctttgaccccagagctcttaggaaagatgaactatcggttaatgatgttacagtcctgttctgggccaacctgtcgcactccaggggtttttgaccccggatacaggtttgacccccgtctcatgttccagcaatcgcggcagtgtcaggactcgaagattttcccaaacatcttcctgtagcgaccctcacacagcctctgcagatggatccctgcacgccctctttctgatgaagtgattgtagtaggtgtctgtagcctagtcttcaagaccacaccctggaagagtttctgggctggctttaagtcctgtttgaaaaagcaacccagtcagctgacttcctcgtgcaatgtgttaaactgtgaactctgcccatgtgtcaggagtggctgtctctggtctcttcctttagctgacaaggacactcctgaggtctttgttctcactgtattctttttatcctggggccacagttcttgattattcctcttgtggttaaagactgaatttgtaaacccattcagataaatggcagtactttaggacacacacaaacacacagatacaccttttgatatgtaagcttgacctaaagtcaaaggacctgtgtagcatttcagattgagcacttcactatcaaaaatactaacatcacatggcttgaagagtaaccatcagagctgaatcatccaagtaagaacaagtaccattgttgattgataagtagagatacattttttatgatgttcatcacagtgtggtaaggttgcaaattcaaaacatgtcacccaagctctgttcatgtttttgtgaattctaggctggtgctgcactgaaatagagcagtaagcttgtgataaaggccaattccaggtagctcttgaaggtgatagccatctactttccagtggctgccaaccacagggagtgccagttaacactggaaggattaaaggcagggtcccttctcttgagaactccctctgagatctgaaaaatgaagtggctttaggaacatcagcagtgaaggactgccaagagtttggtgaaggttgtctcttccgagggccttctgaagacagggctcttgaacagacaagtggaagggctgtaccagggataaaggaaagaagtgcctgtccagcagggagcttgaatttaagttccatgtatgaagtcattggctctatctgcatttttctgtcattctcttcatttgttttaaggtggaaaattttcttacagttgatgcaaagtatcaactactttaccctaccttctccccttttagatgggttcttcctgagttttggagtcttgtatgattatcagtattcccctgtcaaaatcaaatctattcaggtttcttcactgttgagaacacctaaatggtttttatttttgagaagtggggacagagtctcactatggtcacccagggctggagtgcaatggcatgatctcagctcactggcaaccttcgcctcctggggtttcaagcgattctcctggcctccgcctcctgagtagctgggattataggcacacaccaccacgcccagctaattttttgtatttttagtagagacagagtttcaccatgttggccaggctggtcttgaactcctgaccttgtgatccacccacctcggcctcccagagtgctgggattacaggcatgagccaccacgcttggctaagaacacctaaatttttatgtttcttggctcaaaaaccagttccatttctaatgttgtcctcacaagaaggctaattggtggtgagacagcaggggaggaggaagagctgtggtttgtaacttgttcaacttcagggcaataaggcgattttagctttatttaaagtcttctgtccagctttaaggcactttgtaagacagggctggaaataggcttttcttttcaganttgcagntagtcagttngggctaacgtcattngggtatattcc

SEQ ID NO: 134682 - DNA, 464 bp, Homo sapiens
  misc_feature (1)...(464): n = a,t,c or g
attcccaataaacttttnattattggttaagtcanttttnagctgttttaaaaactccaactttgtttccccctttaatccatctaaagccctagatggtggcacttagtggcccttcaaaatatatttaaactgaattatcttttgaatttcaggaggatgtgaaaatgctctcccatctgctccaggctttagattatggggcaccccctcatggaggaattgccttaggtaaacaacttttccttttataagataaactgaattccattgcactgtctcaaattcaggttctcagtttgtgttggtagaggtggaaggatgagtccaagagttccatgagaatgtaagtttctgttgaaatttcagtaatatattttttaaatatatcttaacagttataaagatataacttaactgataatttgcatttgaaagatcattaatagcttaaaacaacagaa

SEQ ID NO: 134683 - DNA, 1272 bp, Homo sapiens
atggagaaaggtgggaacatacaattggagattcctgacttcagcaactctgtcctgagccatctaaaccagttgcgcatgcagggccgtctctgtgatattgtggtcaatgtgcaaggacaagcttttcgggctcacaaagtggtgctggctgccagctccccctatttccgggatcacatgtccttgaatgagatgagtacagtctccatttcagtcatcaagaaccctactgtttttgaacagctcctttctttctgttacacagggcggatatgcctgcaactggcagatatcatcagctacctaacagctgccagttttctgcaaatgcagcatattatagacaaatgtacacagatcctggagggcattcatttcaaaattaatgtggctgaggttgaagcagaattaagtcaaacaaggacaaagcatcaagagagacctccagagtctcacagggttacaccaaatctcaaccgctcccttagcccacgacataataccccaaagggaaaccggcgaggtcaggttagtgctgtgctggatatcagagagctaagtcctcctgaggagtccaccagccctcagatcattgaaccaagttctgatgtagagagccgggagcccattcttcggatcaaccgagcaggacagtggtatgtggagacaggagtggcggaccgtgggggtcggagtgatgatgaagttagagttcttggagcagtacacatcaaaactgaaaatctggaggagtggcttgggcctgagaatcagccttctggagaagatgggagtagtgcagaggaagtaacagccatggtgattgataccacaggccatggttctgtaggacaggaaaattatactttagggtcttcaggagccaaggtggctcggccaacaagcagtgaagttgacaggaggaaaatcccagagagctggaatcggcccaccacccatttactgctccccaccccagtgacatacatctcctgtacactgagcccaaaaaggtaccgtatctatacttccaaatcaaaaggaaatgtgtatataaaggcaaagaacttcagacttcaagggttagacagactgatatgccttgtcactggatctccaagcatcagagatgtcatagccttcccaaagtccttccggggacatgacctcatgagcaataccccagattctgtccctcctgaggaactgaagccctatcatatccgagtctccaagccaacagactccaaagcagaaagagctcattga

SEQ ID NO: 134684 - DNA, 2761 bp, Homo sapiens
atggatgaagctgaattcagtagctttgttgtccggaccaacacatgtggagagttgcgttcgtctcacttaggccaagaagtcaccttgtgtggatggattcagtaccgaaggcaaaacacattcttggtcctaagagatttcgatgggcttgttcaagttatcattccccaggatgaggtaatagaaaatttcctgttattatctaaaagcttctttgatgctattgctgggtcggcagcctctgtgaagaagattttatgtgaagcccctgtggaatctgtggtgcaagtgtctggtacagtcatttcccgtcctgcaggacaagagaatccaaaaatgccaacaggtgagattgaaatcaaagttaaaacagctgagcttctgaatgcctgcaagaagctgccctttgaaattaagaacttcgtgaagaaaacagaggctcttcggttgcagtatcgctacttagacttgcgtagtttccaaatgcagtataacctgcgactgaggtcccagatggtcatgaaaatgcgggaatatctctgtaatctgcatgggtttgtggatatagaaacccccacattgtttaagaggaccccagggggtgccaaagagtttttagtaccatccagggaacctggaaagttttattctctccctcagagtcctcaacagtttaagcaacttctgatggttggcggtttagacagatattttcaggttgcccgatgttatcgagatgaaggttcaagaccagacagacagcctgagtttactcagattgacatagagatgtcatttgtagaccagactgggatccagagtttaattgagggtttgctccagtattcctggcccaatgacaaagatcctgtggttgttccttttcctactatgacttttgctgaggtgctggccaccttatggaactgataaacctgacactcgctttggaatgaagattatagatatcagtgatgtgtttagaaacacagagattggatttcttcaagatgcacttagtaagccccatggaactgtgaaagccatatgtatccctgaaggagcaaaatacttaaaaaggaaagacattggatccattagaaactttgcagctgaccattttaatcaggaaatcttacctgtattccttaacgccaatagaaactggaattctccagttgctaatttcataatggagtcacaaagactggaattaatcagactaatggagacccaagaggaagatgtggtcctactaactgctggagagcacaataaagcatgctctttgttagggaaaattacggactgggaatgtggctggaccttctaggaaacaagagggagtggtgctccgtgaccccactctgttctctttcctttgggtggtagatttccccctcttccctggccaaaggaggaaaatccaagaaagctgggatcggggccaacacccattttactgctccccaccccaggtgaataacatctcctgtacactgagcccaaaaaggcccgtagccaacactatgacttggttttaaatggcaatgaaataggaggtggttcaattcgaattcacaatgcagagctgcagcgttatatcctggcaaccttactaaaggaggatgtgaaaatgctctcccatctgctccaggctttagattatggggcacacccctcatggaggaattgccttagggttagacagactgatatgccttgtcactggatctccaagcatcagagatgtcatagccttcccaaagtccttccggggacatgacctcatgagcaataccccagattctgttccctcttgaggaactgaagccctatcatatccgagtctccaagccaacagactccaaagcagaaagagctcattgaatcatgcataccatgcagaaagttgagcttttaggttttgtcctctttgcttccccaaggctaaagtcagatctagagttctgccacaggtctaacaatcaagtctttagattggaaggaatccaggcaacattcttcaccacaaccgaagaaacagattaaaagataccccaatttttgactttgatttcatgcatcatttggattttttttggttaggacttttttttgaagttcctttttacttaggtgtgaaagatggttctttgttgaaataatatagtggtttagtgttttcaaatcatgtttctcataccccagatagtagattattcacttaggacagaggtaaatccaaattaggtgtgaaatgtaggaaaatgcttgcccccggtaaaactagtgagttgatggagcatttgcctccatcatcctcatcaagagaatcatataaattaagctttataatgacatttcaaccatcaacataatatagtgaggagtagcataatattttttaataatgcagaaaacatcactgaaatgagagtcacaaatttttcttcagtgtttcagcctgagtaagttacataaacctcgcttagcctcccttcctgctaatgtgtaaaaaaacatacttgccctggctacctcaccgggctgttattgctggaatcagaggagataacatatatggaagataaagtgaataaaagtactttgaaaaactataaagcattccacaaatatgagatgatggtattatccatccataaataggtagatatatctctattttatagtttcagattaaacaaaactgatatcaatagaaaaagtccttttacttatcaaaaaaagggaataa

SEQ ID NO: 134685 - DNA, 425 bp, Homo sapiens
aaagagcctgttggttgtgtaaataatatcagttttcttgcctcactggccgggagcacaagcagaaatagattacagagcacacgtggggcaggcaggcttcagaactctggaactgggctgtctacaaacctccagcattttcaggaagaaaactttaggaaaagttctccccagttagaacatacaggagtttttttggagaatgtactactcatcacctcccacctgtgaaagcccctcttcagacaaagaagaaaacaacaaatcattgttttctttgtggaaagaaaacaggactggctagtagctacgaatgcaggcaggttggcgagctggagaagctcagatgctttctctgtgataacccagcttggggattatgcaaaataaaatatttaaattgcctgtttataacatcatta

SEQ ID NO: 134686 - DNA, 1650 bp, Homo sapiens; identical to SEQ ID NO: 122000

SEQ ID NO: 134687 - DNA, 3099 bp, Homo sapiens; identical to SEQ ID NO: 123733

SEQ ID NO: 134688 - DNA, 419 bp, Homo sapiens
agcagaaatagattacagagcacacgtggggcaggcaggcttcagaactctggaactgggctgtctacaaacctccagcattttcaggaagaaaactttaggaaaagttctccccagttagaacatacaggagtttttttgtctacccatggtgttggaatgaatggaaataatgcagcagcagggaaaagcgtaggagaatgtactactcatcacctcccacctgtgaaagcccctcttcagacaaagaagaaaacaacaaatcattgttttctttgtggaaagaaaacaggactggctagtagctacgaatgcaggcaggttggcgagctggagaagctcagatgctttctctgtgataacccagcttggggattatgcaaaataaaatatttaaattgcctgtttataacatcaaa

SEQ ID NO: 134689 - DNA, 3429 bp, Homo sapiens; identical to SEQ ID NO: 133909

SEQ ID NO: 134690 - DNA, 5136 bp, Homo sapiens
atgccctttaaacatcctaagaaagctgtcaagataaaacctcacccacctgtagctcctcgaccttctagtggttccactgcaccatctcgccaccgattgttaagggtcctccccaacattggtcaatcttgttcacctgcttttgggaatgcatatccgcccgaaatctccaggaatggaatttcaagtttggcaactcaactctctgctgagagatacatatcttctatcactggtgaatttcttaaggaagataatagctgggagaataacacactgtctcacttcagtagcaacgtcaaactacctcctcagataccccatttggagttgggaaatgaccaggagcttgctgactctgttctccatcttggatcatccctgcctaggcaaacaaaacattttttaggaaacttgccatctagtaatgggaacattgtcttaccttcagaagaatgtgtaaccgaacaatcacttctacctaaagtgggctcactggcttcatttgcagaaggaaatgctgatgaacagagcagcggcttagaaggtgcgtgcaaacgtgaatctggagttgctactcactaatgctgacaaagggttgaaagctccagagcagcatctcaagcatgttgcaggagtgctgaatggggaatcagtaaagacttcagttcttaacttaccgggaattaagtcctcacaagaatagactcttgtcacctcttcgctgttctgcaccaatgtcgctacataattctctggtgaaaccagagatgacagtccaaatgttttgagtttgggaagctacagccttcttcttctcagtcactggatgttcaaaacataactgattcttctttctctaggactacttgctttcaaggtgttaaagttgattcacttgggaaaagatctgatgttatttccaaagttgaggctcgggatatcacagaaatgactaacaaggcttcccaaagagcctgttggttgtgtaaataatatcagttttcttgcctcactggccgggagcacaagcagaaatagattacagagcacacgtggggcaggcaggcttcagaactctggaactgggctgtctacaaacctccagcattttcatggaagaaaactttaggaaaatgttctccccagttagaacatacaggagtttttttgatgaaccggacgacccccgaccaggagctggtgccggcgtcggagcccgtgtgggagcggccgtggtcggtggaggagatccgcaggagcagccagagctggtcgctggcggccgacgcgggcctactacagtttctacaggaattctcacagcaaactatctctaggacccatgaaatcaagaaacaagtggacggactaatccgggaaaccaaagccacagattgtcgcctgcataatgtcttcaatgacttccttatgctctctaatacccagttcatagagaatcgtgtatatgatgaagaagtggaggagccagtactcaaggctgaggcagaaaaaacagagcaggagaagacacgagagcagaaagaagtagatctcattcctaaagtccaggaggctgtgaactatggcttacaagtattggacagtgcctttgagcaacttgatatcaaagcaggaaactcagactccgaggaagatgatgctaatgggcgggtggaactgatccttgaaccaaaggatctatacattgatcgtcctttaccatatctcattgggtcaaagctgttcatggaacaagaagatgtaggtcttggagagctgtccagtgaagaaggctctgtaggcagtgatcgtggcagtattgtggacactgaggaagagaaagaagaggaggagtcagatgaagattttgcccatcacagtgacaatgaacaaaaccagcacaccacacaaatgagtgatgaggaagaggatgatgatggctgtgacctttttgctgactctgagaaggaggaggaagatattgaggacattgaagaaaatactagacctaaaagaagcagacctacatcgtttgcagatgagctggctgcccgcatcaagggggatgccatgggtcgagtggacgaggagccgacaaccttaccctcaggagaagcaaaacctcggaagacactcaaagagaagaaggaaaggagaactccttcagacgatgaagaggataacttattcgcaccccccaagctgaccgacgaggacttctcgccatttggctctggaggtggcctgttcagtggcggcaaggggctatttgatgatgaggacgaggagagtgacctcttcacggaagcctcccaggatcggcaagctggagcctctgttaaggaggagtcttcatcatccaaacctggaaagaaaatcccagcaggagctgtttctgtatttttaggagacacggatgtgtttggtgctgcctccgttccatcactgaaggagccacagaagcctgagcagcccactccaaggaaaagcccctatggtccccctcccactggcctctttgatgatgatgatggtgatgatgatgacgactttttctcggcaccccacagcaaaccttctaaaacacgcaaagtccaatccactgccgatatctttggtgacgaagaaggagatctgttcaaagaaaaagccgtagcatcgccagaagccactgtgagtcagacagatgaaaataaagcaagagcagaaaaaaaggttaccttatcttccagcaagaatctcaagccctcatcagaaacaaagactcaaaaaggcttattttcagatgaggaggactctgaggatttgttttcttctcaaagtgcgagtaacttaaaaggtgcatctctgctgcctggcaagctccccacgtcggtttccctgtttgatgatgaagatgaagaggataatctttttgggggtacagctgctaagaagcagacattgtctctacaagctcagagagaagagaaagcaaaagcctccgagctctccaaaaagaaagcatctgccctgttgttcagcagtgatgaggaggaccagtggaatattcctgcttcacagacccacttagcatctgacagcaggtctaaaggagaacccagggattctgggaccctccagagccaggaggccaaggctgtgaaaaagaccagtctctttgaggaagacaaagaagatgatctttttgccattgccaaggacagccaaaagaagacccagagagtgtcactcctctttgaagacgatgttgatagcggaggctctctgtttggctctcctcccacatctgttcctcctgcaacaaagaaaaaagagactgtctctgaggcaccacctttgctgttcagcgatgaagaagagaaggaggcacaacttggagtgaagtctgtggataagaaggttgagagtgccaaggagtcattaaaatttgggagaactgatgtggctgagtcagaaaaggaaggacttttgactagatctgctcaggaaacagtcaagcattctgatttattttcttcatcatccccatgggacaaaggaaccaagcctagaaccaaaactgttcttagcttgtttgatgaggaagaggataaaatggaagatcaaaacattatccaggctccacagaaagaagtaggaaagggctgcgatcctgatgcccaccccaagagcacaggtgtcttccaggatgaagagctgcttttcagccacaagctccaaaaggacaatgacccagatgttgacctttttgctggcaccaaaaaaaccaagctgttagagccaagtgttgggagcctgtttggggatgatgaagatgatgatcttttcagctctgccaagtcccagcctttggtacaagagaaaaagagagtagtgaaaaaagaccactctgttaactctttcaaaaaccagaaacatcctgaatccattcaaggtagtaaagaaaaaggcatatggaagccggaaacacctcaggcaaatttagcgatcaacccagcggccttgctgcccacagcggcttcccagatctctgaagtaaagcctgttttgccagaattggcttttccttcatctgaacacagaaggagccacggtctggaaagtgtgcctgtccttcccgggagtggggaggccggtgtgagttttgatcttccagctcaggcagacaccttacacagtgcaaacaagagccgtgtcaagatgagagggaagcgtagaccgcagacccgtgcagctaggcggctggctgctcaggagtccagcgaggctgaggacatgagcatccccagaggacccattgcacagtgggctgatggcgccatttccccaaatggccatcggccacagctcagagcagccagtggagaagacagcactgaggaggccctggcagctgccgctgcaccttgggaaggtggtcctgtgcctggagtggacacaagcccctttgcaaagtctctgggtcattccagaggggaggctgacctttttgattctggggacattttttccacgggcactggatctcagtccgtggagagaacaaaacccaaggcaaagatagcagagaatcctgccaacccaccagtgggtggtaaagcaaagagccccatgtttcctgctctaggcgaggccagcagtgatgatgatctctttcagtctgctaaaccaaaaccagcaaagaaaacaaatccctttcctctcctggaagatgaggatgacctctttacagatcagaaagtcaagaagaatgagacaaaatccagtagtcagcaggatgtcatattaacaacacaagatatttttgaggatgatatatttgctacggaagcaattaaaccctctcagaaaaccagagagaaggagaaaacattggaatctaatttatttgatgataacattgatatctttgctgacttaactgtaaaaccaaaagaaaagtccaaaaagaaagtggaagccaagtctatatttgatgatgatatggatgacatcttctcctctggtatccaggctaagacaaccaaaccaaaaagccgatctgcacaggccgcacctgaaccaagatttgaacacaaggtgtccaacatctttgatgatcccctgaatgcctttggaggccagtag

SEQ ID NO: 134691 - DNA, 3152 bp, Homo sapiens
atggccacagctccatcaccccccatgctgactctggctcctgcctggctctgcccggccaccacaacccctcgggaccattcagaggcatcactggaggcgcttcctggggatccacccgctcatcctgcagccgccgcaactgcagccgccgtcatcccggccctggagcccccacacacccctgtgtatgcaatatttgttaaccattcccttttggatctatacattgatcgtcctttaccatatctcattgggtcaaagctgttcatggaacaagaagatgtaggtcttggagagctgtccagtgaagaaggaaatgctgatgaacagagcagcggcttagaaggtgcgtgcaaagtgaatctggagttgctactcactaatgctgacaaagggttgaaagctccagagcagcatctcaagcatgttgcaggagtgctgaatggggaatcagtagagacttcagttcttaactaccgggaattaagtcctcacaagaatagactcttgtcacctcttcgctgttctgcaccaatgtcgctacataattctctggtgaaaccagagagacagtccaaatgttttgagtttgggaagctacagccttcttcttctcagtcactggatgttcaaaacataactgattcttctttctctaggactacttgctttcaaggtgttaaagttgattcacttgggaaaagatctgatgttatttccaaagttgaggctcgggatatcacagaaatgactaacaaggcttccaaagagcctgttggttgtgtaaataatatcagttttcttgcctcactggccgggagcacaagcagaaatagattacagagcacacgtggggcaggcaggcttcagaactctggaactgggctgtctacaaacctccagcattttcaggaagaaaactttaggaaaagttctccccagttagaacatacaggagtttttttggcctcctgcaagagacggcagaccgtccaggacttgaaagctagtgttttagaaagagtcgccatttgtcttcaccacggggctgaaagggtccgcgaaccccgacgcgtacttccaccccgtggactgttgatagctatggtccaacagatgattgaattaaaggtaactcttataagggctcagaaagaaaagaggagagccagagagaaagcctccatattcttacagaatacatatatcatcatcaacagaatgttcgtgggcatgatggactttaaaggcccgtctggtgaagtcttaggtagaaatgcagaacaggtttccaccgtgcacattacgaagaacagaaatggaggtgggagtttaaataactattcctcctccattccatcgactcccagcacccagccaggagggaccctcagttcagtgttcctcccactgccaacacacccacgcccgtttgcaagcggtccatgcgctggtccaacctgtttacatctgaggaaaggggagtgacccaggacaaagagagggaaagccccgggaggaatcatggttgacaccatcggggaggcgggcagagccattcccattaaacagggcatgctcttaaagcgaagtgggaaatggctgaagacatggaaaaagaaatacgtcaccctgtgttccaatggcatgctcacctattattcaagcttaggtgattattatgaagaattattcataaaaaaagagattgaccttcagacatctaccaatcaaaagtcccaggaaaagtggccatccctagccacatcggcctgcacacccatctccagctctaaaagcaatggcctatccaaggacattggacaccgggctgggtgactccatatgcttcagccccagtatctccagcaccaccagccccaagctcaacccgcccccctctcctcatgccaataaaaagaaacacctaaagaagaaaagcaccaacaactttatgattgtgtctgccactggccaaacgtggcactttgaagccacgacgtatgaggagcgggatgcctgggtccaagccatccagagccagatcctggccagcctgcagtcatgcgagagcagtaaaagcaagtcccagctgaccagccagagcaaggccatggccctgcagtcgatccaaaacatgcgtggggaacgcccactgtgtggactgttgaggacccagaatcctaagtgggccagtttgaacttgggagtcctcatgtgtattgaattgctcaggtatccaccgcagtcttgggcacccgccttttcccgtgttgcgatctttgggagctgggatggattggccagtttgagctcagggaaggttatgttcatctattgggcaatgaccctagccaacagcatcttgggaagggagcagccaggggcagacaaaaccctcagaaaagtccacgagggaagagaaggaacggtggatccgttccaaatatgaggagaagctctttgctggcccccactaccctgcactgaagctgtcccctgggccagcagctgctgcgggccaccactgatgaggacctgcagacagccatcctgctgctggcacattggctcccgtgaggagggtgaacgagacctgtgggggagggagacggctgcacggcgctccatctggcctgccgcaaagggaaatgtggttcctggcgcagctcctgaatctggttacggggtggacgtcatggcccgagatgcccaacggggaacacagcgcctgaccctacgccccggcaggccctccagcccaggagtgcatccaacgtgcttctgcaagtacggctgccccgacggagtgtgtgtagtatctggttttatttgactgcagtcttccttggtgcaaaaacaaaatgggaaaaataaggaatacctcagaatttcaaaaaggaaatcccaaattcagctaataatagcattttcagtactttttcgtaaactaagtaaatacacaaaattgtttgattttttctgaccataagacatattttatgtccttctggccaaggtggatttgttagactcaggccctcctggccacattgcccaagtcacacaggcttctgtattatgtatttagataaaatgtgtgaaaatatatttgaaaaaaaatttcataaatatgcattgatttttgt

SEQ ID NO: 134692 - DNA, 1179 bp, Homo sapiens
atgtttgcagaatatgccggaagttacgagaaagatgatcgccaggagcaactcgaccgtcaaccggtcggcaccggtagtggtggatttaggctccggcggcaccggacgtctgtcgaaactcctgaccggggaatgcgacgttctggcctggcctgctgccagaccagctatcacatttgtggcggtgcacaccaccacgacggcattggcgatattcaaccgcctgcgttcctggcgatgaacgtcgcctatctggcatttaacaccgccaaaccgccgctaaataatcccgctgtccgccatgcgctggcactggcgattaataaccagcgcctgatgcaatccatctattatggtacggctgaaacggcggcctctattttaccgcgcgcctcgtgggcctatgacaacgaggctaaaattactgaatacaatccggcgaaatcgcgcgaacagttgaagtctccactgaaaactgccgaactgattcaggcggatatggcgcaggttggcgtaaaagtggtgattgtgccggtagaaggtcgctttcaggaggcgcggttgatggatatgagccatgatctgacgttatccggttgggcgacggacagtaacgacccggacagtttcttccgtccgttactgagctgcgcggcaagtcattcgcagaccaacctcgcccactggtgcgatccgaaattcgacagcgtattgcgtaaggcgctctcttcgcagcagctggcggcgcgtattgaagcctatgacgaagcgcagagtattctggcgcaggaattgcccattttgccgctggcgtcgtcattgcgtttgcaggcctatcggtacgatatcaaaggtctggtacttagcccgtttggtaacgcctcctttgctggggtgtatcgcgagaaacaggatgagagtgccagagaaccgttgcttttccgagttgctcttcttccaggctccgttggtggtcggcatggcccgcagaagaaagaagataaatcagcagaaggtgtaagcatccgatattatatttcatcaaaggatatggatgctaaagaatttgcacatgctatcagagcgcactggctgatcgagcacagtcttcattgggtgttagatgtaaaaatgaatgaagatgccagccggataagaagaggaaacgcagcctaa

SEQ ID NO: 134693 - DNA, 570 bp, Homo sapiens
tttcgtcctgggtcgcgcagtgcggggatccctgcttcagttggcagagagagagctcgcggttggttccggtccggcttttcaggccggacgggtgcctgcccctcaggtgcgagtttgtgcggtaaagaacacaccccggagatgtggaccacggcccgccccaggagggtccttgtttggaggtggaaatcaacgagaacttgcccgccagaaaaacatgaagaaaacccaggaaattagcaagggaaagaggaaagaggatagcttgactgcctctcagagaaagcagagggactctgagatcatgcaagaaaagcagaaggcagctaatgagaagaagtctatgcagacaagagaaaagtgatgactggctatttggaaaacctgggtgctactgccaactgggtgtatcataagctctaagatcaagattttgtagagtggacagtcattacatatgttataacttatcctttaaaaactattttaaactttatcctttcagctttacttagtgcgatgttttagaagcagtcttcaaagaataaaacactaaccatgcatgtg

SEQ ID NO: 134694 - DNA, 861 bp, Homo sapiens
cgctgaattcccggctcgacgatttcgtggcctccagcgggcggagccgttggcggagcagagcggaggcgcagccgggcggagggcccacgagggctcagccttcccggtcagcggtggtgacggtatcccagagtgccagagaaccgttgcttttccgagttgctcttctttcaggctccgttgggggtcggcatggcccgtggaaatcaacggagaacttgcccgccagaaaaacttgaaggaaaccccaggaaatttgcaaggggaaaggggaaggaggatagcttgactgccctttcaagaaagcagagggactctttagatcattgcaaaaaagcagaaggcagcctaatgagaagaagtcctatgcagacaagagaaaacgtgatgactggctatttggaaaacccgggtgctactgcccaactgggtgtatcataagctcgtaagatcaagattttgtagagtggacagtcattacatatgttataacttatcctttaaaaaactattttaaactttatcctttcagctttacttagtgcgatgttttagaagcagtcttcaaagaataaaacactaaccatgcatgtgacatattggtgaacattatttttattattgaacattcatatataatttattaggtaatatgatcagataataggatctcttatataataaagaatctttgtcatcagctttgttaacatagtttttttttcctcacagtttctaaggataaggataaagtagatctttgaagtaaacttaaatatataatagaagttagggtccatttgtataattttgctttgaaatcaagttaaagggccaggtgcggtggcttatgcccac

SEQ ID NO: 134695 - DNA, 747 bp, Homo sapiens
ctacggatttattcttattgcccaggcttgagtgcaatggcgtgttctcagcttactcaacctccgcctcttgggtttgggtaattgttgtgcctcggcctccctctgcctcttgggcttgggcgattgttccacctcatccaccctccgcctcttgggtttcggtgattgttccacctcatccaccctccacctcttgggtttgggtggtttttccacctcggcctcctgagtagctaagggaggagtcttgagattatcatccactgagggtggaagaggagagggtggaagcgggacaaagagacattccttcagattatcatccactgagggtggaagaggagagggtggaagcgggacaaagagacattccttcagattatcatccactgagggtggaagaggagagggtggaagaggagcaagaggacactccttgatattatcatccactgagggtggaaggggagtgagcagacactcaggaggtgtcttgaggctcagggagttatcagttatagaatgttgttgagttggaggaggtggctggcggcccatcctgttttttaaagtttcagctgtgaggtagagccagtagggcaatcctgaagaatgacgatgctccgctgccgccattctgacccagttgcaaagaggctttcttgcagaaggggggataggggtgggctgatggctgataaatcccagcaggagccaaatgaggagccaaaagcgcagccgcat

SEQ ID NO: 134696 - DNA, 256 bp, Homo sapiens
atgatggtggtagaagcactatgtgaacttcattgtcctgaagctatacagggaattgctgactggacatcatctattgttggaaaaaaacttatgtggattaactcagtggctcaacaggctgaagggaggtaccttgccgaatggatggtacatggttatccctcagaaaacgtttgggaattggacctgaaacgttttggagccctccagagcagccgcacctttctgcgccaccgggtcatggaagtcatgc

SEQ ID NO: 134697 - DNA, 509 bp, Homo sapiens; identical to SEQ ID NO: 115289

SEQ ID NO: 134698 - DNA, 706 bp, Homo sapiens
  misc_feature (1)...(706): n = a,t,c or g
attcgccctcctgcangaattcggcacgagctgaaatacgttttctaggtagagatagattgtgtaagggtacagttatgaggataacagaaacgtggcagattatttaaaatcatcctgaaagtggtgctttatctgatgaaagtgattgtaatccataggaaaatgtttcaacgtgcgcaagagttgcggtggcgggcagaggactaccacaaatgcaaagctttttcagatcaccccctctgcaagaaagcctctttgcaactgggtcagaatggcggcagcggagcatcgtcattcttcaggattgccctgctggccctacctcacagctgaaactttaaaaaacaggatgggccgccagccacctcctccaactcaacaacattctataactgataactccctgagcctcaagacacctcccgaatgtcttcttattccctttccaccctctcctcttccaccctccgtggatgataatctcaagactcctcccttagctactcaggaggccgaggcagaaaaatcactgaaacccaagaggcagaggttgagtaagctgagaacaggtcattgcactcaagcctgggcaataagaagaaatctgtgagtggaacaaaagaaaaaaatcaaaaaacaaaacaaaacccacactccaaaaacaaactaacaaagaataaataaataatataaaaaaaaaaaa

SEQ ID NO: 134699 - DNA, 947 bp, Homo sapiens
aaaaaactcacacttattctaggaacttttaagatttttaaaaattcagaatgttgtctttgctttcaggtatcattcgaagtctcgcaggtcacacattaaaccctgatcaggatgttagtcagtggacaactgcagacagtgatgaaggccatggtaacaaccaacttagacttgttcttcttctgcagtacctggaaaatctggagaaattaatgtataatgcatacgagggatgtgctaatgccttaacttcacctcccaaggggaatgaattggaagtaagcattatgatggtggtagaagcactatgtgaacttcattgtcctgaagctatacagggaattgctgtctggtcatcatctattgttggaaaacatcttctgtggattaactcagtggctcaacaggctgaagggaggtttgaaaaggcctctgtggagtaccaggaacacctgtgtgccatgacaggtgttgattgctgcatctccagctttgacaaatcggtgctcaccttagccagtgctgggtgtaagagtgccagcctgaaacattgtctgaatggaaacaaagcatgtgagtgctacatctcaactgccgattgggctgctgtgcaggaatggcagaacgctatccatgacttgaaaaagagtaccagtagcacttccctcaacctgaaagctgacttcaactatataaaaaatgtggtaaagtacttgaagcaaacatcccgcatcgctattggacctctgagactttctactttaacagtttcacagtctttgccagttctaagtaccttgcagctgtattgctcgtctgctttggagaccacagtttctaacagactttcaacagaggactgtcttattccactcttcggcgaagctttacgttcatgtaaacagcatgacgtgaggccgtggatgcaggcattaaggaagtga

SEQ ID NO: 134700 - DNA, 683 bp, Homo sapiens
atgcgggtgctgtggatgctcttttggctcctcttttggctcctgctggaatttatcagccatcagtccacctgtgttatcaatactctggctgaccatcatcatcgtgggactgactttggtggaagtccttggttacgtatcattattgcatttccgagaagttataaagttgtccttaccctctggacagtttacctttggttgtctttcctgaagactatcttccagtctgaaaatggacatgatgtatccacagatgtacagcagagagccaggaggtccaaccgccgtagacaggaaggaaataaaattggcctgaaagacgtcattactctacggagacatgtggaaacaaaaggtagagctaaaatccgtaagatgaaggtgacaacgaaaatcaaccatcatgacaaaatcaatggaaagaggaagaccgccaaaaaacagtaagatgtgccttgacacaaatactgttgtaggaaccatgtgccaatcaaagtagacaactgtaaagtccttgagaatattttctacaatatttgtggcaaattcagtaggttcaaaattgagtttgtcctttctgcttcattagtttaagctgtataattcctttcccttcctacattcttgtttgtcattttttcgggggaagaggagttgctagtactggcattggtttt

SEQ ID NO: 134701 - DNA, 1490 bp, Homo sapiens
  misc_feature (1)...(1490): n = a,t,c or g
aaccctctcccagttcccctgcagctcttcaggaatccacatctctgcagagctctttgttctcatgggtggcacctccagagtgaagaagatcctttatcaagaagggaaacaggggaaatgagagggtcctgcaggcagagctggaatcaacttccactctgcctcttgcaagctgtgtgaccccgggcacaatttctccttcctctggtaacctctgttttcttagatttggagcagggtggtcacactgaccttgcagagttccgagaatcagagacagaacataaaaggcctggaaaacattctccaaaaagaagctgcaacatgtgtggacaatgggcttttcatgcctctcttactgtctgttgacctggtgcaagaaacatgctctggtgatggctgtgagggaggaatgaggatagacatagacactcctgtgtctcaaacatagcttctttattactctgttatgactctgtcttccctggggcaggaccccagcctgcctacatttgcagacagacacagtggcatgtggagacaacagtgtgtcccaaagacttttctttaccccctagctgtcggcagtactcagtggatatggtgatattatgacactgatactgctattttgaaacctggaggatggaaaggtgcaaaaatctatcaccagcaacagaaggtgcagactgtgttgggtggcggtaattttgtccatcaaatgaatatgtgtgaaaacattccctcctttggccctacaggtcagaatggcggcagtggagcatcgtcattcttcaggattgccctactggccctacctcacagctgaaacttttaaaaaacaggatggggccaccagcccacctcctccaactcaacaacattctataactgataactccctgagcctcaagacacctcccgaatgtctccttcatccccttccaccctcagtggatgataatatcaaggagtgtcctcttgctcctcttccaccctcagtggatgataatctgaaggagtgtctcctggtccctcttccaccctctcctcttccaccctcagtggatgataatctgaaggactgtctctttgtccctcttccaccctctcctcttccaccctcagtggatgataatctcaagactcctcccttagctactcaggaggnccgaggcggaaaaacccaccccaaaccccaagaggtggagggtggatgaggtggaacaatcaccgaaacccaagaggcggagggcggatgaggtggaacaatcgcccaagcccaagaggcagagggaggccgaggcacaacaattacccaaacccaagaggcggaggttgagtaagctgagaacacgccattgcacttcaagcctgggcaataagaataaatccgtgggtcggaaaaaaagaaaaaaatcaaaaaacaaaacaaaacccacgctccaaaaacaaactaacgaagaataaataaataatataaaaat

SEQ ID NO: 134702 - DNA, 695 bp, Homo sapiens
gggaaatgacagggtcctgcaggcagagctggaatcaactgccactctgcctcttgcaagctgtgtgaccccgggcacaatttctccttcctctggtaacctcggttttcttagatttggagcagggtggtcacactgaccttgcagagttccgagaatcatagacagaacatataaggcctggaaaacattctccaaaaagaagctgcaacatctgtcggcagtactcatgggaagggtgatattatgacactgatactgctattttgaaacctggaggatggaaaggtgcacaaatctatcaccagcaacagaaggtcagaatggcagcagcagagcatcgtcattcttcaggattgccctgctggccctacctcacagctgaaactttaaaaaacaggatgggccaccagccacctcctccaactcaacaacattctataattgataactccctgagcctcaagacaccttccgagtgtgtgctctatccccttccaccctcagcggatgataatctcaagacacctcccgagtgtctgctcactccccttccaccctcagctccaccctcagcggatgataatctcaagacacctcctgagtgtgtctgctcactccccttccaccctcagcggatgataatctcaagaaactaaggaagaataaataaataatataaaaataaaatgaaa

SEQ ID NO: 134703 - DNA, 2514 bp, Homo sapiens
agggtcagtttttaaaggaaaaacaactaactaccttgcaagcttgctagcaggtttaagtgtaataatgtgtgggaatgactgcaccgtgactaacatgcagtgacagcttaattaatgttaacccttatcattatcatataagaatgtgagttacataagagaggagtcctgtcagttcgttctctgctgtgtccccaagaccatgaatcatggctggcatgtagtaggcatttaataatatatgttcaacaagtatttggcagtcttggagggcagaaaaggaggtggggaagatttttaaataacattttttaaaaagtcacattgtcctacaataccgatttttcttgcatatttaggaaattgagggtttttttctaaaacatgcggacatatgggaaataggatgcaacatttgcactaatgtttcagacacagttagaggtttccaagagattttgcgctggggaggctgcttgctacaagctcccaaagctctgggaggacatagtattcattcctccctcagcagaagcggtgaggcaagaggctctggggagcacccagcgttgggcttttagcatagtgtgtcaggtcttcatagtttgggcccagggcacagagaagtcacagctctccggcatcctgtgacctttaccctctttgccaagggaaaatgtggcccaccaaagcaagaaacttgagggcatgggtcaccccagccctggcatctgcccagagcccgagaaggaaggaacaatgatcctccagctacctcacggggctggcacaggtgaccactgccctggcatcacccagctgtgtccggcagcctgaaccccatctgtggggatgcgaggaggaaaatacaaaagtccttaggtgaacactgagaaggcagatgcagcagaaacctccaggccagaactacccagtcttggacctatggtggagatagagcatagctggcgatcatgtgtacttacactctaaggtcacctggttgcactatggcctcatctgtggctctgaaaatgaagatttggaaggagatcatcacagctaatgtttaacaagcccctcctgtgtgccaaatcattcacccctcaccacaaccgaatgagctaaggattctcattatatatagtttatggagagggaagtgcagacataaagaggtgaattatcttacccagatcacacagctgataagtggtggaggcagaatagaatctaaacagtgtggctccggagcccacatgcattgattcgacaagtgtttattgagcacctgccgcggacaaggccttgtgtgattaaatagggttataattagtaatataaaaatgagaaatcactaatgctttttagacttaacattttgtttttttgtaggtttcaggcacagaactgtatatccaataatagtgaaatggatcccactaattatgacagaaatgatgatacatttaaatgacttggatgttttataggtatgatctcgtgaaatcttgagagaaactgaatgacgaatgaaactattgttcctgtttcacacagaagaaaactgaggttaaaaggggtaaagtaattttgcatggcatgaagtagaaattcaaagtacaggaatttgaacttggttctgtccttttctgaagcccttgaccactatagactcaaacatcaccttgtttttccactcattcaacacttttttttttaaattatctaataggttggcactcatcatgagcccctgttctcattctgcaaatgggtgaagctctctattgtcctgaccccacagttcctgtcccatgaccaggggccagctcaccaagggagctggcagcaggcatgttaaagttcagtggacatggccccatggcgagttacctgagggaagggttgagttgaggtggcaggacaggtggggggcctgggtgcctttggaggcaggttccccggggtctcaggctggcccacacatctcataggcgggtgatgctgggggaagcttacgcagttcacagtactggcttcttcctctttttctttccatacaagtggcttagggatggggtagagtagttgacttatttggatgaaaaccactatcttctgtcagaaacttcaaaaggaatcattgctgggctggtaacctaaagaaaaacaaccagacaagtgcccaacgacacttaaaaaggtgatttattatcttgccaagtttaggctgggcatggtgactcgtgcctctaatcccagcattttggggggctgaggctggtggatcaccggaggccaggactttgaggccagcctgaccaatatggcaaaacctcgtccctgctgggggtacaaaaattagccgggcatggtggtgtgagcctgtagtcccagctactcaggaggctgggacaggagaattgcttggattcgggaggtgggggttttagtgggccgagatcacgccattgcactccagactgtgcgacagagcgagactctgtc

SEQ ID NO: 134704 - DNA, 1862 bp, Homo sapiens
agatcatcagctattgttagtgttagtgtatgttatgtgtggctcaagacaactttgcttcttttaatataggcagggaagtcaaaagattggatatccctgctttataccaagaaagacaacaccccacatttgcaatgcctgaaaacactaccagccatctgaaaaacatgagacttctctaacttctgttcttttttgtagcagtggaatcccacggtgatatctgagggatgtggttaccttttggaggaggttgacggtttctaaggatgattctttctgagtgaaatattgtcagtgtcattgaccttttcattatttcaactattattattccaggttatcaatactctggctgaccatcgtcatcgtgggactgactttggtggaagtccttggttacatgtcattattgcgtttccgccaagttataaagttgtcattaccctctggatagtttacctttgggtgtctctcctgaagactatcttctggtctcgaaatggacatgatggatccacggatgtacagcagagagcctggaggtccaaccgccgtagacaggaagggctgaggtccatttgtatgcacacaaagaaaagagtttcttcctttcgaggaaataaaattgtcctgaaagacgtcattactctacggagacatgtggaaacaaaagttagagctaaaatccgtaagaggaaggtgacaacgaaaatcaaccatcatgacaaaatcaatggaaagaggaagaccgccagaaaacaactctctcaacattcaatttctcatgtgttggctttttcagatccccccttctgcaagaaaggctctttgcaactggctccaccctcagcagatgataatatcaagatacctgctgagcgtctgcggattccgcttccaccatcagccgatgataatctcaagacaccttccgagcgtcagctcactccccttccaccctcagctccaccctcagcagatgataatatcaagacacctgccgagcgtctgcgggggccgcttccaccctcagcggatgataatctcaagacaccttccgagcgtcagctcagctccccttccaccctcagctccaccctcagcagatgataatatcaagacacctgccgagcgtctgcgggggccgctttccaccctcagcggatgataatctcaagacaccttccgagcgtcagctcaacttcccctttccaccctcagctccacccttcagcagatgataatatcaagacacctgccgagcgtctgcggggggccggcttccaccctcagcggatgataatctcaagacaccttccgagcgtcagctcactcccctttccaccctcagctccaacctcagcagatgataatatcaagacacctgccgagcgtctgcgggggccgcttccaccctcagccgatgataatctcaagacacctcccttagctactcaggaggctgaggcagaaaaaccacgcaaacccaagaggcagagggcggctgagatggaaccacctcccgaacccaagaggcggagggtcggtgacgtgggaaacgtcagcgcaaacccaagaggcggagggcccgctgacgtggaaccatcatcacccgaacccaagaggcggagggtcggtgatgtggaaccgtcacgcaaacccaagaggcggagggccgctgacgtggaaccatcatcacccgaacccaagaggcggaggttgagctgagaagaggccagtgcactcaagcctgagcaataagaataaaaccgagtagaacaaaataaaaaattcaaaaaacaaaacaaaacccacactccaaaaactaacaaagaataaataaataatataaaaat

SEQ ID NO: 134705 - DNA, 1203 bp, Homo sapiens
aggactgcagtattcattttatttttatattatttatttattcttccttagtttcttgagattatcatccgctgagggtggaaggggagtgaagcagacacactcaggaggtgtcttgcagattatcatccgctgagcgtggagctgagggtggaacgcgagtgagcagacactccggagctgtcttgagattatcacccgctgagggtggaaggggatagagcaggcactccgcaggtgtcttgagattatcatccgctgagggtagaactgggtagagctgagggtggaagggggagtgagcagacactcggaaggtgtccttgagattatcatccgcttgaaggtggaaaggggattagagcacacacttcggaaaggtgtctttgaggcctcaggggagttatcaatttatagaatgttggttggagttggaggaggtggctggtggccccatcctgttttttaaagtttcagcttgtgaggtagggccaagtaggggcaatcctgaagaatgaacgatgctaccactgccgccattgctgaacccggttggcaaagaaggctttccttgcagaaggggtgattttgcatctgtagtagtcctctgcccgccgccgcaacgcttgcgcacgttgaaacatttcctgttctttggcggtcttcctctttccattgattttgtcatgacggttgacttttgttgtcaccttcatcttacggattttagctcgaactttggtttccacctgtctccataaagtaaagatgtcttccaggacaattttaattccttcctgtctacggcggttggacctcctggctctctgctgtacatccgtggatccatcatgtccattgtgagacgggaagatagtcttcaggaaagacacacaaaggtaagttgtgcagagggagatggcaaatttataacttctcagaaacacagtaatgataagtaaccaaggacttccaccaaagtcagtcccacgatgacgatggtcagccagagtattgataacccaaaggtaagttgtgcagagggagatggcaaatttataacttctcagaaacacagtaatgataagtaaccaaggacttccaccaaagtcagtcccacgatgacgatggtcagccagagtattgataacctcagcgtggaggcctgagaacgtgaggaaggagctgtccagcacggacgag

SEQ ID NO: 134706 - DNA, 5810 bp, Homo sapiens
  misc_feature (1)...(5810): n = a,t,c or g
gtttcattttttatttttattttttattgtttgagatgtttgaaaaaccaagagaaaaccaatgtaagaagactaggcttttaacttttttttgtttttgttgttttttttttttaatggacagtcaactgtatattttgtgtttcaggaaactgttaatgacttgggctttggaagtagctgttgtaatgaagaagtccgaaacatatgcacctttattctgtcttccgtctttccataaattttgcaaaggccttttagccgacactctcgttgaagatgtgaatatctgtctgcaggcatgcagcagtctacatgctctatcctcttccttgccagatgatcttttacagagatgtgttgatgtttgccgtgtccaactagtgcaccgtggaacttgtattcgacaagcatttggaaaactgttgaaatcaattcctttaggtgttttcctaagcgataacaatcacacagaaattcaagaaatttctttagcattaagaagtcacatgagtaaagcaccaagtaatacattccacccccaagatttctctgatgttattagttttattttgtatgggaactctcatagaacagggaaggacaattggttggaaagactgttctatagctgccagagactggataagcgtgaccagtcaacaattccacgcaatctcctgaagacagatgctatcctttggcagtgggccatatgggaagctgcacaattcactgttctttctaagctgagaaccccactgggcagagctcaagacaccttccagacaattgaaggtatcattcgaagtctcgcaggtcacacattaaaccctgatcaggatgttagtcagtggacaactgcagacagtgatgaaggccatggtaaccacccaacttagacttgcttctcttctgcagtatctggaaaatctggagaaaattaatgctaaatgctcacgaggcgatgggctatatggcttaactttaccctcctcaaggctattaaaaacttttttgtataccaatcgccaaacttgtcaggactggctaacgcggattcgactctccatcatgagggtaggattgttggcaggccagcctgcagtgacagtgagacatggctttgacttgcttacagagatgaaaacaaccagcctatctcaggggaatgaattggaagtaagcattatgatggtggtagaagcactatgtgaacttcattgtcctgaagctatacagggaattgctgtctggtcatcatctattgttggaaaacatcttctgtggattaactcagtggctcaacaggctgaagggaggtttgaaaaggcctctgtggagtaccagggaacaccctgtgtgccccatgacaggtgttgattggctgcatctcccagctttgacaaatcgggtgctcacccttagcccagtgctggggtgtaaggagtgcccagcctggaaacattgtctggaatgggtgaatcccagaaaaagtgtgctgtcccaaacccgacttgactcttccccctgagggttattaaattatttaggaaacaaagcatgtgagtgctacatatcaactagccgattgggctgctgtgcaggaaatggcagaacgctatccatgacttgaaaaagagtaccagtagcacttccctcaacctgaaagctgacttcaactatataaaatccattaaggcagctttgagtctggaaaatttgtcaaatgtacccgagcaattagaattgttaccaggacgaaaatatcaatctacttgctggaggatcaaaagaaaaaaatagacatgaaaaaactgcttcgtaacatgtgaagtccagatccaagggaacctcagaaatccattgaagttccattgttaagaagttctgtttgtttggcaactgctttaaaacccgatagaacaagatcagaagtggcagtctataactgaaaatgtgttattgtacttgaagcaaacatcccgcatcgctattggacctctgagactttctactttaacagtttcacagtctttgccagttctaagtaccttgcagctgtattgctcgtctgctttggagaccacagtttctaacagactttcaacagaggactgtcttattccactcttcggcgaagctttacgttcatgtaaacagcatgacgtgaggccgtggatgcaggcattaaggtatactgtgtaccagaatcagttgttggagaaaattaaaggtatgatctcgtgaaatcttgagagaaactgaatgacgaatgaaactattgttcctgtttcacacagaagaaaactgaggttggcactcatcatgagcccctgttctcattctgcaaatggtgaagctctctattgtcctgaccccacagttcctgtcccatgaccagggccagctcaccaaggagctgcagcagcatgtaaagtcagtgacatgcccatgcgagtacctgaggaaggttatcaatactctggctgaccatcatcatcgtgggactgactttggtggaagtccttggttacatgtcattattgcgtttccgacaagttataaagttgtcattaccctctggatagtttacctttgggtgtctctcctgaagactatcttctggtctcgaaatggacatgatggatccacggatgtacagcagagagcctggaggtccaaccgccgtagacaggaagggctgaggtccatttgtatgcacacaaagaaaagagtttcttcctttcgaggaaataaaattggcctgaaagacgtcattactctacggagacatgtggaaacaaaagttagagctaaaatccgtaagaggaaggtgacaacgaaaatcaaccatcatgacaaaatcaatggaaagaggaagaccgccagaaaacagaaaatgtttcaacgtgcgcaagagttgcggcggcgagcagaggactaccacaaatgcaaaatccccccttctgcaagaaaggctctttgcaactgggtcagaatggcggcagcggagcatcgtcattcttcaggattgccctactggccctacctcacagctgaaactttaaaaaaacaggatgggccaccagccacctcctccaactcaacaacattctataactgataactccctgagcctcaagacacctcccgagtgtctgctcactccccttccaccctcagcggatgataatctcaagacacctcctgagtgtctgctcactccccttccaccctcagcggatgataatctcaagacacctcccgagtgtctgctcactccccttccaccctcagcggatgataatctcaagacacctcccggagtgtctgctcactccccttccaccctcagcggatgataatctcaagacacctcccgagtgtctgctcactccccttccaccctcagctccaccctcagctccaccctcagcggatgataatctcaagacacgtgccgagtactctgctccatccccttccaccctcagcggatgataatctcaagataccttccgagcatcagctcactccccttccaccctcagctccaccctcagcagatgataatatcaagacacctgccccgcgtttgccgcgggccgcttccaccctcagcggatgataatctcaagacaccttccgagcgtcagctcagctaccccttccacccctcagctccaccctcagcagatgataatatcaagacacctgccgagcgtctgcgggggccgcttccaccctcagcggatgataatctcaagacaccttccgagcgtcagctcagctccccttccacccttcagctccaccctcagcagatgataatatcaagacacctgccgagcgtctgcgnggagcgtctgcgggggccgctttccaccctcagcggatgataatcttcaaggacaccttccgaggcgtcagctcaacttcccctttccaccctcagcttccaccctcaggcagatgataatatcaagacacctggccgaggcgtttgcggggagcgtctgcgggggccgcttccaccctcagcggatgataatctcaagacaccttccgagcgtcagctcactccccttccaccctcagctccaccctcagcagatgataatatcaagacacctgccttccaccctcagcggatgataatctcaagacaccttccgagcgtcagctcactccccttccaccctcagctccaccctcagcagatgataatatcaagatacctgctgagcgtctgcggattccgcttccaccatcagccgatgataatctcaagacaccttccgagcgtcagctcactccccttccaccctcagctccaccctcagcagatgataatatcaagacacctgccgagcgtctgcgggggccgcttccaccctcagcggatgataatctcaagacaccttccgagcgtcagctcgactccccttccaccctcagctccaccctcagcagatgataatatcaagacacctgccgagcgtcatgcgagggccgcttccaccctcagcagatgataatctcaagacaccttccgagcgtcagctcactccccttccaccctcagctccaccctcagcagatgataatatcaagacacctgccgagcgtctgcgggggccgcttccaccctcagcggatgataatcatcaagacaccttccgagcgtcagctcactccccttccaccctcagctccaccctcagcagatgataatatcaagacacctgccgagcgtctgcggggaagcttctgcgggggccgctttccacccttatcggatgataatcttaaaacaccttccgagcgtgagctcactccccttccaccctcagctccaccctcagcagatgataatatcaaggacacctggcgagccgtctgcggggggccgctttccaccctcagcggatgataatctcaagacaccttccgagcgtcagtaacctcccccttccaccctcagctccaccctcagcagatgataatatcaagacacctgccgagcgtctgcgggggccgcttccactccttagcggatgataatctcaagacaccttccgagcggcagctcactccccttccaccctcagctccaccctcagcaagatgataatatcaagacacctgccgagcnttctgcggtgggccgctttccaccctcagcccgattgataatctcaagacaccttcccttagcttactcaggaggctgaggccagaaaaaccacgcaaaccccaagagggcagaggggcggccttaagatggaaccccaccttccccgaaccccaagagggcggaggggtcggtgacgtgggaaccgttcaaggcaaacccccaagagggcggacgggccgttggaacgtgggaacccttcattcacccgaaccccaagagggcgggagggttcggtgatgtgggaaccgttcacggcaaacccaaggagggcggaggggggggggggggggcccccccggcttgaancggtggaacccatcatcacccgaaccccaagaggcggagggtcggtgaccgtggaacccttaacgcaaacccaagaaggcggagggccgctgacgtggaaccatcattacccgaacccaagaaggcggaggttgagcttgagaagaggccagttgcactcaagccttgagcaataagaataaaaccgagttagaacaaaataaaaaattcaaaaaacaaaacaaaacccacactcttaaaactaacaaagaataaataaataatataaaaataaaataaatactgcagtccttaaaaaaaaaaa

SEQ ID NO: 134707 - DNA, 3630 bp, Homo sapiens
atttttcacattggccagtgtaaacttttaagtttacaggtgctttgttatcttttcttacagggttacgactcactgattaaaaagagggactttttcaaatactttgcacttttgattgtgtattatggataccaaggaagagaagaaggaacggaaacaaagttattttgctcgactgaaaaagaaaaaacaagccaaacaaaatgcagagacagcctcagctgtagctacaaggactcatactgggaaggaagataataatacagtagttttagagccagacaagtgcaacattgctgtgggaagaggaatatatgactgatgagaaaaaaaagagaaaaagtaatcagttaaaggagatcaggcgtacagaactaaagagatattatagtattgtagagttactgatggtcctgtgctgtcagcctcctgaacccccttcagatgctcttatgatagaaatagatggaggagagagctggtcgttcatggatgacaatcaaaacaaaacacatgataaaaaagagaagaagatggtggttcagaagccccatgggactatggaatacactgctggaaaccaggacaccctaaactccatagcactgaaatttaacatcactcccaataaattggtggaactgaataaacttttcacacatactattgttccaggccaggtcctttttgtgccagatgccaactctccttccagtaccttaaggctatcatcatccagtcctggtgctactgtctctccttcatcatcagatgcagaatatgataaattgcctgatgctgacttagcacgaaaggccttgaaacccattgaaagagtcttatcgtctacttctgaagaagatgagccaggtgtggtgaaatttttaaaaatgaattgtcgatacttcaccgatggaaagggtgtggttggcggtgttatgatagtgactcctaacaacatcatgtttgaccctcataaatctgatcctctggttattgaaaatgggtgtgaggagtatggtctcatctgccccatggaagaggttgtttccattgcgctctacaatgacatttctcacatgaagatcaaagatgccttgccatcgcctggagaatgggaagacctggcttcagaaaaggatatcaacccattcagtaagttcaaatctatcaacaaggaaaaacgacagcagaatggagagaaaattatgacttcggattccagaccaatagtacctttggagaagtccacaggacatacacctacaaagccctcaggcagctctgtgtcagagaaattaaagaaactggactcctctagggagacatcccatggttctcccacagtgactaagctcagcaaggaaccttccgacacttcttctgcatttgaatctacagccaaagaaaactttctaggggaagatgatgattttgttgacttggaagaactttcttctcaaactggtggtggaatgcacaaaaaagacaccttgaaggagtgcctttctcttgacccagaggaacgaaagaaagctgagtcacaaataaacaattctgccgtggaaatgcaggtgcagtcagccctagcctttttgggaacagagaatgatgttgaactgaagggggcgctagatttagaaacctgtgagaagcaagatataatgccagaagtggacaagcagtctggttcgccagaaagccgagtagaaaacacactgaacatacatgaagatttagataaagttaaactcattgaatattacctgactaagaacaaagaagggccacaggtatctgaaaatttgcagaaaacagaattaagtgatggaaaaagtattgaaccagggggaatagacattacccttagtagttctctttcccaggcgggtgatcccataactgagggcaataaagagccagataagacctgggtgaaaaagggagagcccctcccggtaaaactgaactcttctacagaagcaaatgtgattaaagaggctctagactcctctttggaatctactctggacaacagctgtcaaggtgcacaaatggataataaatctgaagttcagttgtggctgttaaagagaattcaggtacccattgaagatatacttccttcaaaagaagaaaaaagcaagaccccacccatgttcctgtgcatcaaagtgggaaaaccaatgagaaaatcctttgccactcacactgcagccatggtccagcagtacggcaaacggagaaagcagccagagtactggtttgctgttcctcgggagagggtggatcatttgtacacattctttgttcagtggtctcccgatgtctatggaaaagatgccaaagagcaaggctttgtggtggtggagaaggaagaactgaacatgattgacaacttcttcagtgagccaacaaccaagagctgggagatcatcactgttgaagaggcaaagcgcaggaagagcacatgcagctactatgaagacgaggacgaagaggtgctgcctgtcctacggccccacagcgcgctcctggagaatatgcacatcgagcagctggcccgacgccttccttgcaagggtgcaagggtatccatggagactggcctatagcacgttagagcacgggaccagcttaaagacgctctaccggaaatcggcatcactagacagtcctgtcctattggtcatcaaagatatggataatcagatttttggagcatatgcaactcatcctttcaagttcagtgaccactattatggcacaggcgaaacttttctctacacattcagccctcattttaaggtctttaagtggagtggagaaaattcatactttatcaatggagacataagttctttagaacttggtggtggagggggacgatttggtttatggctagatgctgatttataccacggacgaagcaactcttgcagcactttcaataatgatattctttccaaaaaggaagacttcatagttcaggatctggaggtgtgggcatttgattgaaattcagactgccttaaaatataacattaaaaagactgggttcgatcagccctcctaaagctggctggaaaaagaagccccagcccagcctgcctcatcccaccccaatgcttcctttctgccatcatctcagagcatgatcacattgcagaaagattctggaaggtccatgtagagggcagacattgaagaaaagaaacttaaaatccaggttgttgaaaagactttgtactcccacttcctccaaatccatacagtgaggaatcagagtgtttatagatatatgagttgaatgcaatttttatttttggtaactgtgaaaaataagatactgtggatatatacatgccttgtgtatttatcagcataattttcattaccaaaatgtacagctattatttgccatggaaaaggttagtctcatttagaaaaatcgaaagtgcacagcacttaaagggaatatatgaggttttttttttaaaaaaaaaaaacttttatttattatttgtagtatattgtctgaaatgtgtcggcagttttttttcttttaatgtgtcaaatcttgaaatattaaatgtatacattttgtgctaaaaaaaaaaaaaaaaa

SEQ ID NO: 134708 - DNA, 397 bp, Homo sapiens
aacgtgaagcgatgggaggccttgagaagaagaagtatgaacgaggctcggccaccaactacatcacccggaacaaagcccggaagaagctccagctgagcttggctgacccctcatgctctctggctgggccagtgggcagccctcgcttcccttggatggagctgccctgctggtgcctggtcagagaagaggcctctgtgcccagcctgattctctgctcccaggagccagtgacatgaggtgcagaggcccacccagccccctacctactgcccccattcatcctggctttccacagccccctcccacacagttggacccgtgattctcagggtgctgtgatggggtgagggtagggggagcatttgttattaaatgactggacttttgtgcc

SEQ ID NO: 134709 - DNA, 510 bp, Homo sapiens
  misc_feature (1)...(510): n = a,t,c or g
gccctggaaaagccagagattgaggggaaaaaccacaggggttgtcacggcgcctttaagtttgaggattaacaacggctggcccaagaggaagaaaattaggcccagcgcctggcccttattattattaaaaagcgggagaagtacctgtaccagaagatcatgtttggcaagaggcgaaaaatccgagaagccagccctgacccctcatgctctctggntgggccagtgggcagccctcgcttcccttggatggagctgccctgctggtgcctggtcagagaagaggcctctgtgcccagcctgattctctgctcccaggagccagtgacatgaggtgcagaggcccacccagccccctacctactgcccccattcatcctggctttccacagccccctcccacacagttggacccgtgattctcagggtgctgtgatggggtgagggtagggggagcatttgttattaaatgactggacttttgtgccaattgcaaaaaaaaaaaaa

SEQ ID NO: 134710 - DNA, 434 bp, Homo sapiens
  misc_feature (1)...(434): n = a,t,c or g
gaggcgaaaaatcccgagaggccaacaagnctggcggagaagcggaaagcccacgatgaggcggtgaggtctgagaagaaggccaagaaggcaaggccggagtgagtgcctgcggcccctcacagggctgaggcctgacccctcatgctctctggctgggccagtgggcagccctcgcttcccttggatggagctgccctgctggtgcctggtcagagaagaggcctctgtgcccagcctgattctctgctcccaggagccagtgacatgaggtgcagaggcccacccagccccctacctactgcccccattcatcctggctttccacagccccctcccacacagttggacccgtgattctcagggtgctgtgatggggtgagggtagggggagcatttgttattaaatgactggacttttgtgccaattgcaa

SEQ ID NO: 134711 - DNA, 356 bp, Homo sapiens
atggagttcatgcactacatcatcgctgctagtgccctgccacaaggtcttcctgtccatcaaaggcatttactaccagacatggactacagggtcatggccaccttcaccgagttctacagcaccctgctgggcttcatcaacttccacctctaccagtggctcaacctccactacccactgaagctcgagggtcaggcccaagaagaggcaaaggccagtgagggcacccatgcattggactctgagagctccatggagaaaatggctgccctcactgccagcctggcccgcgtggtggtgcctgccacagaggaggagcccgaggtggatgagtttcctgccaatggggagat

SEQ ID NO: 134712 - DNA, 2597 bp, Homo sapiens
atgaagctgccaaccttcaagtatgaacgaggctcggccaccaactacatcacccggaacaaagcccggaagaagctccagctgagcttggctgactttaggcggctgtgcattctgaagggcatttatccccatgaacccaaacacaagaagaaggttaacaagggttctacagcagcccgaacgttttaccttatcaaagacatcaggtttctcctccacgaacccattgtcaacaagttccgtgaatacaaggtgttcgtccggaagctccggaaggcttatgggaagagcgagtggaacactgtagagcgtttaaaggacaataagcccaactacaaactcgaccacatcatcaaggaacgacatgtccaagggatgagaggcatggaagacataacctacgctggcgaccggtggccaggcccagtcataagtgctgctgaggggaagcagcccccaccccgctccctgctccaccagggcagcttcggtttcccattttccattttggacctccctgtagagtgtctgtgcactaaagtttccaccttcaaagagagtcatagagcccctgactccgtctaccgtcgtgcaccacaaaatccgcacgtgggtcaaggctgggtctttgagcctagtgggcgcatcctggttaagtggttcctcctaggggctgtggtcagctgtggggaagctgctcctgccaggtatcccacgttcatcgattgccctgcgggacctgggacgattgccctcttccatgtgcttcctgttttccaactttcccgcggacttggcaagtgccacgtgcagaccattcagctgtgccgccggctcactgtggagttcatgcactacattatcgctgcccgtgccctgcgcaaggtcttcctgtccatcaaaggcatttactaccaggccgaggtactggggcagcccatcgtgtggatcactccctatgccttctcccatgaccacccgacagacgtggactacagggtcatggccaccttcaccgagttctacaccacgctgctgggctttgtcaacttccgcctttaccagttgctcaacctccactatcccccgaagctcgagggtcaggcccaagcagaggcaaaggccggtgagggcacctacgcgttggactccgagagttgtatggagaaactggcagccctcagtgccagcctggcccgcgtggtggtgcctgccacagaggaggaggccgaggtggatgagtttcccaccgatggggagatgtcagcgcaggaggaagaccgcaggaaggagctggaggcgcaggagaagcacaagaagctttttgagggcctgaagttcttcctgaacccgagagttgcccccgtgagcccctggctttcatcatcaggagttttggtggggaagtgtcctgggacaaatcttttgtgcattggggccacctatgacgtcacagactcccgcatcacccatcagattgtcgatcggcctgggcagcagacctcagtcattggcaggtgctacgtgcagccccagtgggtggtttgactcagggaacgccaggctccttctccccgtggcagagtacttctctggggtgcagctgcccccacacctttcaccctttgtgaccgagaaggaaggagattacgttccacctgagaagctgaagctgctggctctgcagcggggagaggacccaggaaacctgaatgagtcagaagaggaggaggaagaggacgacaacaacgaaggtgatggtgatgaagagggagaaaatgaggaggaggaggaagatgcagaggctggttcagaaaaggaggaagaggcccggctggcagccctggaagagcagaggatggaggggaagaagcccagggtgatgggcaggcacctgaaagctggaggataagcagcggctggcccaggaggaggagagtgaggccaagccgcctggcccattatgatgatgaagaagcgggagaagtaccctgtaccagaagatcatgtttggcaagaggcgaaaaatcccgagatgccaacaagctggcggagaagcggaaagcccacgatgaaggcggtgaggtctgagaagaaaggccaagaaggcaagggccggagtgagtgcttgcggcccccttcaccaggcttgaggcccagccccttagcagctggatgtggcagaggcaggcccagaggaccctaaaatgtgaatggaaccaaaaatcacttcttccttccttccttttttccagcccagccctgaccccctcaatgctcctctggcatgggccaagtgggcagccctcgccttccccttggaatggagctgcccttgctggtgccctggtccagagaagaggcctctgttgcccagcctgattctcctgctccccaggagcccagtgacatgaggtgcagagggcccacccagccccctacctactgcccccattcatcctggctttccacagcccccctcccacacagttggacccgtgattctcagggtgctgtgatggggtgagggtagggggagcatttgttattaaatgacgtggacttttgtgccaattgaaaaaaaaaaaaaaaaa

SEQ ID NO: 134713 - DNA, 506 bp, Homo sapiens
tttcagcattcatcatatcatttattcaggctcctgagagattccacttaagccgatgaaacagatttttatcatcagttgacctcttctctctccactccctttacaaatcccaacagaaatggagatcttcacccttttcaacaaaccgaagagccatcagaagtgccggcaatactaccctgtcaccattcctctccatgtctccaagaatggccagatagtgagcggtttggacgccaactggttagagcacatgagcgaccacttccggaaaggaggcatgctggtgaacgcagtcttctaccttggaatagtgaatgggtgtcgaagtgcagacagactacgtgcccctgctgaactcgctggcggcctatggctggcagctcacctgtgtgctaccaactcccgtcgtcaagactaccagcgaggggagtatatccaccaagcagattgtctttcttcagagaccgtgtctacctcagaaaatcaagaagaacgaatcg

SEQ ID NO: 134714 - DNA, 657 bp, Homo sapiens
  misc_feature (1)...(657): n = a,t,c or g
tgtcatacaggagccctgcctgtgaatggctgtgaagtggtggaatttcctcctggtgaccacttgctgctggctctcctgaatgggtgcagttttgaactgtgctgtatcacagggatgtctatgtggtggtgctttggaaagcagcccctgtgtgcagagatggcaggatctcagaaaactgatcttcacaatgaaggctacatcttggaattagattgctgttcctccttagaccacccgacagaccagaaactcatcccagagttcattaagaagatccaggaggctgcaagccagggcctgaaattcgttggtgttatacctcagtaccattcctctgtgaactcggcaggcagcagtgctccggtgtctactgccaacagcaccgaggatgccagagatgcaaaaaacgcacgtggggatcacgcgtcactggagaatgagaaaccggggactggggatgtgtntgtaccagcagggcttctcgctggcggccctgcaccccttcgtgcagcccacccatgagcgggagaagacgcccctggagcacatctttagagccatcctgatcaagaaaaccgacagatctcagaaaactgatcttcacaatgaaggctacatcttggaattagattgctgttcctccttagacca

SEQ ID NO: 134715 - DNA, 517 bp, Homo sapiens
gtccttcctaggcgcttctgagcctgcagagcctacgacccccaacaggctgctccgaagtgcctctccctacatcgctccaggaatgactcccctacacccgttccccgcaaaaaaaagttggcccaagatccaggcgtcccaaggatcagcccaggtccccatccgacgcgggccagggggtgctgctctggcagctccggagccccggcaaagagcaacctgcagggaggcgccacgcgcggttcccactacccgccagagacccggtccatggggccaaacggaggggcctgtgccggtcgacacccacaagccctgtcgcgccccccccgccgcctaccgtatgggaccggcggaggagaacggcgcggtcgcgggttccttgaggcagcgtgttcgttcccgggaggaaagtttgtgccatacaaaggaggcggcgcggggaggacttgggcgccggtgggtggaggcgtgggcggtggcgccgcgtggtcgtgtgtctgatcctccggcg

SEQ ID NO: 134716 - DNA, 2971 bp, Homo sapiens
tttcgtgccgcgggctccggcgagggacagacgcaccgatcgccgtagggacagacacacgaccacgcggcgccaccgcccacgcctccacccaccggcgcccaagtcctccccgcgccgcctcctctgtatggcacaaactttcctcccgggacggaacacgctgcctcagggagcccgcgaccgcgccgttctcctccgccggtcccatacgcagctgctgaaaatgggttgcggaattgaaacaagttaaaaaaaacgtgaatgaaaaaacggcctgggaaatatttattcaaactttgaagaggcctcaaggtggaaaaccaagataagatgtgtcctatggaataccgcttcctgggagttcacgactctgagtgctgcggagctccctgggtcctcaccagtgaggctggcctccctgcgtgacctgcccgcccagctactgggagctgttaccagcagggcttctcgctggcggccctgcaccccttcgtgcagcccacccatgagcgggagaagacgcccctggagcacatctttagagccatcctgatcaagaaaaccgacagatctcagaaaactgatcttcacaatgaaggctacatcttggaattagattgctgttcctccttagaccacccgacagaccagaaactcatcccagagttcattaagaagatccaggaggctgcaagccagggcctgaaattcgttggtgttatacctcagtaccattcctctgtgaactcggcaggcagcagtgctccggtgtctactgccaacagcaccgaggatgccagagatgcaaaaaacgcacgtggggatcacgcgtcactggagaatgagaaaccggggactggggatgtgtgcagtgctccggctgggagaaaccaaagccacagagcccagctcacggcccacgaggggaggtgcccctcgccaagcagcccagctcaccctccggagagggagatggtggagaactttcaccacagggggtgagcaagacactggatggaccggagagcaaccccttggagggtgcatgaagagccccctctcaggggaaaatggagatcttcacccttttcaacaaaccgaagagccatcagaagtgccggcaatactacccctgtcaccattcctctccatgtctccaagaatggccagacagtgagcggtttggacgccaactggttagagcacatgagcgaccacttccggaaaggaggcatgctggtgaacgcagtcttctaccttggaatagtgaatgattccttacatggcttgacagatgcagtattcatctttgaagctgtttccacagaagatagcaaaaccatacagggctatgatgctattgtggttgaacaatggacagtcctggaaggtgtcgaagtgcagacagactacgtgcccctgctgaactcgctggcggcctatggctggcagctcacctgtgtgctaccaactcccgtcgtcaagactaccagcgaggggagtatatccaccaagcagattgtctttcttcagagaccgtgtctacctcagaaaatcaagaagaaggaatcgatttttcagtgtgttattctccagagaagaaatgcacaacaggcagatgaggaaatcaaaaggtaaactcagtgccagagacaaacaacaagcagaagaaaatgagaagaacttagaagaccagtcttccaaagctggagacatgggaaactgtgtttcaggacagcagcaggagggtggagtctccgaggagatgaagggccctgtccaagaggacaagggagaacagctgtcccctggtggcctgctgtgtggggtgggtgtggagggtgaggctgtccaaaatggtcctgccagccacagcagggccctggaggggatttgcactgggcactccaatcctggagaggatgccagggacggcgatgctgaagatattaaaaagctttgtaccggagaataaaaactgaacctgtggaattttgtgctaaaactaggtgagttgccaaacccaaggcatcttaccaacagctggtttgggggctggtttccctggtgttgtgtgttacctaccctttggcttggcttgacctctccttgtgagctcacctgagccctcccagggccaggttcctgacagtgttggtttttgcacatccactggaaaggtgtcattaatgacccagtggtagaatgcaagaggtcaggttattctagccctcatggctgaaggcccagtcctggctccaccactcctccagccagagggtctggaccatccagtgcctgtcctcgccacagggcctccagggagcattcgggtcaattccatggacaccctgggctacaaaccaaggctgctgttcatcccacatcgtgtggggcagtgtccatcccctgcagctacttggtgacttaacaactccaggagccctgtcagctgccctcctccacctaaaccccttcgactcttctgctttgacaaagaaaatgacatttagggaggggaggtgctccgcctcccagcttttctcaaaatagtcctatagatactggtaatcaagggattatgaagtaattctgtctctgcacctacttttgcagaatgttcaaggaagtattctgtgttagtattaatgccaaaaagttgtttttaaaggttttgtactcagcacatcatacaaaccacattacttctgtcacttcagggcatcgggcactggctgggcgcccttgttatgtgctattttaatcagtgtaacattggtcaagttgttacccatgtatgctgtgtttatcatgtgtatatcgtctagaaagtattaaggctttaggtagatgcaactggcgaaccttggagagggaatgctgattgtcttgaccaaacccacagcctgtctcttctcttgtttagttacttacggcaataaatcatctatgagttagtgcaccgtga

SEQ ID NO: 134717 - DNA, 710 bp, Homo sapiens
ggagaagaaaatggctttccagatagcactggagatcctcttccagggtggggaacccgtagagccctcaggggcagctatcatcagcccagagatcagcaaggacaactcctgcaaagaaaactgtacttgttcctcctgcttgctccgggcccccaccataagtgacttgctcaatgatcaggacttactagacgtgatcaggataaagctggatccgtgtcacccaacggtgaaaaactggaggaattttgcaagcaaatgggggatgtcctatgacgaattgtgcttcctggagcagaggccacagagccccaccttggagttcttgctccggaacagtcagaggacggtgggccagctgatggagctctgcaggctctaccacagggccgacgtggagaaggttctgcgcaggtgggtggacgaggagtggcccaagcgggagcgtggagacccctccaggcacttctagagctcttcttcttccttcattggcctctccggatgttgaaacaaccacaggtcaagaaggaatgtgaatctgttgttttataagagtttaggacaaggacgtggaacagtggacactggttttccccaaagctggcagttttgtggaggggtagcttgtttcggtggtggatctctgtttatttttgcacatctgttataatttaatattcaaatctggaattaagaaaacatat

SEQ ID NO: 134718 - DNA, 2540 bp, Homo sapiens
tttcgtcggagtcgggtgggttggcggctataaagctggtggcgaaggggaggcgccgcggactgtcctttcgtggctcactccctttcctctgctgccgctcggtcacgcttgtgcccgaaggaggaaacagtgacagacctggagactgcagttctctatccttcacacagctctttcaccatgcctggatcacttcctttgaatgcagaagcttgctggccaaaagatgtgggaattgttgcccttgagatctattttccttctcaatatgttgatcaagcagagttggaaaaatatgatggtgtagatgctggaaaagataccattggcttgggccaggccaagatgggcttctgcacaaatagagaagatattaactctctttgcatgactgtggttcagaatcttatggagagaaataacctttcctatgattgcattgggcggctggaagttggaacagagacaatcatcgacaaatcaaagtctgtgaagactaatttgatgcagctgtttgaagagtctgggaatacagatatagaaggaatcgacacaactaatgcatgctatggaggcacagctgctgtcttcaatgctgttaactggattgagtccagctcttgggatggacggtatgccctgggtagttgcaggagatattgctgtatatgccacaggaaatgctagacctacaggtgggagttggagcagtagctcttgctaaattggggccaaatagctccttttaattttttgaaacgaggggtttcgtggggacacatatgcaacatgcctatgatttttacaagcctgatatgctatctgaatatcctatagtagatgggaaactctccatacagtgctacctcagtgcattagaccgctgctattctgtctactgcaaaaagatccatgcccagtggcagaaagagggaaatgataaagattttaccttgaatgattttggcttcatgatctttcactcaccatattgtaaactggttcagaaatctctagctcggatgttgctgaatgacttccttaatgaccagaatagagataaaaatagtatctatagtggcctggaagcctttggggatgttaaattagaagacacctactttgatagagatgtggagaaggcatttatgaaggctagctctgaactcttcagtcagaaaacaaaggcatctttacttgtatcaaatcaaaatggaaatatgtacacatcttcagtatatggttcccttgcatctgttctagcacagtactcacctcagcaattagcagggaagagaattggagtgttttcttatggttctgggtttggctgccactctgtactctcttaaagtcacacaagatgctacaccggggtctgctcttgataaaaataacagcaagtttatgtgatcttaaatcaaggcttgattcaagaactggtgtggcaccagatgtcttcgctgaaaacatgaagctcagagaggacacccatcatttggtcaactatattccccagggttcaatagattcactctttgaaggaacgtggtacttagttagggtggatgaaaagcacagaagaactttacgctcggcgtcccactccaaatgatgacactttggatgaaggagtaggacttgtgcattcaaacatagcaactgagcatattccaagccctgccaagaaagtaccaagactccctgccacagcagcagaacctgaagcagctgtcattagtaatggggaacattaagatactctgtgaggtgcaagacttcagggtggggtgggcatggggtgggggtatgggaacagttggaggaatgggatatctggggataattttaaaggattacatgttatgtaaatttttatgtgactgacatgggagcctggatgactatcgtgtacttgggaaagtctctttgctctatttgctgacatgccttcctgttgtggtctggccaatgcccaaatgtacctcgaatgatgttaagggctctgtaaaacttcatacctctttggccatttgtatgcatgatgtttggtttttaaacatggtataatggaattgtgtacttctgtcagaaggaaagcagaggtactaatctccaattaaaaaattttttaacatgtaagaattttgtactttggaacaacaaggttacaggaaagtacctgtgggtttttgggaaaacatttctaggcttgggggaatgtgacaacattccccagtgtgggtaaaattggggtaaaatgtggtaaaatgtgatacgcacaaaccctttgaaaatagcataacaaacatgccctttttctaaaattgataaatcctaaagaggaagaaaagagctgggacaataaaacactggctctggaatctggaatgttaagtccaggccagcagtgacaaaagttattgtaatgacctctgaacagagaaacactgccattgaagaggcttctggtatagaaaacatggtacattcaggagctgtgaatatagctctaggtgtgctccctgaatcagttc

SEQ ID NO: 134719 - DNA, 467 bp, Homo sapiens
  misc_feature (1)...(467): n = a,t,c or g
cagagaccgagcccggaacgtagccagagccggaatccgaggccggcgagggctgggtcggagggcttccagaggccatggtcagcaagactcggggtagcaacaaaaggcgggaggccacaggcagcagcgccggcatccaaacaaaagacaggagcagagaggcctgagagcaggaggcgaattcgatctctcctcacaaacagcccaggaaattacacccggggaagccttcgcttagatcctcaggctctgccctccctctgatgcacccccgaagaatgccccactccgccgagcaggaccgcgggagcccgccccccactcatgcggcctacgctggtacaggagagttgatctcaaaggccacacgtcacacggagaaacaaccccaggaagagcggcctcttcttacctgggtggcaggaattccacagcgctttcaaatgtctcagtttnntaaacca

SEQ ID NO: 134720 - DNA, 361 bp, Homo sapiens
  misc_feature (1)...(361): n = a,t,c or g
atttcctgggctgtttgtnaggagagatcgaattcgcctcctgctctcaggcctctctgctcctgtcttttgtttggatgccggcgctgctgcctgtggcctcccgccttttgttgctcggtctctgcagcctttgttacttgccccaacgagaaggtcgccaaggagatcgccagggccgtggtggagaagcgcctagcagcctgcgtcaacctcatccctcagattacatccatctatgagtggaaagggaagatcgaggaagacagtgaggtgctgatgatgatttaaaaccccaagtttccttggtcccaagttttganaagatttttgttccgttntgtgcacccttacgaanggg

SEQ ID NO: 134721 - DNA, 455 bp, Homo sapiens
gggaagccctccgacccatgccctcgccggcctcggattccggctctggctacgttccgggctcggtctctgcagcctttgttacttgccccaacgagaaggtcgccaaggagatcgccagggccgtggtggagaagcgcctagcagcctgcgtcaacctcatccctcagattacatccatctatgagtggaaagggaagatcgaggaagacagtgaggtgctgatgttctgtgcacccttacgaagtggccgaggtaattgcattgcctgtggaacatgggaactttccgtacctgcagtgggtgcgccaggtcacagagtcagtttctgactctatcacagtcctgccatgatgagccctgttcctgctcatcatgaagatccccgcgatacttcaacgccttctgacttccaggtgatgactgggcccccaataaatcccgtctttgggtca

SEQ ID NO: 134722 - DNA, 432 bp, Homo sapiens
tttcgtcacccaggtaagaagaggccgctcttcctggggttgtttctccgtgtgacatgtggcctttgagatcaactctcctgtaccagcgtatgccgcatgagtggggggcgggctcccgcggtcctgctcggcggagtggcctctctgctcctgtcttttgtttggatgccggcgctgctgcctgtggcctcccgccttttgttgctaccccgagtcttgctgaccatggcctctggaagccctccgacccagccctcgccggcctcggattccggctctggctacgttccgggctcggtctctgcagcctttgttacttgccccaacgagaaggtcgccaaggagatcgccaggtagggacctcgatgtgcagcgagaaaggatgatcatgaagggacagctgggggtggggcagaagagtgctgcttt

SEQ ID NO: 134723 - DNA, 885 bp, Homo sapiens
  misc_feature (1)...(885): n = a,t,c or g
gcgctgttttctaatcacgtggctgccacccaggtaagaagaggccgctcttcctggggttgtttctccgtgtgacgtgtggcctttgagatcaactctcctgtaccagcgtaggccgcatgagtggggggcgggctcccgcggtcctgctcggcggagtggtgagtgaccggccccgccccgccccttccggtcctcgaagcctcgaccgctacccgcaccctaaatcccagaggttggccccctgaggtgtgagtgaaatgagcttttgctttattttccaagtttctctctcaccttcaggggcattcttcgggggtgcatccagagggagggcagagctgtaggatctaagcgaaggctttccccgggtgtaatttcctgggctgtttgtgaggagagatcgaattcgcctcctgctctcaggcctctctgctcctgtcttttgtttggatgccggcgctgctgcctgtggccttcccgccttttgttgctaaccccgagttttgctgaccaatggcctctggaagccctccgacccaagccctcgccggccttcggattccggcttctnggctaacgtttccggggctcgggtctctgcagcctttgttaacttggccccaacgagaaggttcgccaaggagatcgccagggccgtggtggagaagcgcctagcagcctgcgtcaacctcatccctcagattacatccatctatgagtggaaagggaagatcgaggaagacagtgaggtgctgatgatgattaaaacccaaagttccttggtcccagctttgacagattttgttcgttctgtgcacccttacgaagtggccgaggtaattggcattgcctgtggaacagggaactttccgtaccttggca

SEQ ID NO: 134724 - DNA, 1339 bp, Homo sapiens
acatggtgcgcgctgttttctaatcacgtggctgccacccaggtaagaagaggccgctcttcctggggttgtttctccgtgtgacgtgtggcctttgagatcaactctcctgtaccagcgtaggccgcatgagtggggggcgggctcccgcggtcctgctcggcggagtggtgagtgaccggccccgccccgccccttccggtcctcgaagcctcgaccgctacccgcaccctaaatcccagaggttgggccccctgaggtgcctctctgctcctgtcttttgtttggatgccggcgctgctgcctgtggggcttcccgcctttttgtttgctaaccccgagtctttgttgaccatgggcctctgggaagcccatccgacccaagccctcgcccggcctcggattccggctctggctaacgttccgggcttcggtctcttgcagcctttgttaatttgcccccaacgagaaaggttcgccaagggagatcgccaggggccgtgggtgggagaaggcgccttagcaagccttgcgtcaaaccttcatcccctcagaattacatcccatctatggagtgggaaaggggaagattcgagggaagacagttgaggttgctggatggatggatttaaaacccaaaagtttccttgggttcccagcttttggacagattttgtttcgttctgtgcacccttacgaagtgggccgaggtaattggcattgcctgtggaacagggggaactttccgtacctgcagtgggtgcgcccaggtcacgagagtcagtttctgactctatacacagtcctgccatgatgagccctgttcctgctcatcatgaagatccccgcgaatacttcaaaggctttcttgactttccaggtgatgacttgggcccccaataaatcccgtctttgggtctctctgccttttgcctgttttttgtcatgtatgcaaatttggtgggagaatataagcgcttctagtccctgtattctctacatctttcagaatgactcacagctgctagagttggttatttctctttatttcaatcatacagaggccggcatcccttatcatcctccctgctcaggctctgcccccagggggtaaataattttagaaaatatttactgagctgtctcaatatatcataaagggacatgggagggatgggaggggacttctctttatatcgagcgtacagaggagggcgtctcttacaatcccccctcctgaatctctgcccgcgggggtgggataactaccccatatattttcagggccgtgccaccttaacatcacgggaaagggccaggtatggaggggccccgtcct

SEQ ID NO: 134725 - DNA, 1524 bp, Homo sapiens
atggtgcccaagaaaatgggatttgcaacagttcttgctgaagcagttacgtccctggatctgcctgtggccattattaatctaaaagaatatgatccagatgatcatctgatagaagaggtgactagtaaaaatgtctgtgtcttcctggttgcgacatacactgacggcctaccaaccgaaagtgcagagtggttctgcaaatggttagaggaagcatccattgattttcgatttggcaaaacttacctgaagggtatgagagatgcggtatttggcctgggaaattctgcctatgctagccacttcaacaaggttggcaaaaatgttgacaagtggctctggatgcttggcgtgcatcgtgtgatgagtcgaggggagggcgactgcgacgtggttaaaagcaagcacggcagcattgaggccaacttcagagcatggaagaccaagttcatctcccagctgcaggcacttcagaaaggggagagaaagaagtcctgtggcggccactgcaagaaaggcaaatgtgaatctcaccaacatggctcagaggagagggaggaaggatctcaagagcaggacgaattgcatcacagagacaccaagagccgacaggagactaggatctcggacctggagagcccaaaggttcgcactggtactgcgagacgcaccgagctacctcgcggcgttagcgccgtaccgagtggctgcagaactgtgggcagctacgacgctgccaggcccgtcctgattggttcagaggacgaagaggtgggcccagaggaaagcccggagctccgggaaaggaagccagtgcccgccgcgatgtcgatcttcacccccaccaaccagatccgcctaaccaatgtggccgtggtacggatgaagcgcgccaggaagcgcttcgaaatcgcctgctacagaaacaaggtcgtcggctggcggagcggcttggactggcattccgtggcagcagctgtctgcaccccacccttgtgtttcttacgtcctcccatgacatttttctccagtcaggttgccaagaaggaagatctcatcagtgcgtttggaacagatgaccaaactgaaatctgtaagcaggcggacaaatgtgtgactcctgaaacaaagagaccatacaccgtgatccttattgagagagccatgaaggacatccactatttggtgaaaaccaacaggagtacaaaacagcaggctttggaagtgataaagcagttaaaagagaaaatgaagatagaacgtgctcacatgaggcttcagttcatccttccagtgaatgaaggcaagaagctgaaagaaaagctcaagccactgatcaaggtcatagaaagtaaagattatggccaacagttagaaatccaagcggcaggacctacaccaaatccccggcattttggcaacagcactggtcatgctagggaaaaagttcaagatttcaacttccaagacccagggaagcctctcacaatttctaaagggcagggcagaagagatctttga

SEQ ID NO: 134726 - DNA, 536 bp, Homo sapiens
ctgccagacacgctgtggcggctgcctgaagctagtgagtcgcggcgccgcgcacttgtggttgggtcagtgccgcgcgccgctcggtcgttaccgcgaggcgctggtggccttcatgctggacggcgcgggtcagccctggtttgccggcttctgggtctttgaacagccgcgatgtcgatcttcacccccaccaaccagatccgtctaaccaatgtggcccgtggtacggatgaagcgcgccaggaagcgcttcgaaatcgcctgctacagaaacaaggtcgtcggctggcggagcggcttgtctggttgccaagaaggaagatctcatcagtgcgtttggaacagatgaccaaactgaaatctgtaagcagattttgactaaaggagaagttcaagtatcagataaagacacacacaactggagcagatgtttaaggacattgcaattattgtggcagacaaatgtgtgactcctgaaacaaagagaccatacaccgtgatccttattgagagagccatgaaggacatccact

SEQ ID NO: 134727 - DNA, 792 bp, Homo sapiens
actctcattacgccaagcttggcacgagggcgccgcgcacttgtggttgggtcagtgccgcgcgccgctcggtctttactcgcgaggcgctggtggccttcaggctggacggcgcgggtcaaccctggtttgccggcttctgggtctttgaacagccgcgatgtcgatcttcacccccaccaaccagatccgcctaaccaatgtggccgtggtacggatgaagcgcgccaggaagcgcttcgaaatcgcctgctacagaaacaaggtcgtcggctggcggagcggcttattttgactaaaggagaagttcaagtatcacataaagacacacacaactggagcagatgtttagggacattgcaattattgtggcagacaaatgtgtgactcctgaaacaaagagaccatacaccctggatccttattgagagagccatgaaggacatccactatttggtgaaaaccaacaggagtacaaaacagcaggctttggaagtgataaagcagttaaaagagaaaatgaagatagaacgtgctcacatgaggcttcagttcatccttccagtgaatgaaggcaagaagctgaaagaaaagctcaagccactgatcaaggtcatagaaagtaaagattatggccaacagttagaaatccaagcggcaggacctacaccaaatccccggcattttggcaacagcactggtcatgctagggaaaaagttcaagatttcaacttccaagacccagggaagcctctcacaatttctaaagggcagggcagaagagatctttga

SEQ ID NO: 134728 - DNA, 1740 bp, Homo sapiens
  misc_feature (1)...(1740): n = a,t,c or g
cccctcgagggatactctagagcggccgccctttttttttttttttgtctagaaacacaagccatagtttaataaacataagagtggttttattgattacatacaattttagctatattaatatatattataaactttaagaattagaaataagtgacttttattttttaaccaagaataatctaagttatggcagcatgttcaacgaaaattatttaagtccgacacaatttttctatatctgtttcctcagattaatcaggaacatcatcccaagctttacattacgatacccataatgaccctcaggaacacaagttcccantaagtaggaaatgaaggcatcatatgtttttcttttttaggggaagacccccccttttgttgtatagacataccccctaataatctttactctacttgtaccaaataactttttcaccccacaagagctgcctcaagtaactttcattttggaaagctatcaaggcatggagaccagagtaggcaaaatgccactctggactttggcatcttggagtttcaattttggctttagggatttaggaccccagtttataattaaaaaccaaatgcatttcccacatttattataacttatgttaggaaaggccttggcggtgtccactgttaacacaaagatagaaaatgtcaaatagtttaagcaagtatttggcagaccacagacatgaaacagtgccgtcggaaacggaaacactttagtgttttagaggtgaagagattgatgggtgtcattcaaatttctcatctccttcttctacatctttcagattgagtacttccaaagaacctttgcctttagtttccttttttattagctcatcaatttctcggaagcagcccgggtcaatcagacatacgatttctaactgttggccataatcttcactttctatgaccttgatcagtggcttgagcttttctttcagcttcttgccttcattgactggaaggatgaaccgaagcctcatgtgagcacgttctatcttcattttctcttttaactgctttatcacttccaaagcctgctgttttgtactcttgttggttttcaccgaatagtggatgtccttcatggctctctcaataaggatcacggtgtatggtctcttttgtttcaggaagtcacacattttgtctgccacaaataatttgcattgtccctaaacatctgctccagttgtgtgtgtctttctttatctgatacttgaacttctcaattagtcaaaatctggtacacagatctcagtggggtcatctgttccaaaacgcactgatgagatcttcctttttggcaacctgacctttaagaaacatttacaaacactgagtgggtcttgcagaacttcatcggaggtctttttccacggccgctccgccagccgacgaccttgtttttgtagcaggcgatttcgaagcgcttcccggcacgcttcattcgtaccacggccacattggttaggcggatctggttggtgggggtgaagatcgacatcgcggctgttcaaagacccagaagccggcgaaccagggctgacccgcgccgtccagcctgaaggccaccagcgcctcgcggtaacgaccgatcggcgcgcggctctgaaacaaccaacagtgcgcggcgccgcgactcactagcttcaggcagccgtcacagtgtgtctggcaggcttacttactgcgcaggcgtcaggtgga

SEQ ID NO: 134729 - DNA, 1752 bp, Homo sapiens
tttcgtggctggcagtaggagtagggaggggcggagaaaggatccgggagactggtgaggagggggaagcggagcgggcggaggcaagggcgggggagcctggcccgccttctcgacgaccccctgcactgagccgtccatccattttagtactggaaatggagtacgggggggcaaccccgcagtgcaacagtgaaacgtagacatattctggaaataaccgcctctcacaatctgctcccatggaaacatctgacctccgcaaaaacggggtggcgctgggacaggttgcctccaggggaaggggacacagagacaaacgcagtttggaaagcatcctggtttggtgcccgaggcctggaaagaaatggcggctggggtgcgggggaggtaggggaggaaaacggtctgcgcgtctgttgttcccagcgctctgagaggcctgaaaaggaagagcaacctgtccagaatccccgcaggtccgtgaaagcagggggctgcatggacaggggcccacaagggttgagagtgtggagggcacagtcagggccgaattggggcccctgcccatccccttacctacatgaacacacaccttaccaggctgaaccagtgcagagaaggtggcagggcctgccagggaacagctggctcacgtgtgtgggaggagtggtgggctacgtggtgggcagaaggccctcttggaggcccagtcagcttaggggaaccctcaccaggggtgagatgcaagtagtatccagacctgcattccaccccatgccctcagtctcccatgtctcctctttgtctcctcttccctccacacccatcccccaggaaaggaaaaggaggggaaatctcgacatggaaaaactcttcaatgaaaatgaaggaatgccttcgaatcaaggaaagatagacaatgaagaacagccaccgcacgagggaaagccagaagtagcttgtattctggaagacaagaagttagaaaacgagggaaacacagaaaacacgggcaagagagttgaggaaccgttaaaggataaagaaaagccagagagtgcgggaaaggcaaaaggagaaggaaagtcagagaggaagggaaagtcagagatgcagggaggatcaaagacagagggaaagccagagagagggggaagggcagagggtgaaggagagccagacatgggtaagagagccagagagtgagggagagccagaaagtgaaacaagggctgcaggaaagcgcccagctgaggatgatatacccaggaaagccaaaagaaaaaccaacaaggggctggctcagtacctcaagcaatataaggaagccatacatgatatgaatttcagcaatgaggacatgataagagaatttgacaacatggctagggtggaggataaaaggagaaaaagcaaaccagaaattgggggcgtttttgtggatgcaaagaaatttacaggaccccttctatcctaggggtccaagggaattcaaggggtggcttcaggggccccacgaaggggacactggaagacattccttatgtgtagtgtccctggcaggcatttgtcaggccatatgttttaaccttatggtaatactttgctttagtcgttcctcctgctaccagtagcgttttgacccacctgccagtgtttgcttgctctatgtttcagtagcagattttcacacatgtgcattgcagagacgtcatgattcgtggaaaaataaagcagcttataatatca

SEQ ID NO: 134730 - DNA, 442 bp, Homo sapiens
tttcgttcgcatcattcattttgtggcttttcaggtcatgggatttggtctgtacctgatggatgggagtgtcagtaacatctataagttggatgccaagaaaagaataaacttatccaaaatcgacaagtacttcaagcaactccaggtggttccgctatttggggacatgcaaatagaactggcaagatatatcaagaccagcgcccactacgaggaaaataaatctcggtgatcgccatgatcaaaggcctgcaggtgctgatgggcaggatggagagcgtgttcaaccacgccatccggcacaccgtctatgccgcactgcaggacttctcccaggtgacccttatggagccgctgcggcaggccatcaagaagaagaagaacgtcatccagagtgtcctgcaggccatcaggaagaccgtgtgtgactgggagacgg

SEQ ID NO: 134731 - DNA, 414 bp, Homo sapiens
  misc_feature (1)...(414): n = a,t,c or g
aaggtaaggccaggaagtttgcttcttaataaacggttaccgatccagaatgcaagaatcaggaagccacggtttccccccctccccgttaacccgttnnagagacgctgctgaagcagaggcatgtgcagctcctcggcagatcaaatagacctcaatcgtctgatcaccccaggcgtctcagcagccatgtataagtccctagaactggcgattggacgatttgaaagtgaagatttgacctccatagttgagctggatggcctgttggaaatcaaccgcatgacccacaagctgctgagccggtacctgacttcctgcccaactactgctacaacggctctaccaaccggtttgttcggacagtgttaccattttctcaggaatttcaaagagataagcagccgtcgacgc

SEQ ID NO: 134732 - DNA, 883 bp, Homo sapiens
atggcggcccaggtgactctggaggacgcgctgtccaacgtggacctcctggaggagctgcccctgcccgaccagcagccctgcatcgagcccccgccatcctcgctgctctaccagccaaatttcaacactaactttgaagacagaaatgcatttgttactggcatcgcaagatacattgaacaagccaccgtccactctagcatggtcatgggatttggtctgtacctgatggatgggagtgtcagtaacatctataagttggatgccaagaaaagaataaacttatccaaaatcgacaagtacttcaagacagatgcacattattccatactgtcacttcttctgtgtctgtcagactctccttcaaacagcagttatgtggagacaccaagaaataaagaagtggaaaagaaagatgatttcgactggggaaaatacttgatggaagatgaagaaatggacattggtccgtacatggacacaccactgtggttccgagagttcttcctggagctgaccatgggcaggaggatccagttccccattgagatgtcgatgccctggatcctgacggaccacatcctggagaccaaggaggcatcgatgatggaaaacaaaaatgttccagttaatcacagagacttctggtatgcaacttacacgttatatagcgtatcagaaaagacagaaaatgaagaaaaaatgagtgataacgctagtgcgagttccggcagtgaccaggggccctccagcaggcagcacaccatggtgtccttcctcaaacctgtcctgaagcagatcataatggctggcaagtcgatgcagctgctgaagaacctgcagtgtgcggagagcaccacctgccaggcaggagccagag

SEQ ID NO: 134733 - DNA, 4642 bp, Homo sapiens
  misc_feature (1)...(4642): n = a,t,c or g
tttcgtcttcgcttgacgatttcgtaggggaggaggccgagtgtttcctggcgcattcccggccagcccgagtgactcactcggccaaggaaactcccagggcccgcccaggacccccaagccgccgcggacgcagaatgtggctcagctgcccctggtcccatcccagggcagagctcctcctgagtacccttgagactggagcagattcagcagaaggcagattgccccctctccctggagctggctctgaagcccaggatggcggcccaggtgactctggaggacgcgctgtccaacgtggacctcctggaggagctgcccctgcccgaccagcagccctgcatcgagcccccgccatcctcgctgctctaccagccaaatttcaacactaactttgaagacagaaatgcatttgttactggcatcgcaagatacattgaacaagccaccgtccactctagcatgaacgagatgctggaggagggccaagaatatgctgtcatgctgtacacctggaggagctgctcccgggccatcccacaggtgaaatgtaacgagcagcctaacagagtggaaatctacgagaaaaccgtggaggttctggagcctgaggtcacaaaactgatgaatttcatgtacttacagagaaatgccattgagcgtttctgcggggaagtgaggcgcctgtgccatgccgagaggaggaaggacttcgtgtcagaagcctacctgatcacactgggcaaattcatcaacatgttcgctgtgctggacgagctgaagaacatgaagtgcagtgtgaagaacgaccactcagcgtacaagagggccgctcagtttttacgtaaaatggcagatccacagtccatccaggaatcgcagaatctgtccatgttcctggccaatcataacaagatcacacagtctctgcagcagcagctcgaagtgatttctggctacgaagagctcctggcagatattgtgaatctgtgtgtggattactacgagaacaggatgtatttgacgcccagtgagaaacacatgcttctcaaagtcatgggatttggtctgtacctgatggatgggagtgtcagtaacatctataagttggatgccaagaaaagaataaacttatccaaaatcgacaagtacttcaagcaactccaggtggttccgctatttggggacatgcaaatagaactggcaagatatatcaagaccagcgcccactacgaggaaaataaatctcgatggacgtgcacatcctccggcagcagccctcagtacaacatctgcgagcagatgatccagatccgcgaggaccacatgcgcttcatttcggagctggcgcgctacagcaacagcgaggtggtcacgggctcgggccgccaggaggcccagaagacggacgcggagtaccgcaagctcttcgacctggcgctgcagggcctgcagctgttgtcgcagtggagcgcgcacgtgatggaagtgtattcctggaagcttgtgcaccccaccgacaagtactccaacaaggactgccccgacagcgctgaagagtacgagcgtgccacgcgctacaactacaccagcgaggagaagtttgccctagtggaggtgatcgccatgatcaaaggcctgcaggtgctgatgggcaggatggagagcgtgttcaaccacgccatccggcacaccgtctatgccgcactgcaggacttctcccaggtgaccctatagggagccgctgcggcaggccatcaagaagaagaagaacgtcatccagagtgtcttgcaggccatcaggaagaccgtgtgtgactgggagacggggcatgagcccttcaatgacccagccttgcggggcgagaaggaccccaagagcggctaagacataaaagtaccacgccgcgccgtgggaccctccagcactcagctttacatggtgagaaccatgctagagtccctcattgcagacaaaagtggttccaagaaaaccttgagaagtagccttgaggggcccaccatattggacatagaaaaatttcatcgagagtcattcttctacactcacttgataaatttcagtgaaacgctgcagcagtgctgtgacctttcgcagctgtggttccgagagttcttcctggagctgaccatgggcaggaggatccagttccccattgagatgtcgatgccctggatcctgacggaccacatcctggagaccaaggaggcatcgatgatggagtacgtgctctactccctggacccgcacatcgatagccgcctcactacagcgctcaccaggttcaacaagcagttcctgtacgacgaaattgaggcccgaggtgaatctatgttttgaccaatttgtttacaatgctagcagaccagatatttgcctattataaggttatggcaggaaagtttgcttcttgataaacggttacgatcagaatgcaagaatcagggagccacgatccacctcccgccagtctaaccgctacgagacgctgctgatagcagaggcatgtgcagctcctcggcagattcaatagacctcaatcgtctgatcacccagcgcgtctcagcagccatgtataagtccctagaactggcgattggacgatttgaaagtgaagatttgacctccataagttgagctggatggcctgttggaaatcaaccgcatgacccacaagctgctgagccggtacctgacgctggacggcttcgacgccatgttccgggaggccaaccacaacgtgtcagcgccctacggggaggatcacccctgacgtcttctgggagctcaactatgacttcctgcccaactactgctacaacggctctaccaaccggtttgttcggacagtgttaccattttctcaggaatttcaaagagataagcagcctaatgcacagcctcagtatctgcatggatccaaggctttgaacttggcctactccagcatttacggcagctaccggaacttcgtgggacactacacactttcaagtcatctgccggcttctcggctaaccagggtatcgccgtggtcatggaggagctgctgaaggtcgtcaagagcctgctgcaaggcacaatcctgcagtacgtgaagacgctgatggaggtgatgcccaagatctgccgcctgccccggcacgagtacggctcttctggtatcctgggagtttttccaccaccagctgaaggacatcgtggagtacggcagagctgaagacggtgtgcttccagaacctgcgggaggtggggaacgccatcctcttctgcctgctcatcgagcagagcctgtctttagaagaagtgtgtgacctgctgcacgcggctcctttccagaacatcttgccgcgagtccatgtgaaagagggggagagacttgatgccaaaatgaaaagactagaatcaaagtacgccccgctgcatcttgtcccactgattgaaagactggggacccctcagcaaattgccatcgcaagagagggggacctgctgacaaaggagcgcctctgctgcggcctgtccatgtttgaggtcatcctgacacggatccggagctttctggatgaccccatctggcgcgggcctctgcccagcaatggggtcatgcatgtggacgagtgtgtggagtttcacagactgtggagtgccatgcagtttgtctactgcattcccgtggggacacacgaagttcacagtcgaacaagtgctttggtgatgggctacactgggctggctgtattgatcatcgtacttcttgggcagcaccggcgttttcctgtgctgggaatttctgctaccatctaattnaaaagttccagaaacatgatgggcaaagatgagattattaaaaatgtgcctttgaagaagatggtggagagaattcggcaagttcaggatcctcattgattagatcatcaccatcctgggattaagtacctgaaagtcaggcgacgggggagggcacgccagtggaagccatgtgcgctggctttccagccgcccattccaccagtcccttcgccagccagctgaggggcacgcgctgcactcccttaactcaacatgggcatgcctttctctccgtaaactatttagttgagatttttagggactatttttcaagtatctctgtacctgttaaaggggggtgcttttcgatctaaaaactttaattttaataaaattgacttatttttctagactaaaattggtatatgcttttgggtaattaggaactcttggagaatattggctgctgattgttgccatcaacgttcctacaaaattgtttttctatgggatgttctggcagctgtgtcataaaatgctgctgggttcattcattcattcccataagaaacttaataccagcaaatgcattaaatcccttgccagttaccattaactgtaactatttagcttttgtttagggatctttctgatggtcttttatgagcaatcttagttctaagtcattgttcccatccctttttttttgtgtttcagaaaatagtgaacttgattcccctgcttccactaaatccagttgtgacaaaatctaacgtgacatcgagatcgaaaggttatagaaataaaactaatgagatctaaaaa

SEQ ID NO: 134734 - DNA, 395 bp, Homo sapiens
ccttggagagccaaaaaagacaaccacttaaattttaacaaaaatgatgtcatcaccgtcctggaacagcaagacatgtggtggtttggagaagttcaaggtcagaagggttggttccccaagtcttacgtgaaactcatttcagggcccataaggaagtctacaagcatggattctggttcttcagagagtcctgctagtctaaagcgagtagcctctccagcagccaagccggtcgtttcgggagaagggctctggaactgctgggaaaacagggagtttaggaaaaaaacctgaaattgcccaggttattgcctcatacaccgccaccggccccgagcagctcactctcgcccctggtcagctgattttgatccgaaaaaagaacccagggg

SEQ ID NO: 134735 - DNA, 702 bp, Homo sapiens
atgacccgtcacgaaagtccaggcttttgttgcccccatggctttccaaatggccctgttgaaaacatcccctttgaccctccaaaccactttatggaaaggtccattttcatcatgggagtccctcctcagagagagtcagaacccacatctggtgcccactgtggcatcgtgggcccacggtgttcagacttacatctcttggatatgttgaccccaactgaaagaaagcgacaaggatacatccacgagctcattgtcaccgaggagaactatgtgaatgacctgcagctggtcacagagatttttcaaaaacccctgatggagtctgagctgctgacagaaaaagaggttgctatgatttttgtgaactggaaggagctgattatgtgtaatatcaaactactaaaagcgctgagagtccgcaagaagatgtccggggagaagatgcctgtgaagatgattggagacatcctgagcgcacagctgccgcacatgcagccctacatccgcttctgcagccgccagctcaacggggctgccctgatccagcagaagacggatgaggccccagacttcaaggagttcgtcaaactggagcaggtcccggtccctggagacagttatcaggtctcagggctccagtcaatgcagctgcccgtttctaaggcattaaaccagaccacagcctttgacagctaa

SEQ ID NO: 134736 - DNA, 1347 bp, Homo sapiens
atgggaccattcactgcttcccgcaatgccacccactggagccatcaaggagtggccgtcatctgctacgtgattgccatgtgggtgctcagagctgcgattgctcaagtgggcgccgtccatgaaaggatgatcctggaaaacacccctgaaaaccacccggaccacagccacttgaagcacgccctggagaaggcggaagagctctgttcccaggtgaacgaaggggtgcgggagaaggagaactctgaccggctggagtggatccaggcccacgtgcagtgtgaaggcctgtctgagaacctagtggaggtgatggacccccgagaggtgttagagccgcgtttcagcgcccaccgtgtctctaagggtcagtggagggagggagctgttcccttcctgtttgctgagcggcaacttgtgttcaattcagtgaccaattgcttggggccgcgcaaatttctgcacagtgggaagctctacaaggccaagagcaacaaggagctgtatggcttccttttcaacgacttcctcctgctgactcagatcacgaagcctttggggtcttctggcaccgacaaagtcttcagccccaaatcaaacctgcagtataaaatgtataaaacacctattttcctaaatgaggttctagtaaaattacccaccgacccttctggagacgagcccatcttccacatctcccacattgaccgcgtctatactctccgagcagaaagcataaatgaaaggactgcctgggtgcagaaaatcaaagctgcttctgaactctacatagagactgagaaaaagaagcgcgagaaagcgtacctggtccgttcccaaagggcaacaggcattggaaggttgatggtgaacgtggttgaaggcatcgagttgaaaccctgtcggtcacatggaaagagcaacccgtactgtgaggtgaccatgggttcccagtgccacatcaccaagacgatccaggacactctgaaccccaagtggaattccaactgccagttcttcatccgagacctggagcaggaagtcctctgcatcactgtgttcgagagggaccagttctcaccagatgattttttgggtcggacggagatccgtgtggcggacatcaagaaagaccagggctccaaaggtccagttacgaagtgtcttctgctgcacgaagtccccacgggagagattgtggtccgcttggacctgcagttgtttgatgagccgtggatggacagcatcatctcctggaaccaggtttgctgtgaccatgagagcctgaagatgtggctcattcggatccaggcctggactaatctggaaagagggactttctag

SEQ ID NO: 134737 - DNA, 2874 bp, Homo sapiens
gctgcaaaacgggaacttgaaaggcaacgacaacttgagtgggaacggaatcgaaggcaagaactactaaatcaaagaaacaaagaacaagaggacatagttgtactgaaagcaaagaaaaagactttggaatttgaattagaagctctaaatgataaaaagcatcaactagaagggaaacttcaagatatcagatgtcgattgaccacccaaaggcaagaaattgagagcacaaacaaatctagagagttgagaattgccgaaatcacccatctacagcaacaattacaggaatctcagcaaatgcttggaagacttattccagaaaaacagatactcaatgaccaattaaaacaagttcagcagaacagtttgcacagagattcacttgttacacttaaaagagccttagaagcaaaagaactagctcggcagcacctacgagaccaactggatgaagtggagaaagaaactagatcaaaactacaggagattgatattttcaataatcagctgaaggaactaagagaaatacacaataagcaacaactccagaagcaaaagtccatggaggctgaacgactgaaacagaaagaacaagaacgaaagatcatagaattagaaaaacaaaaagaagaagcccaaagacgagctcaggaaagggacaagcagtggctggagcatgtgcagcaggaggacgagcatcagagaccaagaaaactccacgaagaggaaaaactgaaaagggaggagagtgtcaaaaagaaggatggcgaggaaaaaggcaaacaggaagcacaagacaagctgggtcggcttttccatcaacaccaagaaccagctaagccagctgtccaggcaccctggtccactgcagaaaaaggtccacttaccatttctgcacaggaaaatgtaaaagtggtgtattaccgggcactgtacccctttgaatccagaagccatgatgaaatcactatccagccaggagacatagtcatggtggatgaaagccaaactggagaacccggctggcttggaggagaattaaaaggaaagacagggtggttccctgcaaactatgcagagaaaatcccagaaaatgaggttcccgctccagtgaaaccagtgactgattcaacatctgcccctgcccccaaactggccttgcgtgagacccccgcccctttggcagtaacctcttcagagccctccacgacccctaataactgggccgacttcagctccacgtggcccaccagcacgaatgagaaaccagaaacggataactgggatgcatgggcagcccagccctctctcaccgttccaagtgccggccagttaaggcagaggtccgcctttactccagccacggccactggctcctccccgtctcctgtgctaggccagggtgaaaaggtggaggggctacaagctcaagccctatatccttggagagccaaaaaagacaaccacttaaattttaacaaaaatgatgtcatcaccgtcctggaacagcaagacatgtggtggtttggagaagttcaagaatttattgccatgtacacttacgagagttctgagcaaggagatttaacctttcagcaaggggatgtgattttggttaccaagaaagatggtgactggtggacaggaacagtgggcgacaaggccggagtcttcccttctaactatgtgaggcttaaagattcagagggctctggaactgctgggaaaacagggagtttaggaaaaaaacctgaaattgcccaggttattgcctcatacaccgccaccggccccgagcagctcactctcgcccctggtcagctgattttgatccgaaaaaagaacccagtgtgccaggtgattgggatgtacgactacaccgcgcagaatgacgatgagctggccttcaacaagggccagatcatcaacgtcctcaacaaggaggaccctgactggtggaaaggagaagtcaatggacaagtggggctcttcccatccaattatgtgaagctgaccacagacatggacccaagccagcaatttccaaaaatacccaagagaatttttatggaaatgacattggatgccaatggtcccaaaaatgcaaggaaaaatagctccttctttgaaatgtctggtattcggggtctgatttgccctaccaatccgtgcacgaaccctggcccccttcctgatagcaggaggcccaccggtggaagcaagcagctttttaaacgccttcgctgcactcctgcaatgtgcagagacctctggaccaaagaccagagcctactcagcagactcttggttgatgtggacaagctgcctgtgtttcacacggtcgacgggtgttcagacttacatctcttggatatgttgaccccaactgaaagaaagcgacaaggatacatccacgagctcattgtcaccgaggagaactatgtgaatgacctgcagctggtcacagagatttttcaaaaacccctgatggagtctgagctgctgacagaaaaagaggttgctatgatttttgtgaactggaaggagctgattatgtgtaatatcaaactactaaaagcgctgagagtccgcaagaagatgtccggggagaagatgcctgtgaagatgattggagacatcctgagcgcacagctgccgcacatgcagccctacatccgcttctgcagccgccagctcaacggggctgccctgatccagcagaagacggatgaggccccagacttcaaggagttcgtcaaactggagcaggtcccggtccctggagacagttatcaggtctcagggctccagtcaatgcagctgcccgtttctaaggcattaaaccagaccacagcctttgacagctaa

SEQ ID NO: 134738 - DNA, 7435 bp, Homo sapiens
tttcgtgagcgaaggaggtatagaagagtggatgcgccaggggagggagcgtagcttggttgctccgtagtacggcggctcgcgaggaagaatcccgagcgggctccgggacggacagagaggcgggcggggatggtgtgcggggctgcggctcctgcgtccctcccagcggcgcgtgagcggcactgatttgtccctggggcggcagcgcggacccgcccggagatgaggcgtcgattagcaaggtaaaagtaacagaaccatggctcagtttccaacaccttttggtggcagcctggatatctgggccataactgtagaggaaagagcgaagcatgatcagcagctccatagtttaaagccaatatctggattcattactggtgatcaagctagaaactttttttttcaatctgggttacctcaacctgttttagcacagatatgggcactagctgacatgaataatgatggaagaatggatcaagtggagttttccatagctatgaaacttatcaaactgaagctacaaggatatcagctaccctctgcacttccccctgtcatgaaacagcaaccagttgctatttctagcgcaccagcatttggtatgggaggtatcgccagcatgccaccgcttacagctgttgctccagtgccaatgggatccattcccagttgttggaatgtctccaaccctagtatcttctgttcccacagcagctgtgccccccctggctaacggggctccccctgttatacaacctctgcctgcatttgctcatcctgcagccacattgccaaagagttcttcctttagtagatctggtccagggtcacaactaaacactaaattacaaaaggcacagtcatttgatgtggccagtgtcccaccaagtggcagagtgggctgttcctcagtcatcaaagactgaaaatacaggcaaattattcaatagtcatgacaaaacctaatgagtggacactttaacaaggtccccaagcaagaactattcttatgcagtcaagtttaccacaggctcagctggcttcaatatggaatctttctgacattgatcaagatggaaaacttacagcagaggaatttatcctggcaatgcacctcattgatgtagctatgtctggccaaccactgccacctgtcctgcctccagaatacattccaccttcttttagaagagttcgatctggcagtggtatatctgtcataagctcaacatctgtagatcagaggctaccagaggaaccagttttagaagatgaacaacaacaattagaaaagaaattacctgtaacgtttgaagataagaagcgggagaactttgaacgtggcaacctggaactggagaaacgaaggcaagctctcctggaacagcagcgcaaggagcaggagcgcctggcccagctggagcgggcggagcaggagaggaaggagcgtgagcgccaggagcaagagcgcaaaagacaactggaactggagaagcaactggaaaagcagcgggagctagaacggcagagagaggaggagaggaggaaagaaattgagaggcgagaggctgcaaagaggcagctatgaaaggcactgacctggagagtgggagaggcatcgagagtccgaactactaaatcaaagaaacaaagaacaagaggacatagttgtactgaaagcaaagaaaaagactttggaatttgaattagaagctctaaatgataaaaagcatcaactagaagggaaacttcaagatatcagatgtcgattgaccacccaaaggcaagaaattgagagcacaaacaaatctagagagttgagaattgccggaaatcaccccatctacagcactaatttacatggaatctcagcaaaatgctttggaagaacttattccagaaaaacagatactcaatgaccaattaaaacaagttcagcagaacagtttgcacagagattcacttgttacacttaaaagaagccttagaagcaaaagaactagctcggcagcacctacgagaccaactggatgaagtggagaaagaaactagatcaaaactacaggagattgatattttcaataatcagctgaaggaactaagagaaatacacaataagcaacaactccagaagcaaaagtccatggaggctgaacgactgaaacagaaagaacaagaacgaaagatcatagaattagaaaaacaaaaagaagaagcccaaagacgagctcaggaaagggacaagcagtggctggagcatgtgcagcaggaggacgagcatcagagaccaagaaaactccacgaagaggaaaaactgaaaagggaggagagtgtcaaaaagaaggatggcagaggaaaaaggcaaacaggaagcacaagacaagctgggtcggcttttccatcaacaccaagaaccagctaagccagctgtccaggcaccctggtccactgcagaaaaaggtccacttaccatttctgcacaggaaaatgtaaaagtggtgtattaccgggcactgtacccctttgaatccagaagccatgatgaaatcactatccagccaggagacatagtcatggttaaaggggaatgggtggatgaaagccaaactggagaacccggctggcttggaggagaattaaaaggaaagacagggtggttccctgcaaactatgcagagaaaatcccagaaaatgaggttcccgctccagtgaaaccagtgactgattcaacatctgcccctgcccccaaactggccttgcgtgagacccccgcccctttggcagtaacctcttcagagccctccacgacccctaataactgggccgacttcagctccacgtggcccaccagcacgaatgagaaaccagaaacggataactgggatgcatgggcagccaggcccttctctcaccgttccaagtgccggccagttaaggcagaggtccgcctttactccagccacggccactggctcctccccgtctcctgtgctaggccagggtgaaaaggtggaggggctacaagctcaagccctatatccttggagagccaaaaaaagacaaccacttaaattttaacaaaaatgatgtcatcaccgtcctggaacagcaagacatgtggtggtttggagaagttcaaggtcagaagggttggttccccaagtcttacgtgaaactcatttcagggcccataaggaagtctacaagcatgggattctggttcttcagagagtcctgctagtctaaagcgagtagcctctccagcagccaagccggtcgtttcgggagaaggaatttattgccatttacacttacgagagttctgaggcaagggagatttaaccttttcagccagggggatgtgattttggttaccaagaaagatggggacttgtggacaagaacaagtgggcgacaaggccggagtcttcccttctaactatgtgaggcttaaagattcagagggctctggaacttctgggaaaacagggagtttaggaaaaaaacctgaaattgccccaggttattgcctcatacaccgccaccggccccgagcagctcactctcgcccctggtcagctgattttgatccgaaaaaagaaccccaggtggatggtgggaaggagagctgcaagcacgtgggaaaaagcgccagataggctggttcccagctaattatgtaaagcttctaaaccctgggacgagcaaaatcactccaacagagccacctaagtcaacagcattagcggcagtgtgccaggtgattgggatgtacgactacaccgcgcagaatgacgatgagctggccttcaacaaggggccagatcatcaacgtcctcaacaaggaggaccctgactggtggaaaggagaagtcaatggacaagtggggctcttcccatccaattatgtgaagctgaccacagacatgggacccaagccagcaatggtgttcagacttacatctcttggatatgttgaccccaactgaaagaaagcgacaaggatacatccacgagctcattgtcaccgaggagaactatgtgaatgacctgcagctggtcacagagatttttcaaaaacccctgatggagtctgagctgctgacagaaaaagaggttgctatgatttttgtgaactggaaggagctgattatgtgtaatatcaaactactaaaagcgctgagagtccgcaagaagatgtccggggagaagatgcctgtgaagatgattggagacatcctgagcgcacagctgccgcacatgcagccctacatccgcttctgcagccgccagctcaacggggctgccctgatccagcagaagacggacgaggccccagacttcaaggagttcgtcaaaagattggaaatggatcctcggtgtaaagggatgccactctctagttttatactgaagcctatgcaacgggtaacaagatacccactgatcattaaaaatatcctggaaaacacccctgaaaaccacccggaccacagccacttgaagcacgccctggagaaggcggaagagctctgttcccaggtgaacgaaggggtgcgggagaaggagaactctgaccggctggagtggatccaggcccacgtgcagtgtgaaggcctgtctgagcaacttgtgttcaattcagtgaccaattgcttggggccgcgcaaatttctgcacagtgggaagctctacaaggccaagaacaacaaggagctgtatggcttccttttcaacgacttcctcctgctgactcagatcacgaagcctttggggtcttctggcaccgacaaagtcttcagccccaaatcaaacctgcagtataaaatgtataaaacacctattttcctaaatgaggttctagtaaaattacccaccgacccttctggagacgagcccatcttccacatctcccacattgaccgcgtctatactctccgagcagaaagcataaatgaaaggactgcctgggtgcagaaaatcaaagctgcttctgaactttacatagagactgagaaaaagaagcgcgagaaagcgtacctggtccgttcccaaagggcaacaggcattggaaggttgatggtgaacgtggttgaaggcatcgagttgaaaccctgtcggtcacatggaaagagcaacccgtactgtgaggtgaccatgggttcccagtgccacatcaccaagacgatccaggacactctgaaccccaagtggaattccaactgccagttcttcatccgagacctggagcaggaagtcctctgcatcactgtgttcgagagggaccagttctcaccagatgattttttgggtcggacggagatccgtgtggcggacatcaagaaagaccagggctccaaaggtccagttacgaagtgtcttctgctgcacgaagtccccacgggagagattgtggtccgcttggacctgcagttgtttgatgagccgtaggcagcgggctcagggtgtgctcagcagggtcccagcccacggccacacatgctgtctggaaattgtattccttttctaagaaaccaccatttggtattcagtcacagggatatgggatggcaaagacaggcccctcaaagctcctaggaatcattctcgacaatcctccctgccccgaaacaatttcctgtttcatgaaacaaagctgtgttttcctttgtcctcactacaggtctcattatggcttctagggtcgctgaaatcccatagccctcaacagggtgcagctgggagtctagccccttcccgggcttgagggatgggtctggttactataaaatagatttataaatgcaatgtctatatttttggagaactcatgtaaccctcctgtttcttacatccaccagtccccaagtagacttcttggcctacaatgcccagtccttggtgtgagtttagaaacaattatgacggtcctgtcattgcttcagaatcccatctctcctgcagggaaatgctgcctagagctgatcactcggtgagacggtctgatcaggccctggcttagctctttgaagagctggtctatggaagtttccagcatgtgcaccgttatagccgttccttccccctctaggccttgtattaatatatgtcaatgaaaacacactggtgtattgttgcgtggattcagttctgattcccagcatgcttagaatatggtcacagaaagtcattatctagaaagtcacccctctgctggatcagatcactacaggtcactggaaaggcaactttacaatgttgggtcactgggtctcggttggcagccatgttggaaaaatctcttttggctcggaggcctgtgatatttcatagcagcagtcgttgctggtgacctgttctgtgcttgaatgtgctgaatcctgattgttgtaggacatttcaacagctctttttggtacgttccccaaaaagccatgtcctagatccccaaggcgtgaaaaggaaaaatatcaagctggaggttgggaaagaaaatgaaggcagtccattatgtggtgggtgaaagaccctaggaggatgcaagccccgcacatcccggggcaaagacctaagacacttttccaccctccaccaccccaacctcacataatatgcttgttgcaagagtcaggactttatgactatgtgccaagctgtttggtttgagttctttaatttttttttcccttaaatgccaggagatcatctggttagttagatagtaacttgatttgctaatgaaaagtgggggccgtgttttgtttgcatgttaatattctcataatcctagtttgttgtggtcatgaaatgccctttgcatgttctgttggtactggagtctagctttcctgtactagatggtgttctctttgattgtaggtccttagactttaattagggttatcaaagtgctttctaaatgatagcatcagcgttgtggcagagtacctcctttgctgggaactgaatgtgtagggttatcatttcccatgagagcccggtcatacttcaagcaatttttttaaaagtgtgtgttggaaaggacaacaaagtttacatttcatacttttaagaaatactttattatttatttattgaagatagtgtagaattttgtatcaagaacaacagacataagtattttttgaaacaagcaaatataccctgtagttagaaactttcaactgaacatgttagagaccaagtttaacttcaggcatgcatttgtttaccatttcccagcagaaaacatggttaaaatactttaagtttatattttttgatgttgttaagaaacttttaaattaaatctataaatagacatgcaactcatgctttcctatttctataaccaacaccgtttgtttagtgtatttatgaaagatatgctaccatggtagaaagaaaagtattcaatgtgtaaatt

SEQ ID NO: 134739 - DNA, 2154 bp, Homo sapiens
  misc_feature (1)...(2154): n = a,t,c or g
gcggnggaattcgcggcgccggcgtccgcggcagctgataccagagtcttgctccggccgcggccattggagccctgggctggggcaggagccgcaatgtctcaggctgtgcagacaaacggaactcaaccattaagcaaaacatgggaactcagtttatatgagttacaacgaacacctcagtgactctcttacagaaggcaataacagatggcttagaaattgtggtttcacctcgaagtctgcacagtgatttaatgtgcccaatttgtttggatatgttgaagaacaccatgactacaaaggagtctttacatcgtttctgtgcagactgcaacatcatagcccttagaagtggcaacaaagaatgtcttacctgttggaaaaaactagtttccaaaagatcaccaaggccagacccaaagtttgatgcactcatcagcaaaataaatccaagtcgtgatgaatatgaagctcatcaagagagagtattagtcaggatcaacaagcacaataatcagcaagcactcagtcacagcattgaggaaggactgaagatacaggccatgaacagactgcagcgaggcaagaaacaacagattgaaaatggtagtggagcagaagataatggtgacagttcacactgcagtaatgcatccacacatagcaatcaggaagcaggccctagtaacaaacggaccaaaacatctgatgattctgggctagagcttgataataacaatgcagcaatggcaattgatccagtaatggatggtgctagtgaaattgaattagtattcacgcctcatcccacacttatggaaaaagatgacagtgcacagacgagatacataaagacttctggtaacgccactgttgatcacttatccaagtatctggctgtgaggttagctttagaagaacttcgaagcaaaggtgaatcataccagatgaaccttgatacagccagtgagaagcagtataccatttatatagcaacagccagtggccagttcactgtattaaatggctctttttctttggaattggtcagtgagaaatactggaaagtgaacaaacccatggaactttattacgcacctacaaaggagcacaaatgagcctttaaaaaccaattctgagactgaacttttttatagcctatttctttaatattaaagatgtactggcattacttttatggacagatcttggatatgttgttcaattttctttctgagccagactagtttacgctattcaaatcttttcccctttatttaagatttcctttttggaagggactgcaattattcagtatttttttctttcctttaaaaaaatatatctgaagtttcttgtgttttttttttttccccacaaagtgtgtttccacttggagcaccattttgacccaggaattttgcatagttccggtattctaataaaaggacagttggctgtccttttcctgctcccctcaaaagatttttagtcatacagaatgttaaatattatgtattctgaccttttttttttcccccggagtcttggtatatttatagttttctatataaactgtagtatcttccatgaaggacccaagggctcaaatttactgtccttaaaaacaattctcataggattattcttttcatggtattttcttccataatatctcattttaaaaagaagttctttatgaacttagtgtccattgtcatgcaatgttttttttttttttccattctttttccctgtaattttggaatttctggtcctgggaagaatcaaacaaaatcttaagttctatgagaacttggttcattgacatattctgctgaagaaagaaaaattaaattggtagtaaaatatagtcttcaagtataccgtttgagagtgcttttttttgtattaagttctgctgtcacttcatttcctgtattatatgtgatgttttttcccccattaaaaataccagagataatgggggatattttgcactttagccttgatgaaaagtacaagatatgttcaaagcttccctaatttttttcttatttgtagccacataagtttcaagaataacatggcacacagaacaatggaaaaaagtttctttccattggaaaattatatcattttgggttgccg

SEQ ID NO: 134740 - DNA, 367 bp, Homo sapiens
  misc_feature (1)...(367): n = a,t,c or g
ttttttttcaacttcacgacttttatttgtggtgcctgtgctttacaggcccacctggctgaggctggcgggactcttggcacattcttggatccctgctcaggaggggaggggtgacggggtggcatcacacgtgagatggggacctccaggcggccactctggtcctggctactgatccttgcccttcttggtcctcagttccttcctggtcccgtctgtggccctggtcccctctggcaacgtccccctgcttggctcggcctcctacctccatcctggcctcgggtggccccctcggctcctggggactctgctcccctcccagntccgaggtcccaggggggctatggcttctctgagactt

SEQ ID NO: 134741 - DNA, 182 bp, Homo sapiens
cttctgtgtttgctgctagagggcgcttggggctcctggccccggctctgggaagcttctttttggttccgaagcttccccgcgcagttcaccaccgtcttcacccctaccccgcgcagttcgcagttcaccaccgtcttcaccccttccccacgcagttcaccaccgtcttcaccccttcc

SEQ ID NO: 134742 - DNA, 445 bp, Homo sapiens
cggggagggggcagcaaaaaatagaagacgtccctccctattgcacatggaccctatatacaggcccacctggctgaggctggcgggactcttggcacattcttggatccctgctcaggaggggaggggtgacggggtggcatcacacgtgagatggggacctccaggcggccactctggtcctggctactgatccgtgcacttcttggtcctcagttccttcctggtcccgtctctggccctggtcccctctggcaacgtccccctgcttggctcggcctcttcaagctgcacgggactcttagggctggggtgcggcggggaggaggtcggggtaattctggcaagacggagctccttggcctgagtggaggtcccttccagccaggaggaggaagccgagcgctgcagcccagccccaggggcctcgtccgaattcggcagg

SEQ ID NO: 134743 - DNA, 1086 bp, Homo sapiens
atgtccggagaggatggcccggcggctggcccgggggcggcggcggcggctgcccgggagcggcgacgggagcagctgcggcagtggggggcgcgggcgggcgccgagcctggccccggagagcgccgcgcccgcaccgtccgcttcgagcgcgccgccgagttcctggcggcctgtgcgggcggcgacctggacgaggcgcgtctgatgctgcgcgccgccgaccctggccccggcgccgagctcgaccccgccgcgccgccgcccgcccgcgccgtgctggactccaccaacgccgacggtatcagcgccctgcaccagcttgtggcctgggtcacctctacggctggcccagatccttccctgccgcctccttcaggttccgtcttcctccactccctcttccccttgctctctgctgtgttgctgcccaaggatgctctttccggagcacttccttctcggcgctgcaccacgcaggtccccaagcatcgcccccctgctgtggctgttcccaagttcttagggtaccccacgtgggtttatcaaccacttgggcacgtgcggccccttcacagcccgagtttccatgacctcatgctcttggccctcgtagctccctcccgcctcctccagatgggcagctttggagaggcctgcattgatgagaacctggaggtggtgcgcttcttggtggagcagggcgccactgtgaaccaggcagacaacgagggctggacgccactgcacgtggccgcctcctgtggctacctagatatcgccaggtacctcctgagccacggggccaacatcgccgccgtcaacagtgacggggacctgcccctggacctggccgagtcggacgccatggaggggctgctgaaggcggagatcgcccgccgagctctgcctgtgactggtgactccaggcacgtccctgaagcttgcttccctgatttcctaaaacaggaccactggtgccgcttcatggggtggttgtcagggtctggctgggttggagtggaagggtgtgagcatggttcccggcagactccaggggaccgtgtggaaggaaagggagactga

SEQ ID NO: 134744 - DNA, 505 bp, Homo sapiens
gcaccgtccgcttcgagcgcgccgccgagttcctggcggcctgtgcgggcggcgacctggacgaggcgcgtctgatgctgcgcgccgccgaccctggccccggcgccgagctcgaccccgccgcgccgtcgaccgcccgcgcctgtgttggactccaccaacgccgacggtatcagcgccgtgcaccaggcctgcattgatgagaacctggaggcggagcgcttcttggaggagcagggcgccactgtgaaccaggcagacaacgagggctggacgccactgcacgtggccgccttctgtggctacctagatatcgtcaggtacctcctgagccacggtgccaacatcgacgtcgtcaacagagacggggacctgcccctggacctggccgagtcggacgccatgagaggggctgctgaaggcggagatcgcccgccgaggtgtggatgtggaggcagccaagcggacataagaggaattgctccttcatgacacgaggtgctgg

SEQ ID NO: 134745 - DNA, 731 bp, Homo sapiens
tggttttatattaaaaataataaaaatacggtgaaatttctggttgaaatggggaaaaggcttgtgatctccgttttcccaagtgcttagcgctgactcagagaccctgagtgggacacacgactgcatggagtacagttgggaaacaactgggctagtctgggcctcctgagtctcagaggggagcagggggaagagctctgggcaagtcactgggctgaaccctggccagcccagtgtatgaccctgggtatttcaggtcatggggtgtgagtcctacctcgtgcctcttatcctcctaggtgtggatgtggaggcagccaagcgggcagaagaggaattgctccttcatgacacgaggtgctggctgaatgggggcgccatgccagaggcccggcacccccgcacaggcgcctctgccctgcacgtggctgctgccaagggctacattgaggtgatgaggtgagttgggccagtctgttccatcttgctgtcttataccttcctgtggatcttgtcctttccctttctttttaaatgtatgtaccgaaggctatgtatttccctctaaatacagccttagctgtacccacaagttttgatgtgcagtcttttttttattgtcattcagtgtaaaatatttcccaatttgtaatcttttattatttatttattttgagacagggtatagaactcgtgccgaattcttggctcgaggagggatttcaatg

SEQ ID NO: 134746 - DNA, 2943 bp, Homo sapiens
atgcgtgacctgcccggttctcagtggccaccctgcgctaccctctcccagaacctgagctgctctgacgcggccgtctggcaggtccccaagcatcgcccccctgctgtggctgttcccaagttcttagggtaccccacgtgggtttatcaaccacttgggcacgtgcggccccttcacagcccgagtttccatgacctcatgctcttggccctcgtagctccctcccgcctcctccagatgggcagctttggagaggcctgcattgatgagaacctggaggtggtgcgcttcttggtggagcagggcgccactgtgaaccaggcagacaacgagggctggacgccactgcacgtggccgcctcctgtggctacctagatatcgccaggtacctcctgagccacggggccaacatcgccgccgtcaacagtgacggggacctgcccctggacctggccgagtcggacgccatggaggggctgctgaaggcggagatcgcccgccgaggtgtggatgtggaagcagccaagcgggcagaagaggaattgctccttcatgacacgaggtgctggctgaatgggggcgccatgccagaggcccggcacccccgcacaggcgcctctgccctgcacgtggctgctgccaagggctacattgaggtgatgaggttgctccttcaggctggctacgacccagagctccgggacggggaacgggtggactcccctgcacgcagcggcacactggggcgtggaggatgcctgccgcctgctggccgagcatggcgggggcatggactcactgacccatgcggggcagcgtccctgtgacctggccgatgaggaagtactgagcctgttggaggaactggcccggaaacaggaggacggaaggggtgaagacggtggtgaactgcgtggggaaggggtgaagacggtggtgaactgcgaactgcgcggggtaggggtgaagacggtggtgaactgcgcggggaagcttcggaaccaaaaagaagcttcccagagccggggccaggagccccaagcgccctctagcagcaaacacagaaggagctctgtgtgtcgtctgagcagtcgcgagaagatttccctccaggacttgtccaaggagcgccggcctggtggggctggggggccccccatccaggacgaggatgagggggaagaaggtcccaccgaaccaccccctgcagaacccagaaccctcaatggcgtctcctccccgccgcaccccagccctaagagtcccgtgcttgaagaggcccccttctccaggcgctttggcctcctgaagacagggagttctggtgccctgggtccccctgaaaggcggacagcggagggagcccctggggctgggctgcagcgctcggcttcctcctcctggctggaagggacctccactcaggccaaggagctccgtcttgccagaattaccccgaccccctccccgaagctgccggagccctctgtcctgattccggagcctgtaatccccagcgaagccaaacgtccccacagcctccacggggcccccagcggactcccgggaccgacggaggtcctaccagatgcctgtgcgggatgaggagtcggaatcccagagaaaagctcgctcccgtctcatgcgccagtctcggaggtccacacagggtgtgactcttacagacctgaaggaggcagagaaggctgcagggaaggccccagagtcagagaagccggcgcagagcctggacccttcccgaaggccccgcgttccctgggagtggagaactctgacagccctgcccagagagcagaggcgcccgacgggcagggtccgggaccgcaggcggccagggagcaccgcaaggtcggaaaggagtggagggggcctgcggagggggaggaggcggagccggctgaccgcagccaggagtccagcaccctggagggcggcccctcggcccgcaggcagcggtggcagcgggacctcaacccagaacctgagccagaatcggaagagccagacggaggctttaggacgctgtatgcagagctgcgcagggagaacgagcggcttcgcgaggccctgaccgagaccacgctgcggctggcgcagctcaaggtggagctggagcgggccacgcagaggcaagaacgcttcgctgagaggccagccctcctggaactggagagattcgagcgcagggccctggaacgcaaggccgcatagctggaggaggagctgaaggccctgtctgacctccgcgctgacaaccagcgcctcaaggatgagaatgcagcgttgatccgcgtcatcagcaaactctccaagtgacccggagggactttcccgcacccgtatttatacagctgcttctgccaccaccgsaccccttcccccgtgtgaacacgagtgacagggctccgggggaagtctcagagaagccatagcccccctgggaacctccggactygggaggggagcagagttccccaggagccgaggggggccacccgaggccaggatggaaggtgggaagccgagccaagcaggggggacgttgccagaggggaccagggtccagagacggggacccaggaagggaactgagggaccaagaagttgcaaggtttcagtagccagggaccagagttggccgcttgggagttccccatctcacgtgtgattgccaccccgtcacccctcccctcctgagcagggatcccaagaatgtgcgcaagagtccccgccagcctcaagccaggtgggccttgtatatagggtccatgtgcaatagggagggacgtcttctattttttgctgccccctccccgcccacttgtctggggcagggggagaaggtattttcgagataaaagcacaggcaccacaaataaaagtccgtgaagttgccactcaaaaaaaaaaaaaaaaag

SEQ ID NO: 134747 - DNA, 456 bp, Homo sapiens
tgagcatagtgacttagagactctgtgtatcagttttgccaataagactgtggacttcatgattgttgttgaacttctgggtcaaaactcaaattacttgcttgagccttaatcaatgtggttttattcaatggtttgttctttgaatggttgcaaaaactgtagataatcttactgaggactgtacaaacatgaaggtgtggtatcaaacttcaggttgaaactgtttgaagcattataaacattcatttcacaactagattgtataaggatattagctgtgatgagactcactgcattattttttttagtgaattttatgaaatccccgttccattcaacaggcacatgtttaaaagagctttgtcgttggtgttaatgggggaatgtgttccttcattgtatttgggccttttgtattgcactcttgatattaaatttaatgtgccttgaaat

SEQ ID NO: 134748 - DNA, 412 bp, Homo sapiens
cccacgcgtccgcccttactgagcttgctgagctccggggcccgcggagctcgcgccaggctcctgggaaaggacggggagtgttaccggggagcagctgctccattgtgcctcgaggccccgatcgggctaggccgacggcctccctcccttcacctttcctctcctggcggggttcggcggcgggcgagtgactgcggccacgcctgaaaggcgactctcctgattcaagatgaccaacgaagaacctcttcccaagaaggttcgattgagtgaaacagacttcaaagttatggcaagagatgagctaatcctaagatggaaacaatatgaagcctacgtacaagctttgggggggcaggacaccagaccttaacctctaagaaggaacctggcccaaaaaaaagcccgg

SEQ ID NO: 134749 - DNA, 2016 bp, Homo sapiens
atgaggcagggtccctatggtggagggtatagaggctatgatgactatcgtggctgtaatgatggatatggctttaggtctgatagatttggaaaagaccgcaattactgtttttcaggaatgtctgatcatagatacggagataagcagtgtgagtggtggttatggaggtggttatggaggtcagagcagctgagtggtggttatggaggtggttatggaggtctgagcagtgtgagtggtggttatggaggtggttatggtgatcagagcagtgtgagtggtggttatggaggtggttatggagctgagtggtggttatggaggtggttatggaggtctgagcagccgagtggtggttatggaggtggttatggaggtctgagcagtgtgagtggtggttatggaggtggttatggaggtctgagcagtgtgagtggtggttatggaggtggttatggtgatcagagcaatgtgagtggtggttgtggaggtggttatggtgatcagagcaatgtgagtggtggttatggaggtggttatggtgatcagagcaatgtgagtggtggttgtggaggcggttatgagctgttgagtggtggttatggaggtggttatggaggtcagagcagtgtgagtggtggttatggaggtggttatggaggtcagagcagtgtgagtggtggttatggaggtggttatggtgatcagagcaatgtgagtggtggttgtggaggtggttatggtgatcagagcaatgtgagtggtggttgtggaggtggttatggtgatcagagcaatgtgagtggtggttatggaggtggttatggtgatcagagcaatgtgagtggtggttatggaggtggttatggtgatcagagcaatgtgagtggtggttgtggaggcggttatgagctgttgagtggtggttatggaggtggttatggaggtcagagcagtgtgagtggtggttatggaggtggttatggaggtcagagcagtgtgagtggtggttatggaggtggttatggtgatcagagcaatgtaagtggtggttgtcgaggcggttatggaggcactaaagaaacatttttcaatgttataaacgatattaaagttggtctgactctcctttgcacagaactgaatgacttcatcatccagcttgatgaagaagtagagggtatgcagagtaccattctagttctgcagcagcagctgaaggagacacgccagcagttggctcagtaccagcagcagcagtctcaggcctctgccccaagtaccagcaggactacagcttctgaacctgtagaacagtcagaggccacaagtaaagactgcagtcgtctgacaaacggaccaagttatggagagtcgcctttcaggcgtggccgcagtcactcgcccgccgccgaaccccgccaggagaggaaaggtgaagggagggaggccgtcggcctagcccgatcggggcctcgaggcacaatggagcagctgctccccggtaacactccccgtcctttcccaggagcctggcgcgagctccgcgggccccggagctcagcaagctcagtaagggaagcggccgaggggaggggcgggccagcgaggtcggaggtcagccccagggcatcacgggaagggaaggtggaagtactcgccggggccacctgcggctgcggggctgcctcgtgcggagggatctgggcgaaggcggcgcgtgattggccgctctgtgttcgtgacgctcatccgttgatgcttcagcgtgtcggaggaccaggtgccacctcaagatataggccgtgggcggcgagccgcgggcgtttactcttagcagaagctcaccttcgtgaggcgcagtctcctggccgctgggttcgttcctccttgacatctctggagacgcatcgaggagctattgttctctggcgtcggaggttgcgctgtgtccgcggcgttgagggccccttgctaactggaacacggggaaggcggccctgtgaggtttag

SEQ ID NO: 134750 - DNA, 3028 bp, Homo sapiens
  misc_feature (1)...(3028): n = a,t,c or g
ttttttttttttttttttaattccctgactcttttaaatggtgcaattgtgtcctactgtatggatgcaccattcccaatcagttccctattaacggatatttgggttatccctaacttttgctatgacaaatagcactgcaataaccttgtatacctattgtttccatgtgtggagctgcaccttcagaataaggttagggttagaagtataactgcaaggtataagaataaacacaagtaattttgtactccgtggaacttgaaccatttttccactcccaccaggaaaggtaatttcaacgtgtatttccattgtaagtgaggtggagcgactttctatgtttaaagaccattacggtattttttctgagaatcatctgttcatgtccttccccattttctcctttggcttttgcactttttgttttcaatttttgagagctcttgtgatnccgagttgcaaagattttctccagaccgatctgattcactggaaatatactacgacccatcttggaatgtactttaatcttatcctaataaatcacctttacttacaagacacttcttttggggatgaacaggttcgataaagccggctaaggacagaccaatcaaaagaattacgtgctcttctagtaagtgtttagagacttgtttcacgttctccagggtaaacacgccattactcggcggtccagatggcagtcttgcttcagggagtctactccacttgcaggacctctttgattgagttcactaaacctcacagggccgccttccccgtgttccagttagcaaggggccctcaacgccgcgggacacagcgcaacctccgacgccagagaacaatagctcctcgatgcgtctccagagattgtcaaggaggaacgaacccagcggcccaggagactgcgcctcacgactgatgagagggaaggcatcggtttctaagttctcaaaacttacaggtgagcttctgctaagagtaaacgcccgcggctcgccgcccacgggctctctctcgtgaggtggcacttggtcctccgacacgcggaagcatcacggatgagcgtcacgaacacagagcggccaatcacgcgccgccttcgcccagatccctccgcacgaggcagccccgcagccgcaggtggccccggcgagtacttccaccttccctttccgtgatgccctggggctgacctccgacctcgctggcccgcccctcccctcggccgcttcccttactgaaaaaaataagctccggggcccgcggagctcgcgccaggctcctgggaaaggacggggagtgttaccggggagcagctgctccattgtgcctcgaggccccgatcgggctaggccgacggcctccctcccttcacctttcctctcctggcggggttcggcggcgggcgagtgactgcggccacgcctgaaaggcgactctcctgattcaagatgaccaacgaagaacctcttcccaagaaggttcgattgagtgaaacagacttcaaagttatggcaagagatgagttaattctaagatggaaacaatatgaagcatatgtacaagctttggagggcaagtacacagatcttaactctaatgatgtaactggcctaagagagtctgaagaaaaactaaagcaacaacagcaggagtctgcacgcagggaaaacatccttgtaatgcgactagcaaccaaggaacaagagatgcaagagtgtactactcaaatccagtacctcaagcaagtccagcagccgagcgttgcccaactgtagatcaacaatggtagacccagcgatcaaccttgtttttccctaaaaatgaaaggtgaacttggaacagacttaaggacaaacttgggaacaagcccataatgaactgagtgcctgggaagtttacggctgataggtaaacaaatcatactccccagtcaagacttccctgacagtcccacttacgagaaagctgtggtgggacagccaagtactcgtttccacaccaagactcagactttttgagccaaaaaaaaagccacattcttacattgtccagcttgtaatggttaatgtaaaacttaccagatgaaccttgtgtttcagcttttttcttttccccttccccttgcttcaaaggcctgatggcgtcggactattccgaagaagtggccacctccgaaaaattccccttctagaacatgtatgtcacttgagaaatgtttctgtttgaagaaaatagagggagaaacagaagtcttaagtctgtgggcacactgtgtcttcagacagtttgaagggaatgaaaacctaggagattttaaatcatggaattggaacatgttaaaattcccagttaaaatgttaaaaacgggattatggcattcgctctttaaccttgaggcattagtgacttaggaggacactgtgtattcagtttttgcccaataaggactgtgggactttcatggattgttgttggaacttctgggggtccaaaactccaaatggagggtgaattttgccctttaaagggtttatttgctgagaaccaactttcaatagtcatgagagaatcaaataatagatgtccgtacaagtagcgcatatatttaacccatttagtttggggctctatattacttgcttgagcccntaatccaatgtgggttttattccaatggtttgttcccttgaatggttgccaaaaactgtagataatcttacctgaggactgtacaaacatgaaggtgtgggtatcaaacttcaggttgaaactgtttgaagcattataaacattcatttcacaactagattgtataaggatattagctgtgatgagactcactgcattattttttttagtgaattttatgaaatccccgttccattcaacaggcacatgtttaaaagagctttgtcgttggtgttaatgggggaatgtgatccttcattggatttgggccttttgtattgcactccttgatattaaattaaatgtgccttgaaataaaaaaaaa

SEQ ID NO: 134751 - DNA, 1059 bp, Homo sapiens; identical to SEQ ID NO: 114869

SEQ ID NO: 134752 - DNA, 933 bp, Homo sapiens; identical to SEQ ID NO: 117142

SEQ ID NO: 134753 - DNA, 930 bp, Homo sapiens; identical to SEQ ID NO: 123808

SEQ ID NO: 134754 - DNA, 248 bp, Homo sapiens
tgtccctcaaccactttctcctttccactcttcaatctcttccttctcttaatttcaattcctttcattttctggtagagacaaaggagacacgttttatccgtggacccaaaactctggcgccagtcatggaccggcagccactcccagagcccctggaactctggcccaaggctctcagactccttcccagatcttcttggcttagcggctgaagactgacgctgcccaatcgcctcggaagcccc

SEQ ID NO: 134755 - DNA, 408 bp, Homo sapiens; identical to SEQ ID NO: 114871

SEQ ID NO: 134756 - DNA, 1134 bp, Homo sapiens; identical to SEQ ID NO: 134549

SEQ ID NO: 134757 - DNA, 525 bp, Homo sapiens; identical to SEQ ID NO: 116093

SEQ ID NO: 134758 - DNA, 696 bp, Homo sapiens; identical to SEQ ID NO: 116192

SEQ ID NO: 134759 - DNA, 675 bp, Homo sapiens; identical to SEQ ID NO: 114877

SEQ ID NO: 134760 - DNA, 1107 bp, Homo sapiens
atggagcaagatggcagaatagaagtctccactgattgtcttccccacaacgacaccaatgtaacaattatctatacacagccaagcaccttcataagaaccaaaaatcaggtgaacactcacagtacctggttttacttcatagcgctgaaagaagcactgaagagggcgattccaaggcgatcgggcagtgtcagtcttcagccgctaagccaagaagatctgggaaggagtcagagagccttaggccagagttccaggggctctgggagtggctgccagggaaggcccatggcctgctatgttagtccattttctattatgatagctgaataccgcagactgggtaatttacagagaaaagaaagtttttttcagctcatagttctagagctgctaagttcaagagcgtggcactggcatctggtgagggtcatcccatggcagaaggctggaaggaaagatatagtatcactctgtgatattcctgttacaaatgcacagtctgaatctaagcacaaggaaacatcagacaaatccatattaaaggacactttgcaaaataaatggcttgtgtttgcccacaatttcaacatcatgaaagacaaagaaaagaatatagatctaggaggaagagtgaatgatcattgtgttctggatggcaaaaatgttttcctcacaacttgcagtggcagtctgtgtggctgtgttgagaaagattctgatgacatggtacatgagcctgaagacactgtggccaccaagaggacacaagtgatttccaggggtgtggcagatgaaggccatcagctaacagtcatcatcccaacaggttctctcttgagggaaatatccctagaacttaatcatcgagcagaactaaaattttacacccatcgaacaacaactctccactttcccagtccccaacccctggaaaccactattgtattctatgcttctggcagaccttctatcttatttgcctttaccatctgctgtctccccaccctcactccaggggcattagagattctgatcactaacaaaactgaagatgttgggacaggtgacttacaaggcttacagacagcaagccttctgtga

SEQ ID NO: 134761 - DNA, 774 bp, Homo sapiens; identical to SEQ ID NO: 116096

SEQ ID NO: 134762 - DNA, 203 bp, Homo sapiens
tggtggattatcattagttcttacaggttttgggatagggggtgaagagccatgttttgcaggcaggggtggatctcacaaagtacattctcaagggtggggagaattacaaagaaccttcttaagggttggggagattacaaagtaccttcttaagggtgggggagattacaaagtacattgaagagttagggtggggcaga

SEQ ID NO: 134763 - DNA, 420 bp, Homo sapiens; identical to SEQ ID NO: 114509

SEQ ID NO: 134764 - DNA, 1347 bp, Homo sapiens
atggggagtcaggaggcaaatggagtgaagagtaagcacggccacagcctctattgtggcttccgtggaaggaatgggggaaccaggggggcttccgaggcgatccggcagcgtcagtcttcagccgctaagctgagaagatctgggaaggagtcagagagccttgggccagagttccaggggctctgggagtggctgccagccttgggctcctgtctacagcagcccaaggcaattccacttggtcaccccgataagtctccatcatccaaatggctgggaccacattcaactcctctttctcctcagccagcatctgtccacacttgcctgtttctagcctttcttcttccggacactcaagaaaattttcttaatcttatattccatactacaaaaactaacaatggattgcattcctccttgtgtttgctttactgggtgtctacttcacctaaagattcttatgagatccagccccaggggccattaaactgccagagccttttgttctggggctccctcaaaagtgagatgacccaaggtctgtgcagatccaccagcacaccattccacggtggagaggaacagaacgtgccatcacagtgggtggcccaatcccacaggagggagaacagaacggtgggaggtgaagccttcccaggtcaccctcctgcaagtgccatcacagtgggtgacccaatcccacaggatggacaacagaatgttgggaggaggaaattcaaaccaaaaggtgaagaagttgaaaactttgaaaaaaatttagacgaatgtataactagaataaccaatacagagaagtgcttaaaggagctgatggagctgaaagccaaggctcaagaactatgtgaagaatgcagaagcctcaggagctgctgtgatcaactggaagaaagagtatcaatgatggaagatgaaatgaatgaaatgaaaccaaatctgcgtctgattggtgtacctgaacgtgactgggagaatggaaccaagttggaaaacactctgcaggatattatccaggagaacttccccaatctagcaaggcaggccaacattcagattcaggaaatacagagaacgccacagagatactcctcgagaagagcaactccaagacacataattgtcagattcaccaaagttgaaatgaaggaaaaaatgttaagggcagccagagagaaaggtcgggttacccacaaagggaagcccatcagactaacagcgatctctcggcagaaactctacaagccagaagagagtggggcccaatattcaacattcttaaagaaaagaattttcaacccagaatttcatatcctgccaaactaa

SEQ ID NO: 134765 - DNA, 411 bp, Homo sapiens; identical to SEQ ID NO: 114508

SEQ ID NO: 134766 - DNA, 793 bp, Homo sapiens
atgccccgtgtgctctcacaacctaaacagtcggtgaggctagagtttctccatcctggtgctcctcttctgcgttacacgggtactgtccctgtcccacctgaaacatgtgacagaaacatacatgttaaaccagcaaagagttcaggatatcaaaaccttctttttttcctggttgtaattcatgcatttggagaacgcattgagggggcttccaaggcgatcgggcagcatcggtcttcagccgctaagccaagaacatctgggaaggagtcagagagccttgggccagagttccaggggctctgggagtggctgccaggtgagttggacagtccgatttccagtggggtcccacacagatgggatgtggcttaggaggaatcctgggctgcaggcattccttggcccggtggccagatttctggaacttgtagcaagctcctcggggaggaggttctggaggaacacctggctgctgcagttcaggcgtttggaagttcttgtgtgctggagatgtggctggggtttgtctcacagtggaggcaaggaactgcaacttttttctattattgtacaccttgaaggtgaggttaattaaatccttgactatgcctttagctccagccacctttttaagagtaaattgctgggcaggagggggagggctagtcatggaaggaaactgtaagccggaccaggtgtgaggaggggaggcgataaaaggattatagggtggaggagcggaggctgaggaagaattgggacctagctcggtctggcgaggagcagc

SEQ ID NO: 134767 - DNA, 1634 bp, Homo sapiens
aaggcggaggtttcagtgaccgagatcgcaccatcgcactccagcctgggcaacaaatatggatgtggggaataggcaagcaggtaggtggatgtggctggctgcgtggaaagaacagggtggtgggggcagccaaggatcaatcaggcactggtgagaagttctacttcatcccgaaggcaatgggagccatggagggctctggacagaggagaacattgccagacccaggtgctcacaggaacccttctgggggctacagcgcaacagattgtgaagggagccggcctgcaccaggtgaaataaacagccatgcttctcacacaaagcctgtttggtggttcttcacacagacgcgcatgaaatttggtgccgtgactcggatcgggggcctcccttgggaggtcaatcccctgtcctcctgctctttgctccgtgagaagatccacctaccacctcaggtcctcagtccaaccagcccaaggaacatctcaccaattttaaatcaggagcttgctacacgtgccggaaatctggccactgggccaaggaatgcccgcagcccgggattcctcctaagccgcgtcccatctgtgcgggaccccactggaaatcggactgttcgactcacctggcagccactcccagagcccctggaactctggcccaaggctctctgactgactccttcccagatcttctcggcttagcggctgagactgacgctgcccgatcgcctcggaagccccgtagaccatcacggacgctgagcttcgggtaactctcacagtggaggcagtttaaattctagtgaagtgatggaatatagagcaggggaaaggacagagggagtttgcgagtcgacaaggcagaaactggagtacacgagtgctggaaccagctggctgctttggcactggcaggagcgaactccatgcactctgacctgctatgttccacccctcatgggagggagcatgcagcctctctcactgtccctcaaccactttctcctttccactcttcaatctctcccttctcttaatttcaattcctttcattttctgggagagacaaaggagacacgttttatccgtggacccaaaactccggtgccggtcacggactgggaaggcagccttcccttggtgtttaatcattgcagggacacctctctgattatacacccacgtttcacgggtgtcagaccacgcagggacgcctgccttggtccttcacctttagcggcaagtcccgcttttctgagggaggggcaagatttaactaacctcgccttcaaggtgtacaataatagaaaaaagttgcaattccttgtccccactgtgagacaaaccccagccgcatctccagcacacaagaacttccaaacgcctgaaccgcagcggccaggtgttcctccagaacctcctcccccaggagcttgctacaagtgccagaaacgtggccaccaggccaaggaatgcctgcagcccaggattcctcctaagccacgtcccatctgtgccggaccccactggaaatcggactgtccaactcacctggcagccactcccagagcccctggaactctggcccaaggctctctgactgcttcccagatcttcttggcttag

SEQ ID NO: 134768 - DNA, 886 bp, Homo sapiens
atgatcgggtcagagaaaaagcacaaggcagctcagaggtattacttctcagtatggcatccccatttgaaacagctgcaaaacaagccacagcttgggaatgtggcaaggtttcagcagcgtggaggtgaaaggcaagagttgcatggacagattctctgcaaggtgctgagcaaggtagcagacatgccaggtcttgagtgcattgtgtctagaggtagagcacagaggaggaaaagggggattctgaggcgatcgggcagcttcagtcttcagccgctaagccaagaagatctgggaaggagtcagtcagagagccttgggccagagttccaggggctctgggagtggctgccaaggtgagttggacagtccgatttccagtggggtcccgcacagatgggacgcagcttaggaggaatcccgggctgcaggcattccttggcctggtggccagatttctggcacttgtagcaagctccttccagaaaagcgggaaaggggttgggtcgtggaaataaggggttggggtgcagagataagaggtcggggcatggaaataagggattggggcacagagatataagaggttggggtgcagaaataagggattgggccacagagataagaggtcggggcgtggaaataagggactggggcacagagatacgaggttggggtacttgctcctctagaaaagcggacttgccactcagggtgaaggagaaggggttgggtgtttcttgccccccagaaaggcggagaaggggtagagacacagagagaaggggttggggtacttgccccttccccagaaaagcgggacttgccgctaagggtgaaggaccaaggcaggcgtccctgcgtggtctgacacctctgaaac

SEQ ID NO: 134769 - DNA, 1713 bp, Homo sapiens
tagacgctcctttttattaggccccagtctcattccagacaccagaccaacttagactgtggcccaaaaaacttgtcatccctactatcttctgtctagtcatactcctattcaccgttctcaactactcatacatgccctgctcttgtttacactgccggtttacactgtttctccaagccaatcacagctgatatctcctggtgctatccccaaaccgcccaccactcttaactccctcttaaagtaaataaataatctttactggcagggctatgctgaacctccttgggcactcatctaatcagatatcctgagtcgtcccaattcttagaccttttatacctgtttttctcctcttattcggaccttgtgtcttccgtttagtttttcaattcatccaaaaccggtatccaggccatcaccaatcattctatatgacaaatgtttcttcttacatccccacaatatcaccctttaccacaagacctcccttcagcttaatctctcccactctaggttcccacgctgcccctaatcccacttgaagcagccctgagaaacatcgcccattctctctccctaccacccctcaaaaattttcaccaccccaacacttcaacactattttgttttatttttcttatgtaatataagaaggcaggaatgtcaggcctctgaggcccaagccaagccatcgcatcccctgtgacttgtgcgtatacgtccaggatgggcctgaagtaactgaagaatcacaaaagaagtgaatatgccttgccccaccttaactgatgacattccaccacaaaagaagtgtaaatggccggtccttgccttaactgatgacattaccttgtgaaagtcctcttcctggctcatcctggctcaaaaagcacccccactgagcaccttgagacccccactcctgcccgccagagaacaaaccccctttgactgtaattttcctttacctacccaaatcctataaaacggccccacccttatctcccttcactgactctcttttcggactcagcccgcctgcacccaggtgaaataaacagctttattgctcacacaaagcctgtttggtggtctcttcacacggacgcacatgaaatttggtgccgtgactcagatcggcggacctcccttgggagatcaatcccctgtcctcctgttctttgctccatgagaaagatccacctacaagctcaggtcctcagaccgaccagcccaaggaacatctcaccaattttaaatcggagaaaaaggagacacgttttatccgtggacccaaaactccggcaccggtcatggactagggaaggcagccttcccttggtgtttaacctttgcagggatgcctctctgattattcacccaggtttcagaggtgtcagaccacgcagggacacctgccttggtccttcacccttagcagcaagtcccacttttctgggggaaggggcaagagcttgctacaagtgccagaaatctggccaccaggccaaggaatgcctgcagcccaggattcctcctaagctgtgtcccatctgtgcgggaccccgctggaaatcggactgtccaactcacctggcagccactcccaaagcccctggaactctggcccaaggttctctgactccttcccagatcttcttggcttagcagctgaagactgacgctgcccaatcgcctcggaagccc

SEQ ID NO: 134770 - DNA, 1476 bp, Homo sapiens
  misc_feature (1)...(1476): n = a,t,c or g
tttgtgtgagcaataaaaaatgtttatttcacctgggtgccggtgggctgagtccgaaaagagagtcagtgaaggaagataggggtggggctgttttataggatttgggaaggtaataaaaaattacaatcaaagggggttgttctctggtgggcaggggtggatctcacaaagtacattctcaagggtggggagaattacaaagaaccttccttaagggtggggggagattacaaagtacattgaatcagttagggtggggccaggaaaacaaatccacaatggtggaaatgtccatcaagttaaaggctgtttttaccttccttttgtggaaccttccagttaacttccaggcccatcctggatgttacacgtgccaagtccacagggggatgcgatggccctggcctggggcttcagaggccttgacattcctgccttctgatattaataagacaaataaaacaaaatagtgttgaagtgttggagcggcgaaaatttttggggggtggtatggagagagaatgggcgatgtttctcagggctgcttcaagtgggattaggggcggcgtgggaacctagagtgggagagattaagctgaagggaggtcttgtggtaaggggtgatattgtggggatgttagaggacacaaaggaggctttggattgggaaaaaaggccaccaatgagatgttagctgtactccccggaatagtcagggaagccagataatttggttaaaatatttcggcccctaataaggaaaatgggnccaggtggggaataactaaaaaagagtgcataaaagagtgttgtcccaattggcacccagagtgggggagttttccaggggttttgaagcttggccgtcaataccccacaacagttatgggggcaagggaaacaggcccttgaaaagaaggcaacgtggagtgggtagcccccgtatcgattaaacaggggatggacttaccctccactgtgagagttacccgaagctcggcttctgtgatggtccaggggacttccgaggcgatcgggcagcgtcaatcttcagtcgctaagccaagaagatctgggaaggagtcaaagagccttgggccagagttccaggggctctgggagtggctgccagaaatttatttctcacagttccggaggctgggaaatccaaaatcaaggcaccagcagattcaatgtctgatgggggcctgctttgtggtaacagaaagactctccttccaggattctctagacctggcagaaccaagacattcctatcctctccaggtgaaaaggctagatctcccaacagttctagaaactgaaacagatctagaaaagctagatccttttacaacaatcccttctccagtggaaactctccaatgcctttttgtctcactcagaataaaatccagagtccctatcatggacttgaaggcccttagtgatctgacccctcttgatccctga

SEQ ID NO: 134771 - DNA, 397 bp, Homo sapiens
acgaggcctgtatctctgctggcaccatcactgaccgtatcttcctgcagaccctggacacgcaccaccgccatcatctacactacaccagccgccagctctgccccacagacaagaccatggagttcggccgagacttccggatcaagcactatgcaggggacgtcacgtactccgtggaaggcttcatcgacaagaacagagatttcctcttccaggacttcaagcggctgctgtacaacagcacggaccccactctacgggccatgtggccggacgggcagcaggacatcacagaggtgaccaagcgccccctgacggctggcacactcttcaagaactccatggtggccctggtggagaaccttgcctccaaggagcccttctacgtccgctg

SEQ ID NO: 134772 - DNA, 333 bp, Homo sapiens
gggcagggcgggggcggtggggcctcccgtagccttccctccccctctccttcactgtccttccagcaggcacaggaaggtgaggcaaggtgtttccagccggcaggatggaggacgaggaaggccctgagtatggcaaacctgactttgtgcttttggaccaagtgaccatggaggacttcatgaggaacctgcagctcaagggagagtggggcagggaagacagaagccagtaagcacatcatgcagtacatcgctgctgtcaccaatccaagccagagggctgaggtggagagggtcaaggacgtgctgctcaagtccacctgtgtgctg

SEQ ID NO: 134773 - DNA, 3588 bp, Homo sapiens
gataccgctccggaatttccgggtcgacgattctcgagccgacccacggagtcttgtctcctgcttgtgggtggaggggagcttccgaaggaggccagcgaagaaccctgcaaagctggggaggacccagcatccggcccctcgcccctggcgagcaaacgggtcagaccgttaggcacagcctccttgtggagcgcacggacaggaagcagggtttatagcacctagagggggaaggagtggcaagtgcggagggcagcccctcccaggactagaacccacttcctactttacaccagcactggaggaggctggtggggcagggcgggggcggaggagcctcccctagccttgcctccccctctccttcactgtccttccagcaggcacaggaaggtgaggcaaggtgtttccagccggcaggatggaggacgaggaaggccctgagtatggcaaacctgactttgtgcttttggaccaagtgaccatggaggacttcgtgaggaacctgcagctcaggttcgagaagggccgcatctacacctacatcggtgaggtgctggtgtccgtgaacccctaccaggagctgcccctgtatgggcctgaggccatcgccaggtaccagggccgtgagctctatgagcggccaccccatctctatgctgtggccaacgccgtctacaaggcaatgaagcaccggtccagggacacctgcatcgtcatctcaggggagagtggggcagggaagacagaagccagtaagcacatcatgcagtacatcgctgctgtcaccaatccaagccagagggctgaggtggagagggtcaaggacgtgctgctcaagtccacctgtgtgctggaggcctttggcaatgcccgcaccaaccgcaatcacaactccagccgctttggcaagtacatggacatcaactttgacttcaagggggacccgatcggaggacacatccacagctacctactggagaagtctcgggtcctcaagcagcacgtgggtgaaagaaacttccacgccttctaccaagccttggacagtgatgagcagagccaccaggcagtgaccgaggccatgagggtcatcggcttcagtcctgaagaggtggagtctgtgcatcgcatcctggctgccatattgcacctgggaaacatcgagtttgtggagacggaggagggtgggctgcagaaggagggcctggcagtggccgaggaggcactggtggaccatgtggctgagctgacggccacaccccgggacctcgtgctccgctccctgctggctcgcacagttgcctcgggaggcagggaactcatagagaagggccacactgcagctgaggccagctatgcccgggatgcctgtgccaaggcagtgtaccagcggctgtttgagtgggtggtgaacaggatcaacagtgtcatggaaccccggggccgggatcctcggcgtgatggcaaggacacagtcattggcgtgctggacatctatggcttcgaggtgtttcccgtcaacagtttcgagcagttctgcatcaactactgcaacgagaagctgcagcagctattcatccagctcatcctgaagcaggaacaggaagagtacgagcgcgagggcatcacctggcagagcgttgagtatttcaacaacgccaccattgtggatctggtggagcggccccaccgtggcatcctggccgtgctggacgaggcctgcagctctgctggcaccatcactgaccgaatcttcctgcagaccctggacatgcaccaccgccatcacctacactacaccagccgccaggtgcccccggctgtcccagtgccaccacagtgggctgacaagaccatggagtttggccgagacttccggatcaagcactatgcaggggacgtcacgtactccgtggaaggcttcatcgagcgagaacagagatttcctcttccaggacttgaagcggatgctgtacaacagcacggaccccactctacgggccatgtggccggacgggcagcaggacatcacagaggtgaccaagcgccccctgacggctggcacactcttcaagaactccatggtggccctggtggagaaccttgcctccaaggagcccttctacgtccgctgcatcaagcccaatgaggacaaggtagctgggaagctggatgagaaccactgtcgccaccaggtcgcatacctggggctgctggagaatgtgagggtccgcagggctggcttcgcttcccgccagccctactctcgattcctgctcaggtgtggggtgggcagggtgggctccatcatctctcccccaggcctgggccacactgccctgtccttgtggtgacaggtacaagatgacctgtgaatacacatggcccaaccaccttgctggggctccgacaaggcagccgtgagcgctctcaaggagcagcacgggctgcagggggacgtggcctttggccacagcaagctgttcatccgctcaccccggacactggtcacactggagcagagccgagcccgcctcatccccatcattgtgctgctattgcagaaggcatggcggggcaccttggcgaggtggcgctgccggaggctgagggctatctacaccatcatgcgctggttccggagacacaaggtgcgggctcacctggctgagctgcagcggcgattccaggctgcaaggcagccgccactctacgggcgtgaccttgtgtggccgctgccccctgctgtgctgcagcccttccaggacacctgccacgcactcttctgcaggtggcgggcccggcagctggtgaagaacatccccccttcagacatgccccagatcaaggccaaggtggccgccatgggggccctgcaagggcttcgtcaggactgggactgccgacgggcctgggccctagactacctgtcctcaggccactgacaatcccacagcatcaagcctgtttgctcagcgactaaagacacttcgggacaaagatggcttcggggctgtgatcgttttcaagcccatgtccgcaaggtgaaccgcttccacaagatcctgaaccgggccctcctgctcacagaccagcacctctacaagcttgaccctgaccgtcagtaccgggtgattgcgggcccgtgccccttgaggcggtgaccgggctgagcgtgaccagcggatgagaccagctggtggtgctgcacgcccgcggccaggacgacctcgtggtgtgcctgcaccgctcccggccgccattggacaaccgcgttggggagctggtgggcgtgctggccgcacactgccaagggggagggccgcaccctgggaggttgcgcgtctccgaactgcatcccacttaagccatcgcggggtccggcgcctcatttccgtggagcccaggccggagcagccagagcccgatttccgctgcgctcgcggctccttcaccctgctttggcccagccgttgagcgcccgcacccgccgcaccccgaggccgccaattgtccgccccgccagcgctgcaaataaaccttttgagtcagcaaaaaaaaaaaaaaaaaaaaaaaaaaaaa

SEQ ID NO: 134774 - DNA, 276 bp, Homo sapiens
ttcaggcgatctttattggccagaacaatatccaatgttgacttggccaccatgggagagtgtttgccattatgtggatttatgtagttatagaggtcttccatcacataggatcaacaaaatccatattgagtccataacaaagcttctggattcgagatgtaattttgtcaaacatgactcgttcttggcggccatctcgcttgatcacatgcatcgcagctagtggctgaggctctgaaggatccaagactggactgcggctctaaagcgccg

SEQ ID NO: 134775 - DNA, 477 bp, Homo sapiens
atgtttgacaaaattacatctcgaatccagaagctttgttatggactcaatatggattttgttgatcctgctcagatcaccatgaaagtaatccaaggcttgtacagtggggtcaccacagtggaactagatactttggctgctgaaacagctgcaaccttgactactaagcaccctgactatgctatcttggcagccaggatcgctgtctctaacttgcacaaagaaacaaagaaagtgttcagtgaactacacaaggcactgccacaggtccaggctgccagggaagtttctctgctacttgggccatctgatccatcagatccagtggtgcttgaagtggcagtggcagatagagatgctcattggaggctttggcagacccctgtaagtgaatcacaggacaggcccttaggattttggaccgaagccctgccatcatcccctgtgggtaactactctccttttgagaaatag

SEQ ID NO: 134776 - DNA, 1926 bp, Homo sapiens
atgagcataccagaaattcctgatgacctgaagcaactttataaaactgtgtgggaaatctctcagaaaactgttctcaagatggcagctgagagaggtgctttcattgatcaaagccaatctttgaacatccacattgctgagcctaactatggcaaactcactagtatgcacttctacggctggaagcagggtttgaagactgggatgtattatttaaggacaagaccagcggctaatccaatccagttcactctaaataaggagaagctaaaagataaagaaaaggtatcaaaagaggaagaagagaaggagaggaacacagcagccatggaagactgcatcagcacattaccttgcctgctggctttcagtggcttcagccaaatttcactccccactagagtaggaggttgggagaacactgaggtcagggagttggttcccctggctccctctctgccagatgcccatgttctacttccctgggaatatgaagaaagcggaggtcagagtcatgtgcttgctggcactgaagatgaagaaagatgggggaagaggacaccagacaaggaatctgggcagcctctggaagcagctaaaggcaaggaaacaggttctcccctaagtcctccagaaaggaatgcaaatcctgccgacaccttggttttagcccactgttttcttctgagtatgaaagatgacagcattgaaggcatttatgacactctaaagcaatgtgcattgatttctaagtctgctggaggaattggtgttgctgtgagttgtattcgggctactggcagctacattgctgggactaatggcaattccaatggccttgtaccgatgctgagagtatataacaacacagctcgatatgtggatcaaggtgggaacaagagaataaaatacctaggaatccaacttacaagggatgtgaagcacctcttcaaggagaactacaaaccactgctcaatgagataaaagaggacacaaacaaatggaagaacattccatgctcatggataggaaaaatcaatatcgtgaaaatggccatattgcccaagattcagtgccatgcccatcaagctaccaatgaattttttcacagaattggaaaaaactactttaaagttcatatggaaccaaaaaagagcctaagccaaaagaacaaagctggaggcatcatgctacctgacttcaaactatactacaaggctacagtaaccaaaacagcatggtaccggtaccaaaacagagatctagaccaatggagcagaacagagccctcagaaataataccacacatctgtaaccatctgatctttgacaaacctgacaaaaacaagaaatggggaaaggattccctatttaataaatggtgttgggaaaactggctagccatatgtagaaagctgaaactggatcccttccttacaccttatacaaaaattaattcaagatggattaaaaacttacatgttagacctaaaaccatgaaaaccctagaagaaaacctaggcaataccattcaggacataggcatgggcaaggacttcatgtctaaaacaccaaaagcaatggcaacaaaagccaaaatggacaaatggagtctaattaaactaaagagcttctgctcagcagaagaaactaccatcagagtgaacaggcaacctacagaatgggagaaaagttttgcaatatactcatctgacaaagggctaatatccagaatctacaaagaactcaaacaaagttacaagaaaaaaccccatcaaaaagtaggcgaaggatatgaacagacacttctcaaaagaagacatttatgcagccaacagacacatggaaaaatgctcatcgtcactggccatcagagaaatgcaaatcaaaaccgcaatgagataccatctcacaccagttag

SEQ ID NO: 134777 - DNA, 1242 bp, Homo sapiens
  misc_feature (1)...(1242): n = a,t,c or g
atgaacaagagattcaggagcatggtggatgaagatctgactgtgcctggtcgtcctggggcatttgctatttacctggagccttggcatttagacatctttgaattccttgatttaaagaagaacacaggaaaggaagagcagcgtgccagagaatcttcttcttcgccctttgggattccgggatctctttcatgaaaccggttggcacctaatcaggactcggtctttgatgtgtccaaatggatgctcctggtctggatgagggtttgggggagagggaatttgagaaacctatatgcaagttatgagaaacaagggtcgtgtccgcaaaagttgtaaaagctcagcagctttggtatgccatccattgagtcttcagacgggaaacggggcacccccgtatatgcctcctacaaagattccctgtaatccgnaaagagcaacccagccagaaccccgggaacccatcaaatgccagcaaccctgtgccacagaaatagtggagtacacccagcaaagatgaggttgcctgtttgtaatttgggcttccctgggccctggaatatgtatgttcacattcaggaacacacatacgactttaagaagttggctgaagtcactaaagtcgttgtccgaaacttgaataaaattattgatataaactactatcctgtaccagaggcatgcctatcaaatggacgccatcgccccattggaattggggtacaaggtatggcagatgcttttatcctgatgagatacccttttgagagtgcagaagcccagttactgaataagcagatctttgaaactatttattatggtgctctggaagccagctgtgaccttgccaaggagcagggcccatacgaaacctatgagggctctccagttagcaaaggaagctggggagtgacagtgcctttggtagtactaactgcaaaagccgatttctgccggacagcagtgattcgacacttcacctgtgagtgcattgcactgctgagcatagcttgtggagacctgaccttcaacaactggctggggctggctatgtgtttggtcactgtaatctctgatatggccctgctggggacctcctacacccacatcatctatgctgccttccggatctcttcttggggagcccaagccaaggccttacacacgtgtggctcccacctactggtcatcctctccatctacgtctctggtctttccacttccatcaccttctga

SEQ ID NO: 134778 - DNA, 3188 bp, Homo sapiens
ttttttttttttttttttcacttagaaatgtttatctttatttcagaataacctataggaccatatccagataaaggtcctatcagtacttctcatgagttatcactcagttttgcatctagaggacccaccagtcaaagcagtaaaactaaatctccttatacaatactgaagtcttcagaaaagcagtgctaaatgggtgatgaaacctgacttaaccacttccctgtatggcaagatgacttattttgcattcctaaaagcttctactttgattctcaatatatccgtttttttttctctttttttcaaaagcattattttggggggaaaatcccaatatatgagtttaaaaaaaaaatcattatcatcattaacagtacctttaaatcaattactccttttggcctgcaaacagggtccagcaaagccattaccgcctcgagcaaacccacgtatacctatctatgctcaagaaagtattttggcttactgaaacatggctggtgctcttccaagtctttcctcaggatccacacatcagacattcatctctattctccaaagaggcacaccatgggctgctgtgttcctctccttctcttcttcctcttttgataccttttctttatcttttaggcttctccttatttaggagtgaactgggattgggattaggctgctgggtctcgtcccttaaaataattacatcccaggtttttcaaaaccctggcttccaagccgtagaagtgcatactaggtgaggttggccatagttagggctcagcaatgtggatgttcaaagattgccttttgatcaatggaaagcacctctctcaggctggccatcttgagaacagttttctgagagatttcccacacaggttttataaagttggcttagggtcatcagaaatttctgggtaggctctgaatagaaggcaatgcatgcaataaatctggtttttcatctcttcatgccataggccccggctccggtagatcttttcaataggtgaggatttacaatctgaaattctccctgacaagaccttgcaaagtttagagttgctggtgtaaggttcaatggactcattattcccccaggatctgaggcagtggaagctgtagggcatcgggggcaataagtaaactgtttcttataccatactttgcaatcttctccttgagaaccttccagtcccataggtctgtaggagtaacattccacatatcatactgaagaattcctttgctaactggagagccctcataggtttcgtatgggccctgctccttggcaaggtcacagctggcttccagagcaccataataaatagtttcaaagatctgccttaatccagtaaactgggcttcctgcactcctcaaaagggtacctcatcaggataaaagcatctgccaagaccttgtaacccccaattcccaatgggggcgatggccgtttaatttgaataggccatgccctctggtacaggatagtagtttatatcaataattttattcaagtttcggacaacgactttagtgacttcagccaacttcttaaagtcgtatggtgtggttctgatgtgacataccatattcagggccagggaagccaaattacaaacagcaacctcatctttgctggtgtactccactatttctgtgcacaggttgctgcatttgatggttccccaggttctgctggttgctctttcgattacaggaaatctttgtagagcatatacggggtgcctgtttccgtctgagactcaatgatggcataccaaagctgctgagcttttacaactttgcggacacgaccttgtttctcataacttgcatatagtttctcaaattcctctccccaaacctcatccagaccaggacactcatttggacacatcaaagaccagtcctgattagtctccactcgtttcatgaagagatccggaattcaaaagagcaaagaaaagatttctggccacgctgctcttcctttcctgtgttcttctttaaatcaaggaattcaaagatgtgtaaaatgccaaggctccaaggtaaatagcaaatgcccccaggacggcttgttcccaccttgatccacatatcgagctgtgttgttatatactctcagcatcggtacaaggccattggaattgccattagtcccagcaatgtagctgccagtagcccgaatacaactcacagcaacaccaattccttccagcaggacttagaaatcaatgcacattgctttacgacgtgtcataaatgccttcaatgctgtcatctttcatactcagaagaaaacagctagaaagttgtgggcggttggtaccagcattgaagagagtgggcgaagcatgagtaaaccacctctcagaaagaagattatatgtttcaattgctgcatcaatgtcttctttgtggatcccaacagatactctcatcaacatatgttgtggtctttcagccacttttccattgatcttcaacaaataagaccgctctagcgtcttaaagccgaagtaattgtaagagaaatctcggtcatagataatagcagaattcaggcgatctttattggccagaacaatatcccaatgttgacttggccaccatgggagagtgtttgccattatgtggaatttatgtagttataggaggtcttcccatccacatccactgaaacaactttcctttgtttcctttgtgcaaagtttagagaacagcgaaccctggcctgcccaggaataaccatagtccagggtgccttagtagtccaaggttgccagctgtttcagcagcccaaagtatcctaagttcccactgtggtgacccccactgtacaagccttggattactttcatggtgatctgagcaggatcaaccaaaatccatattgagtccataacaaagcttctggattcgagatgtaattttgtcaaacatgactcgttcttggcggccatctcgcttgatcacatgcatcgcagctagtggctgaggctctgaaggatccaagactggacctgcggctctaaagcgccggcgggatcgagaaggtgacagagtgggaagggttaggttccaggcgctgctcatggggaaatgaactggagttggagccagacagcactttcttcagagcagaggcgcaacaatccaaatccccttcccc

SEQ ID NO: 134779 - DNA, 591 bp, Homo sapiens
gacgctgcgcatccgccgccccgcgccccgcttacctgcccctcggccgggacaatggccagagtgaccgactcctcatcaaaggtggacggatcatcaacgatgaccaatccctttatgctgacgtctacctggaggatggacttatcaaacaaataggagagaacttaatcgttcctggtggagtgaagaccattgaagccaacgggcggatggttattcccggaggtattgatgtcaacacgtacctgcagaagccctcccaagggatgactgcggctgactgagacacgatgccgagacctcaagccctgaggggcagtcccaaaacccttacagtgaagatgtttactcattgcccccacctctggtccacactagaaagaagctcgccccacctccacctgtgagatccgtgaattctcggaatggcaggggaagccttgcactaggttgcagagaagcatcctccacatcctgtgtcagaaaccctggtctacgtggcacttgtaactcaccgtgctgtcttctggtctgtgtgtgttcttcaagccagctctaggcttcaggccgagccaggttcacactcag

SEQ ID NO: 134780 - DNA, 413 bp, Homo sapiens; identical to SEQ ID NO: 109630

SEQ ID NO: 134781 - DNA, 1176 bp, Homo sapiens
atgcaccagctgctggtgacttatgtttcctgttctggagccggggaaacatgcacgccagcttgtgggtgcttcctggacgtgcagagcctgggcctctttttcccattggtcccggattgccgtcaagaggcttgctgtgatgcctttctctccatcttcacccattcatctgtcaagaatcagttcagtcacccaggcagccagccaggctgtgtccaagatgccggagagacagcagtgaagaaaacggacaaagtccgttgcctccgtggagctcacggtctaagtgaccgactcctcatcaaaggtggacggatcatcaacgatgaccaatccctttatgctgacgtctacctggaggatggacttatcaaccctgcttatgacaacccaggtgtcttagccagcgctggctgccggaatggaatgccacaggctgggtggcttaaacagcagaagtttatttctcatagttctggaggctggaagtcccggatcaagctgccgtcagggttggttcttcctgaggccttcctgaacttcttcctgaggttcttccttggcttgcagacaccaccttctggcttgcagacaccaccttctggctgtcctcacagggccctttctgtgtcacgtgagctgctgtctgttgcagccactgtcacactgcatcgctccttgaccagggccttgcctcgtggccccccgccctggggcccagcacctgtaggtcctggagcaccgattcagggaaagcgcaaacaaatgaatgctggccatcaggtggtgaggatgctcctgtcagcctcagggcacctggatcccgaatgctcttggcaagcccacacgtttggagaggatggcagaaggactggggaagaaaggatttccctaagtcaagttggacattctggtgttattattagtagtggtggtggacattctggggaaccaaggctgtctctgttgtttgcctccagacaaataggagagaacttaatcgttcctggtggagtgaagaccattgaagccaacgggcggatggttattcccggaggtattgatgtcaacacgtacctgcagaagccctcccaggggatgactgcggctgatgacttcttccaagggaccagggcggcactggtgggcgggaccacgatgatcagtgagtga

SEQ ID NO: 134782 - DNA, 777 bp, Homo sapiens
atggagaacaaagttgaggttcaagtgtccctggagagggagcttcgtggctttggcccttaccaggggcaatgcccaaatgcagattctcctcagctctatgaagcctttaccttccttaagggcctgggagctgtgatcttggtccatgcagaaaatggagatttgatagctcaggtgagtggcaagaatttccactccttctacctcagtctgattctccttgttgcaaaagcacgtgagctgctgtctgttgcagccactgtcacactgcatcgctccttgaccagggccttgcctcgtggccccccgccctggggcccagcacctgtaggtcctggagcaccgattcagggaaagcgcaaacaaatgaatgctggccatcaggtggtgaggatgctcctgtcagcctcagggcacctggatcccgaatgctcttggcaagcccacacgtttggagaggatggcagaaggactggggaagaaaggatttccctaagtcaagttggacattctggtgttattattagtagtggtggtggacattctggggaaccaaggctgtctctgttgtttgcctccagacaaataggagagaacttaatcgttcctggtggagtgaagaccattgaagccaacgggcggatggttattcccggaggtattgatgtcaacacgtacctgcagaagccctcccaggggatgactgcggctgatgacttcttccaagggaccagggcggtactggtgggcggaaccacgatgatcagtgagtga

SEQ ID NO: 134783 - DNA, 2009 bp, Homo sapiens
atgcaccagctgctggtgacttatgtttcctgttctggagccggggaaacatgcacgccagcttgtgggtgcttcctggacgtgcagagcctgggcctctttttcccattggtcccggattgccgtcaagaggcttgctgtgatgcctttctctccatcttcacccattcatctgtcaagaatcagttcagtcacccaggcagccagccaggctgtgtccaagatgccggagagacagcagtgaagaaaacggacaaagtccgttgcctccgtggagctcacggtctaagtgaccgactcctcatcaaaggtggacggatcatcaacgatgaccaatccctttatgctgacgtctacctggaggatggacttatcaaggccaagatagcttccctcgtccggaagtgccgggagaggaaccgcctgatcacccacctgctgcaggagctgcacagacatgggctggggaacctcctgctctccgagctggcgcagaacatgctcaacgacgtggcactggctgagtacacggccaccttcctggctccgggagtcccagagacaagccaccacctggacgtcaagtctgagatgacggcagctttaagagctccaggttttgtgctgagcatgtttcgtatgctcgctcatctgatcagcgtagtaactctgcagtacaagcaccgttatccccagtgtacagaagaggagactgaggaacaaaagcggatcctggagatgggcatcacgggtcccgagggccatgccctgagcagacctgaagagctggaggccgaggcggtgttccgggccatcaccattgcgggccggatcaactgccctgtgtacatcaccaaggtcatgagcaagagtgcagccgacatcatcgctctggccaggaagaaagggcccctagtttttggagagcccattgccgccagcctggggaccgatggcacccattactggagcaagaactgggccaaggctgcggcgtttcgtgactttccctcccctgagcccggaccctaccacggccgactacttgacctccctactggcctgtggggacttgcaggtcacaggcagcggccactgtccctacagcactgcccagaaggcggtgggcaaggacaactttaccctgatccccgagggtgtcaacggggataaaggagcggatgacggtcgtctgggacaaggcggtggctactggcaaaatggatgagaaccagtttgtcgctgtcaccagcaccaatgcagccaagatctttaacctgtacccaaggaaagggcggattgccgtgggctcggatgccgacgtggtcatctgggaccccgacaagttgaagaccataacagccaaaagtcacaagtcgagcaaatcctgggaagtaacactgaggctgttggtgcaggcggtggagtacaacatcttcgagggtatggagtgccacggctccccactagtggtcatcagccagggcaagatcgtctttgaagacggaaacatcaacgtcaacaagggcatgggccgcttcattccgcggaaggcgttcccggagcacctgtaccagcgcgtcaaaatcaggaataagctccccactccttccccctttctggaaccatctcccaacaaactatctgccccccgaatctttgcctcgctgttgacttctacaagaacatacatgaagatgggcccgttgctgctgccttgtctgggactcaggggtcctttccgggggtgggtttttggattgcaaggggtttccaggggcatgtatgacggtcctgtgtacgaggtaccagctacacccaaatatgcaactcccgctccttcagccaaatcttcgccttctaaacaccagcccccacccatcagaaacctccaccagtccaacttcagcttatcaggtgcccagatagatgacaacaatcccaggcgcaccggccaccgcatcgtggcgccccctggtggccgctccaacatcaccagcctcggttga

SEQ ID NO: 134784 - DNA, 3177 bp, Homo sapiens
  misc_feature (1)...(3177): n = a,t,c or g
tcgccgatccgggcggtgctggcagccggagcggcggcgggcgggccgagcagccggggcagccgcgcgtgggcatccacgggcgccgagcctccgtccgtgtctctatccctcccgggcctttgtcagcgcgcccgctgggagcggggccgagagcgccggttccagtcagacagccccgcaggtcagcggccgggccgagggcgccagagggggccatgtcgtaccagggcaagaagagcatcccgcacatcacgagtgaccgactcctcatcaaaggtggacggattatcaacgatgaccaatccctttatgctgacgtctacctggaggatggacttatcaaacaaataggagagaacttaatcgttcctggtggagtgaagaccattgaagccaacgggcggatggttattcccggaggtattgatgtcaacacgtacctgcagaagccctcccaggggatgactgcggctgatgacttcttccaagggaccagggcggcactggtgggcgggaccacgatgatcattgaccatgttgttcctgaacctgggtccagccttactgacctctttcgagaagtggcacgaagcagctgacaccaaatccctgctgtgattactcccctccacgtggacatcacaagctggtacgatggcgttcgggaggagctggaggtgctggtgcaggacaaaggcgtcaattccttccaagtctacatggcctataaggatgtctaccaaatgtccgacagccagctctatgaagcctttaccttccttaagggcctgggagctgtgatcttggtccatgcagaaaatggagatttgataccttaagaaccaaaagcggatcctggagatgggcatcacgggtcccgagggccatgccctgagcagacctgaagagctggaggggcgaggcggtgttccgggccatcaccattgcgggccggatcaactgccctgtgtacatcaccaaggtcatgagcaagagtgcagccgacatgatggctcgggccaggaggaaagggccgctagtgtttggagagcccattgccgccagcctggggaccgatggcacccattactggagcaaagacttgggcaaagattgcggcgttcgtgacttcccccttccctgagcccggaccctaccacgcccgactactttgacctccctactggccttgtggggacgttgcaggtcacaggcagcggccacttgtccctacagcactgcccagaaggcggtgggcaaggacaactttaccctgatccccgagggtgtcaacgggatagaggagcggatgacggtcgtctgggaaaaagacggtggctactggcaaaatggatgagaaccagtttgtcgctgtcaccagcaccaatgcagccaagatcttttaacctgttacccaagggaaagggcggatttgccgtggggttcgggatgccgacgtggtcatctggggaccccgacaagtttgaaggaccattaacagccaaaagttcacaagttcgggcggtgggagttacaacatctttcggaggggtatgggagttgccaagggtttccccattagttggttcattcagcccaggggcaagattctttttgaagacggaaacatcaacgtccaccaagggcatgggcccgcctcaattcccgcggaaggcgttcccggagcaacctgtaccagcgcgtcaaaatcaggaataaggtttttggattgcaaggggtttccaggggcatgtatgacggtccctgtgtacgaggtaccagctacacccaaatatgcaactcccgctccttcagccaaatcttcgccttctaaacaccagcccccaccccatcaagaaaccctccaccagtccaacttcagcttatcaggtgcccagatagatgacaacaatcccagggcgcaccgggccaccgcatcgtggcgccccctgggtggcccgcctcccaaacatcacccaaccctcggttgaaaacgtggaagccgcggaaggaacctaaccctgaaaggaatcctggggaaaccatgtcccatccccttttccctgtcaagtgtttttgaaaccccacagttttagttggtgctgatggagggagggggaagtcgaaggatgctctttcccttttctgtttagggaagaagtggtacttagtgtgggtgttgtttgcttgggaaattccttggccccacagttgttgtttcatgctgaaatccaccttcgggagcatgggtgtttttcaattcccccttcctagttgaaccacaggtttttaggcattgtctttgtttctgttcccttccacttctaactccactgggctccatgattctctagacgacggttccctttcctccctgtagatgttctaggatagttgatgcatgttactaaattacgcatgcacgactgcgagtgcggcctgagcggacctcaccacggactgactgacacacgatgcagagacctcaagccctgaggggcagtcccaaaacccttacagtgaagatgtttactcattgccccccacctctggtccaaaactagaaagaagctcgccccacctcccacctgtgagaataccgtgaaattctcggaaatggccaggggaaagccttgcaacctaggttggcaagaagaaagcatccctcccacatccctgtggtcaagaaacccctggtcctcccgtgggcacttgtaaactcacccgtgctgtctttcttggtcttgtgttgtgttctttcaagcccagctcttaggctttcaggccgaggccagggtttcacactcaggaaaggagggtcttccccattccccatttcgggggcttgacggatggggggggctgatggcttgccccttgggtggcctgagttctggtccctttgaggcagttgacggggcagtcagatttttaaagaagttttgtacaaagttttcctttgtaatcactcccatttttacttaacaaccaacttgttgtggctcttatttctgaattcaaagcttgtgaaaaaataataaagaaaatgaactgcccacnnnnnnnnnnnnnnnnnncttcggggggcgtttttagggtaccctgggggggccaagaattaaccgtgcgcgggaggttagaattttttccctttaggggggggttttaaaaacg

SEQ ID NO: 134785 - DNA, 1993 bp, Homo sapiens
  misc_feature (1)...(1993): n = a,t,c or g
gctcgccccctccgccgccgccgcccgcccctgcgactacgctgcggcctcccgcccgctcccgctcgctcccgcggccctcgctcgcctcgcgccggcagttttgggcctacacctcccctccccccgccagccgccaaagacttgaccacgtaacgagcccaactcccccgtaacgccgcccgccgctcgccatggatgccggtgtgactgaaagtggactaaatgtgactctcaccattcggcttcttatgcacggaaaggaagtaggaagcatcattgggaagaaaggggagtcggttaagaggttccgcgaggagagtggcgcgcggatcaacatctcggaggggaattgtccggagagaatcatcactctgaccggccccaccaatgccatctttaaggctttcgctatgatcatcgacaagctggaggaaagaatatcaacagctccatgaccaacagtaccgcggccagcaggcccccggtcaccctgaggctggtggtgccggccacccagtgcggctccctgattgggaaagagcgggtgtaagaacaaagagatccgcgagagtaccggggcgcaggttcaaggttggcgggggatatgcctgcccaactccaccgagccgggccatcaccatcgcttggcgtgccgaagtcttgtcaccgagtgtgtcaagcaagattttgcctgggtcatgctggagacgctcttcccagttttccgcaagggaggagttcatggaccatttccgttaccagcccatgccggccagcttccccagttcatcttgcgccgggcgggccaagattcggtgcagcgacgctgggggctaacccccattgccaacccattgacctgggaagggaccacctcttagatgcctacttcgatttcaagggacaacacaccattttttccgttcgattttgggccaagcttgaaccagggtgggcaagacaacagttttcattttttgccattgattgcacggcggggaaccggatttcggccggaattgactccaagctctcccagagggtgaaagggtaattgggcaaggttgggatgcatctactcaaaccacccatgcaactcaccatttccaaataacttaatttggctggcataaattcccgggggcgccaaaggcgccaaccattaatgaggatccgccaagatgtcccgggggcccaggatcaaaatttgcccaaccccagtggaaaggctccctctggttagggcaggtttactattcactgggctcttgcttgccagttatttagttttgggcccagtattctaattcaatgcccagggctttcctctgagaagggcatggggtgcagctaggaacagtgtaggttccctcaataacccctttctgctgttctcccatgatccaactgtgtagggttccctccaattaaccccctttcctgctgttcttccccccccatgatccaaactgtgtaattttctgggtcagtgatcccccaggtttttaaataatttgtaaagtgttcaggtttctaacacaacttttatcatcccgctaaagaatttaaaaaatcacattcttctgttccagctgttaatgctggggatcccatattttagtttttataagccttttcccctgtttttaagttttgttttggggtttttttgggctcatggaattttatttctgttttgtcgattaagaaatggtaagagtggaatgcttaataaattttcagmtttagattctgctaatgctcaagaatttaagcaattaaaaaacgggattggtttaaaaaatgctccagaaacagaacaaaaaaaaggactgggggggggccttttaaaagatcccttggggggcccaattttaccgggggtggggaagaaaatattttctcctttttggggggggtttttaaaagtnnnnnnnnnnccggtttttaaaaaggctgggagggaaaaaccgttccctggggatttttg

SEQ ID NO: 134786 - DNA, 435 bp, Homo sapiens
tttcgtctcggagcaggcggagtaaagggacttgagcgagccagttgccggattattctatttcccctccctctctcccgccccgtatctcttttcacccttctcccaccctcgctcgcgtagccatggcggagccgtcggaggccactcagtcccattccatctcctcgtcgtccttcggagccgagccgtccgcgcccggcggcggcgggagcccaggagcctgccccgccctggggacgaagagctgcagctcctcctgtgcggattcctttgattcttcctcttcctctcagcctgtatctctattttcgacctcacaagtgcacgatctgattttctggagagatgtgaagaagactgggtttgtctttggcaccacgctgatcatgctgctttccctggcagctttcagtgtcatcagtgtggtttctc

SEQ ID NO: 134787 - DNA, 4135 bp, Homo sapiens
aaattcccgggtcgacgatttcgtctgtcctcggagcaggcggagtaaaagggacttgatcgagttcagttgccggattattctatttcccctcccatctctcccgccccgtatctcttttcacccttctcccaccctcgctcgcgtacgcattggcggagccgtccggcgtccacatcagtcccattccatctcctcgtcgtccttcggagccagagccagtcccgcgcccggctggcgagcgggagcctcaggaagcctgccccggccctggggacagaagagctgcagctccgtcctgtgcggtgcacgatcctgatttttctggagagatgtgaagaaccactgggcttgtctttgggcaccacgctgatcatgctgctttccctggcaagctttcagtgtcatcagtgtggatttcttacctcaatcctgggcttcttctctctggcaccatcagcttcaggaatctacaagttcgtcatccaagctgtacagaagtcagaagaaaggccatccatttcaaaagcctaactggaacgtagacattactctgtcctcaaaaagcttttccataaataacatgaatgctgccattttgcacatcaacatgttcctgaaactcattattcgcctctttctggtagaaagatctggttgactccttgaagctggctgtcttcatgtggctgatgacctatgttggtgctgtttttaacggaatcacccttctaattcttgctgaactgctcattttcagtgtcccgattgttctatgaaggaagtacaagacccagattgattcactatgttgggcatcgcccgaggatcagaccaagtcaattgttggaaaagatcccaagcaaaactcccctgggaatcgccaaaaaaaagggcaggaataagttacatggggaaaccaggaaatggcaacagttactagaacaccatttaattagttattaacgtcgttacttgtactatgaaggaaaatactcagtgtcagcttgagcctgcattccaagcttttttttttaatttggtgttttctcccatcctttccctttaaccctcagtatcaaggcacaaaaattgatgggactgataaaagacctattcttagacctcagaagaagaaagaatcaaatttcataggataagtcaatacctttaatgggtgggtagagcctttacctggtagcttgaaaggggaaaagattggaggttaagagagaaaatgaaaggaacacctctgggtcccttctgtccagtttttcaggcactagtcttactcaggctatccattataggttttgccccttaaggaagtcatgattaacttatggaaaaaattatttgggggacagggagtgtggataccttccttgggtttttttttggcagccctcaaatccctatcttcctggccccacaattgtggagcagcctacccctggatactccttgttctttaatggatttaacctatcaaccttggataaaataaccttaatagggtgatagtgataattcctgattccaagaatggccatctggataaaaaagaataggaaatgggaaagtggggacttgaggagggagttcagccaggcatgcctgcggttgggcggtgcactcccctctggccactattccccaggggaagggaaaggctccgccgatttggggaaagttggtttcttacgtcactggacaccggttctgagcattagtttgagaactcgttcccgaatgtgctttcctccctctcccctgcccacctcaagttttaataaaataaggttgtacgttttcttactatgaaataaatgtcttgtaactgctgtgcactgctgtaaacttgctagagaaaataaataacctggsatgtgggctcctcagttattgagtttttgtgatcctatctcagtctgggggggaacattctcaagaggtgaaatacagaaagcctttttttcttgatcttttcccgagattcaaatctccgadttcccatttgggggcaagttttttytcttcaccttcaatatgagaattcagcgaacttgaaagaaaaatcatctgtgagttccttcaaggttctcacttcataggtcatgaatcccttcagaagggaattatggcactgggcgagtttaaaagtaaggggctatggatatttggatgggtccccaaagtacgggcagctgccaaaagtagttgggaggggaattgtctacgtgtctttggggaaaattaggttaggggatttgggatgggggtaaaagggtacccctttgcccttacttcccatcttaatttttcttaggcccccttttgagtgtttttaactgggtttcatgtcctaataaggaagtgcattctcccatccctcatcctctggcccctccccaaggaagtcagtgattgtctttttgggcttcccctccaaaggaccttctgcagtggaagtgccacatccagttcttttcttttgttgctgctgtgtttagataattgaagagatctttgtgccacacaggattttttttttttttaagaaaaacctatagatgaaaaattactaatgaaactgtgtgtacgtgtctgtgcgtgcaacataaaaatacagtagcacctaaggagcttgaatcttggttcctgtaaaatttcaaattgatgtggtattaataaaaaaaaaaaaaaaaaactcgctcgtgccgaattcggcacgaggaacaacctgtgtgcatgctttttgagtatattaatcagggggatctccatgagttcctcatcatgagatccccacactctgatgttggctgcagcagtgatgaagatgggactgtgaaatccagcctggaccacggagattttctgcacattgcaattcagattgcagctggcatggaatacctgtctagtcacttctttgtccacaaggaccttgcagctcgcaatattttaatcggagagcaacttcatgtaaagatttcagacttggggctttccagagaaatttactccgctgattactacagggtccagagtaagtccttgctgcccattcgctggatgccccctgaagccatcatgtatggcaaattctcttctgattcagatatctggtcctttggggttgtcttgtgggagattttcagttttggactccagccatattatggattcagtaaccaggaagtgattgagatggtgagaaaacggcagctcttaccatgctctgaagactgcccacccagaatgtacagcctcatgacagagtgctggaatgagattccttctaggagaccaagatttaaagatattcacgtccggcttcggtcctgggagggactctcaagtcacacaagctctactactccttcagggggaaatgccaccacacagacaacctccctcagtgccagcccagtgagtaatctcagtaaccccagatatcctaattacatgttcccgagccagggtattacaccacagggccagattgctggtttcattggcccgccaatacctcagaaccagcgattcattcccatcaatggatacccaatacctcctggatatgcagcgtttccagctgcccactaccagccaacaggtcctcccagagtgattcagcactgcccacctcccaagagtcggtccccaagcagtgccagtgggtcgactagcactggccatgtgactagcttgccctcatcaggatccaatcaggaagcaaatattcctttactaccacacatgtcaattccaaatcatcctggtggaatgggtatcaccgtttttggcaacaaatctcaaaaaccctacaaaattgactcaaagcaagcatctttactaggagacgccaatattcatggacacaccgaatctatgatttctgcagaactgtaaaatgcacaacttttgtaaatgtggtatacaggacaaactagacggccgtagaaaagatttatattcaaatgtttttattaaagtaaggttctcatttagcagacatcgcaacaagtaccttctgtgaagtttcactgtgtcttaccaagcaggacagacactcggccagaaaaaaaaaaaaaaaaaaaaactcgagggggggcccgtacccgatcgc

SEQ ID NO: 134788 - DNA, 1104 bp, Homo sapiens
atgagcgaaagcttcctgaagcccttgccagaagtagatgctggtgccatccttcttgtacagcctgcagaactaattcaagaggaacgtgatgagagacataaaacaaaaggcagattatttcgatttgaacctcctcagtcagattctgatggtcagcgtcgttctattcttgatgattacgcacctggctcacatgatgtaggagatccaagcactactaatttataccttggaaacattaatccacagatgaatgaagaaatgctgtgccaagaatttggaagatttggaccgttagccagtgtgaaaatcatgtggcctagaactgatgaagaaagagccagagagagaaattgcggctttgtggcctttatgaatagaagagatgctgaaagagctttaaaaaatttgaatggaaaaatgattatgtcttttgaaatgaagttaggttggggtaaagctgtacctattcctccacatccaatatacattccgccttctatgatggaacatacgcttcccccacctccatccggactgccttttaatgcgcagcctagagagcggttaaaaaaccctaatgctcctatgttaccgccacctaaaaacaaagaggattttgagaagactctgtcgcaagccatagtcaaagtggttatcccaacagaaaggaatttgctcgccctgatacatcgaatgatagagtttgttgtacgtgaagggccaatgtttgaagctatgattatgaacagagaaatcaacaatcctatgttcagtaatttcattactcagggtgaggatgctccagaagaaaaatttgaagctagcagtgattggtttttgaggtttaaggaaagaagccatcttcataatataaaagttcaaggtgaagcagcaagtgctgatgtagatgctgtagcaaattatccagaagatctgaggtcattgatgaaggtggctacactaaatcacattgtcagtgtagacaaagcagccttttattctaccaccaccctaaccttcagctaccaccaccctgatcagttggccatcaacattgaggcaaaaccttccaccagcaaaaatgctatgactcactga

SEQ ID NO: 134789 - DNA, 531 bp, Homo sapiens
ctttaaaaaatttgaatggaaaaatgattatgtcttttgaaatgaagttaggttggggtaaagctgtacctattcctccacatccaatatacattccgccttctatgatggaacatacgcttcccccacctcaatccggactgccttttaatgcgcagcctagagagcggttaaaaaaccctaatgctcctatgttaccgccacctaaaaacaaagaggattttgagaaggtaatttaaaaaatggacataaggccgcatctaatttgtaaatactaaagctgtggtagtatttcttttcaacaattttatagaaaatgtgtgtgtaattctgtttggcaacttttaaagaaataagtagatgtgttccctgccttagcccatggaaaccctatatttgaaatactaggtcatatttttatttgtggctaccattccttttttgaccacttgttaagttttttttcctttgtccagtgttgtatccagatttgcttaagtgtattaactaaatttactttgttctgagaaa

SEQ ID NO: 134790 - DNA, 1440 bp, Homo sapiens
atgaaactcatggaaacacttaaccagtgcataaacgctggtcatgaaatgacgaaggctatcgccattgcacagtttaatgatgacagcccggaagcgaggaaaataacccggcgctggagaataggtgaagcagcggatttagttggggtttcttctcaggctatcagagatgccgagaaagcagggcgactaccgcacccggatatggaaattcgaggacgggttgagcaacgtgttggttatacaattgaacaaattaatcatatgcgtgatgtgtttggtacgcgattgcgacgtgctgaagacgtatttccaccggtgatcggggttgctgcccataaaggtggcgtttacaaaacctcagtttctgttcatcttgctcaggatctggctctgaaggggctacgtgttttgctcgtggaaggtaacgacccccagggaacagcctcaatgtatcacggatgggtaccagatcttcatattcatgcagaagacactctcctgcctttctatcttggggaaaaggacgatgtcacttatgcaataaagcccacttgctggccggggcttgacattattccttcctgtctggctctgcaccgtattgaaactgagttaatgggcaaatttgatgaaggtaaactgcccaccgatccacacctgatgctccgactggccattgaaactgttgctcatgactatgatgtcatagttattgacagcgcgcctaacctgggtatcggcacgattaatgtcgtatgtgctgctgatgtgctgattgttcccacgcctgctgagttgtttgactacacctccgcactgcagtttttcgatatgcttcgtgatctgctcaagaacgttgatcttaaagggttcgagcctgatctcaaagttatgaagtttcaggatgaattggaatctgggaaaagacctaaaaaaccaggccagagttttcaggagcaagtagaacactacagagataaacttcttcaacgagagaaagagaaagagttagaaagagaacgagaaagagacaagaaagataaagaaaaattggaatctcgctccaaagacaagaaggaaaaagatgagtgtactccgacaaggaaggaaaggaagaggcgacacagtacatcccccagcccatctcgcagtagcagtggtagacgagtgaaatccccatcaccaaaatcggagcgatcagagcgttcagaaaagatctcattaaagagagctcacggtccaggtcatcttcacaaagattctcctaggagatgttaggcaaaaaagccaaaagttcaccatctggtttcaaggacacctaaaaggtctaggcgatcacggtctagatctcctaaaaaatcaggaaagaagtccagatcccagtccagatctccacacaggtctcataaaaagtcaaagaaaaacaaacactga

SEQ ID NO: 134791 - DNA, 8019 bp, Homo sapiens
  misc_feature (1)...(8019): n = a,t,c or g
atggggcagggcccagaaaaaacaccgttaagttctcattccagtccacggaactggcagcctggcccccagacttcaggtcatccctggcttgaaggagcctttctgcttctggccaccattcagagcacccaggccgttcatgctgaggggcacctgcaggctcatgccaggctgcccttagccccacttcagcctcccttccatgatcgtcaacacccaaagtccagaaggggccgagccagcatctttgcagcaactgctccaaatgggctgctgctgccatcatatatgtggaccctaagttgtggcaaagtgggcactgccaaaggaattcaagaggaacgtgatgagagacataaaacaaaaggcagattaagtcgatttgaacctcctcagtcagattctgatggtcagcgtcgttctactaataaaactgagcaaaggcagtctctgacttatgaaaagattgtgatacaaagtaaatgttcacaggaccagcaagttttagagaggcatgcaactgcccagaataaagactacatttcccaccctcccttgaaactggatgtggtccacgtccaagttctggctagtgagaagaaaacagcgttatgcgtatattctcaggtctgtgtccttaaagggtgtgtccttcctccttgtcttttccgcttcctgctgaccggaatgtggatgagttcattcctacgaagacagccactctctaggagagccccgaccaggaaagaagttagtttcaggtgcatccgactgggggagacacagaggaggcctctcaacaaaacagatggatgcatctggaccctcagatagtgatatgccaagtcggacacgacctaagagcccaagaaaacataattataggaatgaaagtgcccgtgaaagcctttgtgattctcctcatcagaatctctcaagacctcttctggaaaacaaacttaaagcattcagtattggaaaaatgagtacagctaagcgaactttaagtaaaaaggaacaggaagaattaaagaaaaaggaggatgaaaaggcagctgctgagatttatgaggagtttcttgctgcttttgaaggaagtgatggtaataaagtgaaaacatttgtgcgagggggtgttgttaatgcagctaaagaagaacatgaaacagatgaaaaaagaggtaaaatctataagccatcttcaagatttgcagatcaaaaaaatcctccaaatcagtcttccaatgaaagaccaccatctcttcttgtgatagaaaccaaaaaacctccacttaaaaaaggagagaaagaaaagaaaaaaagcaatttggaactcttcaaagaagaattaaagcaaattcaagaggaacgtgatgagagacataaaacaaaaggcagattaagtcgatttgaacctcctcagtcagattctgatggtcagcgtcgttctatggacgcgccttcaagaagaaatagatcatctggtgttcttgatgattacgcacctggctcacatgatgtaggagatccaagcactactaatttataccttggaaacattaatccacagatgaatgaagaaatgctgtgccaagaatttggaagatttggaccgttagccagtgtgaaaatcatgtggcctagaactgatgaagaaagagccagagagagaaattgcggctttgtggcctttatgaatagaagagatgctgaaagagctttaaaaaatttgaatggaaaaatgattatgtcttttgaaatgaagttaggttggggtaaagctgtacctattcctccacatccaatatacattccgccttctatgatggaacatacgcttcccccacctccatccggactgccttttaatgcgcagcctagagagcggttaaaaaaccctaatgctcctatgttaccgccacctaaaaacaaagaggattttgagaagactctgtcgcaagccatagtcaaagtggttatcccaacagaaaggaatttgctcgccctgatacatcgaatgatagagtttgttgtacgtgaagggccaatgtttgaagctatgattatgaacagagaaatcaacaatcctatgttcaggttcttatttgaaaaccagacaccagcccatgtttactataggtggaagctttattctattctgcagggagattctccaactaaatggcggacggaagattttcgtatgttcaaaaatggatctttttgggaggccaccaccattaaatccgtacttgcatggaatgtcagaagagcaagaaacagaagccttttgtagaggaacctagtaaaaagggagcacttaaggaagaacagagggattaaattggaagaaatcttgcggggatttaactccaagggaagaatgattattggaggttgcaatggttttcttgtcttnaaataattctgaagcttgcttgaaggaattagtggattgcattacctgagtcgttgtccatcttaaagacaccccttcctaaaaagattgccagattatatttggtttctgatgttttgtacaactcttcaaccaaaggtggttaatgcttcatattatagaaaattttttgaaacaaagttatgtcagatattttcagacctcaatgccacctattggtccaattcaagggccatttacaatctgaaagctttaagcaacgggtaatgacttgcttcagagcatgggaagattgggcaatttatccagaaccatttttgatcaaactacaaaatattttcttaggacttgtaaatattattgaagaaaaggaaacagaggatgttccagatgaccttgatggtgcccccatcgaggaagagcttgatggtgcacctctggaagatgtagatggaattcctattgatgctactcccatcgatgatcttgatggagtccctataaaaagtcttgatgatgatcttgatggagtgcctttggatgcaactgaagactcaaaaaagaatgagcctatatttaaagttgcccccatcaaaatgggaagctgtggatgaatctgaattggaagcacaggctgttacaacttctaaatgggaattattttgaccagcatgaagaatcagaagaagaagaaaatcaaaatcaagaagaagaaagtgaagatgaagaagatactcaaagttccaaatctgaagaacatcatttgtactctaatccaatcaaagaagaaatgactgagtctaagttctctaagtactctgaaatgagtgaggaaaaacgagccaaacttcgtgaaattgagctcaaagttatgaagtttcaggatgaattggaatctgggaaaagacctaaaaaaccaggccagagttttcaggagcaagtagaacactacagagataaacttcttcaacgagagaaagagaaagagttagaaagagaacgagaaagagacaagaaagataaagaaaaattggaatctcgctccaaagacaagaaggaaaaagatgagtgtactccgacaaggaacggaaacggaagaggcgacacagtacatcccccagcccatcttcgcagtagcagtggtagaccgagtgaaatccccatcaccaaaatccggagccgatcagagcgttcagaaaggatctcataagaggagctcaccggtccaggtcatcttacaaaggattcttcctagagatgttagccaaaaaagccaaaggatcaccatctggttcaaggacacctaaaaggtctaggcgattcacggtcttagatctccttaaaaaattcagggaaagaagttccagatcccagttccaggttttccacacaggtctccataaaaagttcaaaggaaaaacaaacactggccgtaaattttttaagatgctggtcacttattggaaatgcgatttgtttttgtgccctgaacggtctgtttttttaaaaaaacaaaaaatccaaatgaaagagcattccctggggttttttgtttgtttgtgtatgcatgtgtaaactcatgagcaactgcatctgtagatctgtcattgttttatattgtgtaaattactttcattgtggctatttctcaagatgaaatttttattgttctaatggatttcgatcagaaatgtgtataatggatctgctgacagtagtagtattttgttttaggatgttgtgacttagcaaaaataatacagatgtcttccccccttttgtagctttgacaatttgaattagatttcaaataaaatctgaacagaaaactataatgttgtttttttgccccaccggtgatattaagtcccttaaagtcctactgagtttcacactactgttgtgcttcttatacctgatgcactttataagccccagtgttcaagtagcttaagttttatatttactaagatgactatccaaattaagggacctgagactccctatttggtggttggctaacccatttgctttggataagtttctctggggtaatactaataccccggttatccaaagactaggtagatatggcatggcgttttgttagtggaatgcctggctaaaacatttttttcacagaagcaatatgatttccgatacatccaacccatgttctgagcaactacttacttttagggggaaattaaatatcttttcatttcctcttctattatgaaagaagtttatttgtaaaacaaattttctaacaaggtttggccatagaattctcttgtatgattggttgaccttttataaccttctgtaggctatctttcaaacactggcatcagaatattttttataagtttgtgtttaaacagcttagttggtccccccccccactcccaagagacttgggtttagttatagctttaagtaaaatttaaaaataaaatgtttttcaggaaacttcgtatctaatggtttgtaaattcaaggtgcaaaaagttgatttaaaccatttgcagagttgaactctattatgaaaataaatttgctacggtatgaggaagaaataaaacttgtgtaatgttggtcataatactgctataaatataataaagggttatgtagaattgaactgacactattatttgtgaatcttgatttcagttttttatgtaggcacttcatacactggtttgatgggttttttttttcctccctaaaagagaaagtagaaaactattctaacaatggattattttgatttagcttgctttttaaaaaaatcttttcaacttgttttacttaatcttgcctagtcacaaaataagatgtgcacccatggtttggagagttcctatattagctgagcagtgagatacactatttccaaacggtgcacacctacagtagctttggaaatgagccaatcactgttttacttaatggttcttatcagcatgcaaatattgcttgaaagttatttccttattcactgttttgttagtccattttgttaggaaacattaattcctaaaaatttgttcagaataattaaaagtgaacatttggtgctgatactcaaaaacctacaaatgtagccatttaaaaagtaacatgtttttctcccctgctcattgcctgggagaatggaattttatataactacctttctttgcaaaaataacggtcgtgtcgagttggtggtgattttggcattccatcttgcactggtttctagtataggcttagaaataattggtcaggtaataatctttccagtcaagttgcaagggatgcttatttctcttcaaaaaaagacatcctgcgggattgagtagaaaattttaggtcagttttgggtgcttatttgtaatatttttcctactacattggagtttagcagttctttttttctggatccagatacaagtgtcatggtttatcttacagtgggtgaaactgactttcttttggttgggtgggtgaggatttcttaggcctgatagaatatatattctgtgaagtttgttaatgtacatattagattgtattggatttttttttcttgaattgcaaatggtattattagataggttatttccagttttacttcatgacaaattacctagagtaaacctacttaatactccaatggattctatgaaagtttaatgggatcagaaattggtgacttataagggggaagatattctaccatatttttataatagcttattattcatgtttcttgtctgaagggacacttcaagttacagagcaaaatttctatagggttgacttaggaatgtttcataaggcatgggtcttccagttggcagggaaagatccatgttctatctgtggacacttactgtcctctaccacagctacgtgccagagttgttttccacagttcttataaagggcatgacttaggctctttaccctccaacttaatgtttatacacagggattgtttactaggttaatgacatttaactcccctctcttctgtaggtgagagaaaataagtaagtcttgatctgtttcttaccaaagagagacagacctatgatggaaaatgatcacgtctctgaattttttctttaacgttatagttccttattacagatagtaagcatatgggaatttctgagctataacatgttgagaagttagaaattaaaactaacacaacaaaaggcgctgaatcaaaagatctttgcttttatttggctcagaatgtttttggcttttctgctaaagatggcagaaattactctacacagacctgatttttctttattgcagaccattcttgtgggcttaccctgagacttttatcccaattagtgaatcttggagggaatacttgcttatttatgacttaagtatttccccccaaactttaatattcttgagcacttgaaaatacttttgagaaattttaactgtgattaaatttaggtttattagaaatattctgtacacatttgcctccatggtggtgtaagttctgaaaaattatatgaccgtgacaatagtttatcatcatcattattgttattcaaaataagggtaaataaatctctgtattgccaaagtgacttaaactgttctgatgaccacacagtgtgatttctttagcagagaaagttggttttaaaaataaatagtaccacttttctaagactgtacagtttacaaataaggtttttttctttgttgttttcctcttctattaagttttagtgaaaagcctaattacagaaaattgtgcagatactagtgaagatactagtataagtttaaaaggaacacgtgactgtaaaatctcacatttaacaaagtgcctggaactcttccatatttccacacgcatgttttagaatagattttagggagtgtttaattcattatccttttgacttaaaatttttgttaccaacttcctaggacttagataatatataaataagtacaaatcccaggggaagtgttgtgatgcctagactaaaaggtgggaatgtgctgctgttccgtgagccttgttccattgttgaaaatttgatgccctcagtgtttattcagtacccacctcatggagcttcaatgtaaaatgggattatatgtataattggtaatttggtatagttttgtagattgtagattaaatgcactccatccatgtccacatggtaattggtgcttgggagtatttggtggttttattccttttacttccaacggggttcttgtctgttacatctctggtgatttgaaatatcaggaaagacagtttgtcagaaatgagaataatatagttgaaatcagttgggctaaaatattctacagcaagacaatttcttttgggtgaactgattctataatttacttacttttaatgtaaggattagatttattgttgagctgctttccagatcagactgtcactttatagtttttctatctcacagattctatagttgcacccaccggttgtgaaatttcccttttgttgtttttgacttttaattaataaaagtacattgttttcatagcaaacttaaaaaaaaaaaaaaaaa

SEQ ID NO: 134792 - DNA, 2846 bp, Homo sapiens
ccaatcgctggccgcgaggctccggcgaaccaatgggagcgcagcggctgcggcgtccgaacaccgcctcttgtttttcccgcgaaactcggcggctgagcgtggaggttcttgtctcccctggtttgtgaagtgcggaaaaccagaggcgcagtcatgtcgggattcgacgatcctggcattttctacagcgacagcttcgggggcgacgcccaggccgacgaggggcaggcccgcaaatcgcagctgcagaggcgcttcaaggagttcctgcggcagtaccgagtgggcaccgaccgcacgggcttcaccttcaaatacaggtgcggctcctgcggggccgggggctcgagttccagtgtggccgctcacacgcgtctaccagcctgcagctttgatgaggacctggccgactacttgtacaagcagccagccgagcacctgcagctggtgagtgggaccccatccctgagcttcccagggctgctctgccccagttactaatagcctgtgcccttccaggacatccaggtcatgctcaagtcggacgccagcccttccagcattcgtagcctgaaggtgggtcggagggcagtggctgctgcatggtgcagagggctttggatgcagccagacctgagtgctaaggccacccgcatctctatccagtgccgcagctgccgcaacaccctcaccaacattgccatgcgccctggcctcgagggctatgccctgcccaggaagtgcaacacgtgagtctgtggcccagagggactgtgggaggtgacctgagtgaagatcagaaaggatgagaacaaggtggacttccagaccctgaagctgcaggagctgcctgatgcagtcccccacggggagatgcccagacacatgcagctctactgcgacaggtgaggcagacgggctgggaggtgggcatctacgacggtggatgtcccagctgtggccctaacccgatttggcctgactaccagcaggggccgtgacagggtgggcgtgggcatccgaagctcctacatccgtgtcctgggcatccaggtggacacagatggctctggtgagttggctttggggtcctggcttagccctgctaaaaggctgtgcttgcatacttctggtaacagaaatgtctatgaggtcatctccaagagcatcgccccctccatctttgggggcacagacatgaagaaggccattgcctgcctgctctttgggggctcccgaaagaggtaggggcttgagttcccttgggtttggggaggcggctgatgatggggctcacagtaggataattacaagtcccagcttctgaagtttgtggagaagtgttctcccattggggtgagtggcctgggatacctttgccaccttggcttgcagggaggaaggctgcagggcagggcctctgcccggaatttcatcatggagggcggagccatggtcctggccgatggtggggtcgtctgtattgacgagtttgacaaggtgagtctgatgaggtgggtagtagccaaaaggtgggtggcaccagggtatgtgacttcctgtgctctgagtggccctccatggagagcccagcctgcagcagcccagcgtggcccaaccgtcctcaggctgcgctgggatgagacgaagggggaggacaacattgacttcatgcccaccatcttgtcgcgcttcgacatgatcttcatcgtcaaggatgagcacaatgaggagagggatgtggtacgtccaggggcagggctggtggccatgggacctgcctccaggcaggcttgtgattgtgtgggaaagattgacctggccaagctgaagaagtttattgcctactgccgagtgtgagtcctggacgcaggcccacgggggtgaggttgcccagcttccctgggtgggagagaacccagtagcggggcccgtcagcacgagagggacagtgaccgccgctccagcatccccatcactgtgcggtgagcaggcgggcagggctgggccatggcagatggggcttgctttacacagcagggtgtgcttggcgaggcagatgtggaggaggccctgcggctcttccaagtgtccacgttggatgctgccttgtccggtaccctgtcaggtgagcagatgcaggggccatggtctcaattgatctgggttccctggctcggagctctgtgggcaggagccaggtgagcagtcagtcctgcccatgttagaaatgagacagctgacactcgaaggggcctttccctggtggatgatggcagggccaggtgtgttggaaaaggaggacgtgctctttcccatggagtgagtgggcatggcctctgcaaggaggtgatgtctctgctgcgctgggccccgggctgctttttgaatgagacaggtgtgttcctgcctctgtgactttgtgcttggcctggagtgtccccacatgtgccatatcctgtctcccgctttgccattggctcccaggtgtctgagcacagcatcatcaaggacttcaccaagcaggtgagcctgccttggagtgggggtgtgagccggcacggggtgcaggtcttctgctggttcccacccagcatgcagcgcaaggttctctaccgcctcaagtgagtcgcgccgcctcactggactcatggactcgcccacgcctcgcccctcctgccgctgcctgccgggtttgtgcactcggtgacctgtcacctccatcgtgccctcatggcagggtaagtgtgagggaacagggtctggaggcagactggccagggtttctgacttggatctgccactcagacttgtgggtaagtcacgtgacttgagtgctccgg

SEQ ID NO: 134793 - DNA, 533 bp, Homo sapiens
ggcacgagtcagaattaaaagaagaaataaaagcattagaagatgccagaataaaccttttgaaagagacagagcaacttgaaattaaagaagtccacatagagaagaatgatgctgaaacattgcagaaatgtcttattttatgctatgaactgttgaagcagatgtccatttcaacaggcttaagtgcaaccatgaatggaatcatcgaatctttgattcttcctggaataataagtattcatcctgttgtaagaaacctggctgttttatgcttgggatgctgtggactacagaatcaggattttgcaaggaaacacttcgtattactattgcaggttttgcaaattgatgatgtcacaataaaaataagtgctttaaaggcaatctttgaccaactgatgacgttcgggattgaaccatttaaaactaaaaaaatcaaaacacttcattgtgaaggtacagaaataaacagtgatgatgagcaagaatcaaaagaagttgaagagactgctacagctaagaatgttctg

SEQ ID NO: 134794 - DNA, 637 bp, Homo sapiens
gttctgattttgactagggtaacttcttctttattaaagcaaataactggacataatcttaaaggattccacctccatcgtctttcctaacttagatcttcattgagaaattgggcaaggttaagtttacttttttctagtgctgcggttttggctcgtcttggtagtctcatcttcatttctgattctggttctggaacttcatgatcactttcagagtcggcttcagcagtctgacacctcctgttcgtcctagctgaaactgtcacttttttctgtcctctgttagtctttagctgagtagactttgatgcttgggttgcttttacacccctgagtggagtcatatatacttctttattcttttcatcttcattttggaaagtagttgtagtcaaggtggcatcctgtgctgcttcagcttggtcaccaaattctttatttcctttttctaactgaatcttgattttctccaaagctctcagacatgtcctatcttttacttgctccagaatctcattcaatagaaccagaagatcttttgcaagatggctactgagttctaaagaactcaaggcttttgtatagactcgaatttctggcgagcacggacttgttaagatctcattgcaaattt

SEQ ID NO: 134795 - DNA, 660 bp, Homo sapiens
cccacctcagattgtgataaatctgtgtgactgactgatgcacactttttctggactataataactgatgctgctctactgctttaatacaggccaaagtaacgtggaagcgcacagcagaaaatcttcagaaagacatcaggtttgttctgattttgacaagggtaacttcttctttattaaagcaaataactggacataatcttaaaggattccacctccatcgtctttcctaacttagatcttcattgagaaattgggcaaggttaattttacttttttctagtgctgcggttttggctcgacttggtaggctcatcttcatttctgattctgggtctggaacttcatgatcactaaatagatgttgaaaatacacgaatttaaatacaagctttaaaaccagtttatttataaataaaacttttttgtttctgactcacattctatcagtgtttaattgatagcctgattccattgacttagcttaaaactaaaatctcaatgtcaaaaaaacactgacttggctatctagcaaagtgaatcagggaaaatctagctaatgattttatatactataacagaacctggtgttatacaggaaaaaaagccacaaacttgtaatgaagcttgtaattaaacgacgaccataactgtccg

SEQ ID NO: 134796 - DNA, 2934 bp, Homo sapiens
aattcccgggtcgacgatttcgtcgggctggcaggctgtagccgagcgcgggcaggactcgtcccgtcagggttccagagccatgggagcggaaaggaggctgctgtcgattaaggaggcctttcggctggcgcagcagccgcaccagaaccaggcgaagctggtggtggcgctgagccgcacctaccgcacgatggatgataagacagtttttcatgaggagttcattcattaccttaaatatgttatggtggtctataaacgtgaaccagctgtggagagggtaatagaatttgcagcaaagtttgttacctcatttcaccaaccagatatggaagatgattgggaagaggaagatggtggccttttaaattatttgtttacttttctcttaaagtctcatgaagcaaacagcaatgcagtgagatttagagtgtgcctgctcataaacaagcttttgggaagtatgccagaaaatgctcagattgatgatgatgtgtttgataaaattaataaagccatgcttattagattgaaagataagattccaaatgtgagaatacaggcagttgtggcgctttcacgacttcaggatcccaaggatgatgaatgcccagtggttaatgcatatgctactttgattgaaaatgattcaaatccagaagttagacgggcagtgttatcatgtattgcaccatcagcaaagactttgccaaaaattgtagggcgcaccaaggatgtgaaagaggctgtcagaaagctggcttatcaggttttagctgaaaaggttcatatgagagctatgtccattgctcagagagtaatgctccttcaacaaggtcttaatgacagatcagatgctgtgaaacaagctatgcagaagcatcttcttcaaggctggttacggttctctgaaggaaatatcttagagttgctccatcggttggatgtagaaaattcttctgaagtggcagtctctgttctcaatgccttgttttcaataactcctctcagtgaactggtgggactctgtaaaaacaatgatggcaggaaattgattccagtggaaacattaactcctgaaattgctttgtattggtgtgccctttgtgaatatttgaaatcaaaaggagatgaaggtgaagaatttttagagcagattttgccagagcctgtagtatatgcagactatttattgagttacatccagagcattccagttgttaatgaagaacacagaggtgatttttcctatattggaaatttgatgacaaaagaattcataggtcaacaattgattctaattattaagtctttggataccagtgaagaaggaggaagaaaaaaactgctggctgttttacaggagattcttattttacccacaatcccaatatccctggtttcttttcttgttgaaagactactccacatcattatagatgataataagagaacacaaattgttacagaaattatctcagagattcgggcgcccattgttactgttggtgttaataacgatccagcttgatgtaagaaagaaagaactcaagatgggtgaaataaaagttaagcttatcgaagccaaagaagctttggaaaattgcattacctgacaggattttattcgggcgtcagaattaaaagaagaaataaaagcattagaagatgccagaataaaccttttgaaagagacagagcaccttgaaattaaagaagtccacatagagaaggtacagaatgatgctgaaacattgcagaaatgtcttattttatgctatgaactgttgaagcagatgtccatttcaacaggcttaagtgcaaccatgaatggaatcatcgaatctttggttttgcaaattgatgatgtcacaataaaaataagtgctttaaaggcaatctttgaccaactgatgacgttcgggattgaaccatttaaaactaaaaaaatcaaaacacttcattgtgaaggtacagaaataaacagtgatgatgagcaagaatcaaaagaagttgaagagactgctacagctaagaatgttctgaaactcctttctgatttcttagatagtgaggtatctgaacttaggactggagctgcagaaggactagccaagctgatgttctctgggcttttggtcagcagcaggattctttctcgtcttattttgttatggtacaatcctgtgactgaagaggatgttcaacttcgacattgcctaggcgtgttcttccccgtgtttgcttatgcaagcaggactaatcaggaatgctttgaagaagcttttcttccaaccctgcaaacactggccaatgcccctgcatcttctcctttagctgaaattgatatcacaaatgttgctgagttacttgtagatttgacaagaccaagtggattaaatcctcaggccaagacttcccaagattatcaggccttaacagtacatgacaatttggctatgaaaatttgcaatgagatcttaacaagtccgtgctcgccagaaaattcgagtctatacaaaagccttgagttctttagaaactcagtagccatcttgcaaaagatcttctggttctattgaatgagattctggagcaagtaaaagataggacatgtctgaagggctttggaaaaaaatcaagattcagttagaaaaaggaaataaagaatttggtgaccaagctgaagcagcacaggatgccaccttgactacaactactttccaaaatgaagatggacagagaaaagtgacagtttcagctaggacgaacaggaggtgtcagactgctgaagccgactctgaaagtgatcatgaagttccagaaccagaatcagaaatgaagatgagactaccaagacgagccaaaaccgcagcactagaaaaaagtaaacttaaccttgcccaatttctcaatgaagatctaagttag

SEQ ID NO: 134797 - DNA, 395 bp, Homo sapiens
  misc_feature (1)...(395): n = a,t,c or g
acaaacaacaggaatccgttcagnaagtttctgcaagagaaacttaaaatnatgaaaaagggtcatcaatcaaacagatctcagaagtcactgtgcagggactactgtttactncctctgggcgtcgatccacctctgcggtgcgatnattttcttcggcnatggggcggcgggccaatgagagcctcaatgtcctcatagtttatcacttccttttccagaagggcgtttgccagcgcctgcaacttgtccaggttgtcctgcagcaccttctcggtgtgtctgtagccttggccaccagcagtcttgcttcatggtccatcatctgctgcaggccttggctgaaaggcgccgcccgatgcccatgaggccctcctgcgcctcagggaaggaga

SEQ ID NO: 134798 - DNA, 510 bp, Homo sapiens
gcacgtcttcattgatctccccacgctgcaggagaggcgggagatttttgagcagcacctgaagagcctgaagctgacccagtccagcgccttttactcccagcgtctggcagagctgacaccaggattcagtggggctgacatcgccaacatctgcaatgaggctgcgctgcacgcggcgcgggagggacacacttccgtgcacactctcaacttcgagtacgccgtggagcgcgtcctcgcaggtacagggggcgcgccctgggtgaaggccctccttagcagggcttgaaccccagaaatacccaggcaggtattgagaggtgaggtggatggaaccatcacacaggaaggaacacacgttgcgtttcagttctgcgtaactcatgtctttatgataccttgtacttttccttagtttaaaatatcacagatttacctaagagtagacgctcgtccaacagaaataaaaaatgccttgccaaagaaagtgaaaaaaaaaaaaaaaaa

SEQ ID NO: 134799 - DNA, 2935 bp, Homo sapiens
tttcgtcttgtggcctggggggccagcacggcctcggcgctgcccgtgtgcggagcctctttaaggaagcccgagcccgggccccctgcatcgtctacatcgatgagatcgacgcggcgggcaagaagcgctccaccaccatgttcggcttctccaacacggaggaggagcagacgctcaaccagcttctggtagaaatggatgtgttctacgcaaaaatagaagagctgaaactggtaaatagaagagctgaaactggtgtatccttatcacggtgttctacgcagaaatagaagagctgaaactggtgtatccttatcacggtgttctacgcagcaatagaagagctgaaactgatgtatccttatcatggggttctatgcagcagtagaaggaaactttcttcctgcagcaacaaggaaatgacgcaaagtgagaagagccaggcttagtatcgtatgactccacttggaatgggtaccacagaccatgtcatcgtcctggcgtccacgaaccgagctgacattttggacggtgctctgatgaggccaggccgactggaccggcacgtcttcattgatctccccacgctgcagagaaagggtgttgcgctgtcacccaggctggagtgcagtgctgcgatcaccactcactgcggcctcaaccttcagggctcaagctgaggagctaggactactatgggcgtgcgccgccgtgctggttaatttttaacagagtctcgctgtgttgccaaggctggagtgcaggccgcgatctcggctcactgcaaccaccatctcccaggagaggcgggaagatttttgagcagcacctgaagagcctgaagctgacccagtccagcaccttttactcccaacgtctggcagagctgacaccaggattcagtggggctgacatcgccaacatctgcaatgaggctgcgctgcacgcggcgcgggagggacacacttccgtgcacactctcaacttcgagtacgccgtggagcgcgtcctcgcaggtccccarggctttcagctttgggaaagcagtgggttcctgccagaggagtgggggcagctgctgtgccagacactgcaaaacacacctggcttctctccgacagccctgcggggtcgagaggactggcgctgcctgtgtcttactgaaaatttattttcgtgtaaccatttacttttatgtggaaatcgaaaagctttttataatagtagcaaagcaggaaggactgagtgggaaccacaagccagttgaaagaaaatacatgacgtacttgagtgctcaggaccacgagctgattcaagttgtacagaatggacacttacagatgtgtggaaaatctgagacaggaaatgaagcctcaccaggactgccaaaaagagcaagatcctgtccaaggaagaacagaaagtggttgcgtttcatgagtcgggccacgccttggkgggctggatgctggagcacacgaggccgtgatgaaggtctccataaccccctcggacaaaacgccgccctgggctttggtcagattgctccccaaagaccagcacctcttcacccaaggagcagctttgagcggaggttcattgccctgggaggacgggcctcgggaacacttttccctcaacgaggtcacttcctggggcacaggacgacctgaggaaggtcacccccatcgcctactccatggtgaagcaggttgggatggcacctggcatcgggcccatctccttccctgaggcgcaggagggcctcatgggcatcgggcggcgccccttcaaccaaggcctgcagcagatgatggaccatgaagcaagactgctggtggcccaaggcctacagacacaccgagaaggtgctgcaggacaacctggacaagttgcaggcgctggcaaacgcccttctggaaaaggaagtgataaactatgaggacattgaggctctcattggcccgccgccccatgggccgaagaaaatgatcgcaccgcagaggtggatcgacgcccaggaggagaaacaggacttgggcgaggaggagaccgaagagacccagcagcctccacttggaggcgaagagccgacttggcccaagtagttgggaggtgttggctgcacgtgcgggtggtccgggaagtgagggctcactcagccaccctgagttgcttttcagctgaggtttgcacttcctctcgcggccctcagtagtccctgcacagtgacttctgagatctgttgattgatgacccttttcatgattttaagtttctctgcagaaactactgacggagtcctgtgtttgtgagtcgtttcccctatggggaaggttatcagtgcttcccgagtgagcatggaacacttcgagttcccagggttatagacagtcgttcccagtgtggctgaggccacccagaggcagcagagcattcagactccaaacagacccctgttcatgccgacgcttgcacgaccgccccagttcctgtggctccctcggaatgctaaggggatcggacatgaaaggaccctgtgagccgattgtcctatctccagcggccctgtcatccagctcactcatcaatggggccacacagtcaggcccaggcactgggctccggaggactcaccactgccccctgctgccatgtggactggtgcaagttgaggacttcttgctggtctagtcacgcatgcagtgttggggatgccttggtttttactgctctgagaattgttgagatactttactaataaactgtgtagttggaaaatctaagaaacaaaaaacaattaataatgaaagggggggggccctttttaaagattccttgggggggccaaattttaccggggatgggaaggaaatatttttttccttatggggggccgaattaaaacctccctgggaatttttggaaagaa

SEQ ID NO: 134800 - DNA, 3154 bp, Homo sapiens
  misc_feature (1)...(3154): n = a,t,c or g
ctttcaggccaacatggccgtgctgctgctgctgctccgtgccctccgccggggtccaggcccgggtcctcggccgctgtggggcccaggcccggcctggagtccagggttccccgccaggcccgggagggggcggccgtacatggccagcaggcctccgggggacctcgccgaggctggaggccgagctctgcagagcttacaattgagactgctaacccctacctttgaagggatcaacggattgttgttgaaacaacatttagttcagaatccagtcagactctggcaacttttaggtggtactttctattttaacacctcaaggttgaagcagaagaataaggagaaggataagtcgaaggggaaggcgcctgaagaggacgaagaggagaggagacgccgtgagcgggacgaccagatgtaccgagagcggctgcgcaccttgctggtcaatcgcggtggtcatgagcctcctgaatgctcttcagcaccagcggaggcagcatttcctggaacgactttgtccacgagatgctggccaagggcgaggtgcagcgcgtccaggtggtgcctgagagcgacgtggtggaagtctacctgcaccctggagccgtggtgtttgggcggcctcggctagccttgatgtaccgaatgcaggttgcaaatattgacaagtttgaagagaagcttcgagcagctgaagatgagctgaatatcgaggccaaggacaggatcccagtttcctacaagcgaacaggattctttggaaatgccctgtactctgtggggatgaccgcagtgggcctggccatcctgtggtatgttttccgtctggccgggatgactggaagggaaggtggattcagtgcttttaatcagcttaaaatggctcgtttcaccattgtggatgggaagatggggaaaggagtcagcttcaaagacgtggcaggaatgcacgaagccaaactggaagtccgcgagtttgtggattatctgaagagcccagaacgcttcctccagcttggcgccaaggtcccaaagggcgcactgctgctcggcccccccggctgtgggaagacgctgctggccaaggcggtggccacggaggctcaggtgcccttcctggcgatggccggcccagagttcgtggaggtcattggaggcctcggcgctgcccgtgtgcggagcctctttaaggaagcccgagcccgggccccctgcatcgtctacatcgatgagatcgacgcggtgggcaagaagcgctccaccaccatgtccggcttctccaacacggaggaggagcagacgctcaaccagcttctggtagaaatggatggaatgggtaccacagaccatgtcatcgtcctggcgtccacgaaccgagctgacattttggacggtgctctgatgaggccaggccgactggaccggcacgtcttcattgatctccccacgctgcaggagaggcgggagatttttgagcagcacctgaagagcctgaagctgacccagtccagcaccttttacttcccaacgtctggctgagctgacaccaagattcagtgtggctgacatcgccaacatctggcaatgaggctgcgctgcacgcggcgcgggagggacacacttctcgtgcacactctcaacttcgagtacgccgtggagcgcgtcctcgcagggactgccaaaaagagcaagaatcttgtccaaggaagaacaagaaagtggttgcgtttcatgagtccggcccaccccttggtgggctggatgctggagcacacggaggccgtgatgaaggtctccataacccctcggacaaacgccgccctgggctttgctcagatgctccccagagaccagcacctcttcaccaaggagcagctgtttgagcggatgtgcatggccctgggaggacgggcctcggaagcactgtccttcaacgaggtcacttctggggcacaggacgacctgaggaaggtcacccgcatcgcctactccatggtgaagcagtttgggatggcacctggcatcgggcccatctccttccctgaggcgcaggagggcctcatgggcatcgggcagcgtcccttcagtccaaggcctgcagcagatgatggaccatgaagcaagactgctggtggccaaggcctacagacacaccgagaaggtgctgcaggacaacctgggacaagttgcaggcgctggcaaacgcccttctggaaaaggaagtgataaactattgagggacattgaggctctcattggcccgccgccccatgggccgaaggaaaatgatccgcaccgcagaggtgggatccgacgcccagagggagnaaacaggacttggggcgaggaggagaccgaagagacccagcagcctccactttggaggcgaaagagcccactttggccccaagttagtttgggaggtgttggctgcacgtgcgggtggtccgggaagtgagggctcactcagccaccctgagttgcttttcagctgaggtttgcacttcctctcgcggccctcagtagtccctgcacagtgacttctgagatctgttgattgatgacccttttcatgattttaagtttctctgcagaaactactgacggagttctgtgtttgtgagtccgtttcccctatggggaaggttatcagtgctttccgagtgagcatggaacacttcgagttccccagggtttatagacagtccgttcccagtgtggcttgtggccacccaagaggcaagcagagcattcaagcctcccaaacagaccccctgtttcatgccgacggtttgcacgaaccgccccagttcctgtggctccctcggaatgctaaggggatcggacatgaaaaggaccctgtgaagccgattgtcctatctccaagccggccctgtcatccaagctcactcatcaatggggccacacagtcagcgccagggcacttgggttccggaagacttcaccacttgccccctgctggccaatgttgggacttggtgcaaagtttgaggacttctttgctggtctaagtcacgcatgcagtgtttggggatgccttagtttttactgctctgagatattgttgagatactttactaaaaaaactgtgtagttggaaaatctaaaaaaaaaaaaaaaaaaa

SEQ ID NO: 134801 - DNA, 368 bp, Homo sapiens
gaacagacaggaaatcaactgggtttgaaactctggtggtgacctccgaagatggcatcacaaagatcatgttcaaccggcccaaaaagaaaaatgccataaacactgagatgtatcatgaaattatgcgtgcacttaaagctgccagcaaggatgactcaatcatcactgttttaacaggcaacatttcatacaccatttagtcacctaggccaaagtccggaaggatgctcctcttacacttttccgaagataatgagcccagccaaggcaacagagatgcttatttttggaaagaagttaacagcgggagaggcatgtgctcaaggacttgttactgaagttttccctgatagcacttttcaaaa

SEQ ID NO: 134802 - DNA, 2190 bp, Homo sapiens
atggtgctgggcgccaaaaccatcaagacgttcacagctctcagacaccagcgatcaaatcagaatcacgctgtcagtgctttggtagaagcacccaaagggactttgagagcagaggagagagaattctcagtcaggctggggcatctggaatcttccagaagctgcattgtggagggtgagagcacagaatctggctctgacgaactcaggcaagatggaaccacatttgaaagaatctatgaagacagacttggcaaaggcaggagtcacggcaaatcaagggatctggctagcaaggactcacaggcaagcccacagcaggctcggtgcagcagcaaaagaggccagcaacaggaatctgcaggagctacagctctgagggagagaaaccttgctctcagttcagaagaaccgcagctccaagaagatgtaatacataaacgagaaaggaaacctactgaaccattacaccctgaagatatatctggagtccaggatttcactgagaactggatagctgggcatgccaattgtatcttcaatggctctctgcttgctctcagcacggaatccaaactccttagcacagatacaatgatcttcaagctcagggctggccctcgggatgcagcgacccctcctcgccaggctccgcgggactccgggcagggcgctcagtgctccggcagccacagggttcgcagagctgagagccgcccaagggatggcgatggcgtacttggcttggagactggcgcggcgttcgtgtccgagttctctgcaggtcactagtttcccggtagttcagctgcacatgaatagaacagcaatgagagccagtcagaaggactttgaaaattcaatgaatcaagtgaaactctttgaaaaaggatccaggaaacgaagtggaagctaaaactctacgcgctatataagcaggccactgaaggaacttgtaaaatgccccaaaccagggtgtatttgacttgatcaacaaggccaaattgggacgcatggaatgcccttggcagcctgccccaaggaagctgcccagggtagaactatgtggatttggtgtccagttttgagtccttccattgggaatcctcctagtccaggtggagcctggaacagaaagggataaccaactgggctttgaaactctggtggtgacctcccgaagatggcatcacaaagatcatgttcaaccggcctcaaaaagaaaaatgccataaacactgagatgtatcatgaaattatgcgtgcacttaaagctgccagcaaggatgactcaatcatcactgttttaacaggaaatggtgactattacagtagtgggaatgatctgactaacttcactgatattccccctgggtgggagtagaggagaaagctaacactaatgcccgttttactgaggggaatttgtggggctgttttataggattttcctaagcctcttgattgcagtgggtcaatgggtcccagctgtggggcatctccagtcaccctccttggggcttattcgatgcccgtgttattgcatcttgacaggggcacattttcatacaccgtttagtcaccttaggcccaaagtccgggaaggatgactcctcttacacttttccgaggataatgagccccagccaagggcaaccagaagatggcttattttttgggaaagaagttaaccagcgggtagagggcatgtgcctcaagggacttgtttactgaaggttttccctggatagcacttttcagaaagaaagtctggacccaggctgaagggcattttgcaaaagcttccccccccaaatggccttggaggaattttcaaaagaggtaatcaggaaaagagagagagaaaaactacacgctgttaatgctgaagaatgcaatgtccttcaaggaaaaatggctatcagatgaatgcaccaaaatgctgtggtgaacttctttatccagaaaatcaaaaactgtgatgaccacttacagcagcaccaaagcatgtccaaggaaggatgtgctgttccctctgtctttccagtactggaactaaataacgcttcattgtgccttcttgtaggtgctagagatatcaattacacaatgatgagtatttccactcacaagctctgaatgaaataaaaaggttttggtaaaacaagcttaagaattcacacaaaa

SEQ ID NO: 134803 - DNA, 387 bp, Homo sapiens
tgactgttggcttcttgaccagcggccagacatcaccctcagattctcaggtttctataaaccttggcaggaagagaggagagggcgcgggttggattgtatgccccccaggcatgttaagggggaaattagagaaagggaggcccagctctgttgcgcaggaaaagggtgtctacaggaagcccaaatttttcttctctttgtctctcttcagagtctgtgagcctccagcctgggagccctgggactggagcagctcagccgccgtctttctttgcttgaaagcattcacttcatcatccagggatttcttcttatcctccagtttattcttctcgtcctggtgcagtttcttcagacggtcaaacttctcgtgcagctcttcga

SEQ ID NO: 134804 - DNA, 494 bp, Homo sapiens
  misc_feature (1)...(494): n = a,t,c or g
ggcaccccaaaggaaagctgtcagttaaaataggaacctcggcttaaaaggctaaatggagtccagtccagctgtagcggggaatactattcagtacacagccatggattacaggaccctgggtcncatgcagcatgcagcaaacagcagagttaatttttcttctctttgtctctcttcagagtctgtgagcctccagcctgggagccctgggactggagcagctcagccgccgtctttctttgcttgaaagnattcacttcatcatccagggatttcttcttatcctccagtttcttcttctcgtcctggtgcagtttcttnagacggtcaaacttctcgtgcagctctttctctgcctctttgantccgcttctttctctttgactcgctggacgaacatctgtctcatctcctcttcttttttctggagttcccctaggaactcgttccttttggcctcatatgtctcctgtaaactgaagggtttgctg

SEQ ID NO: 134805 - DNA, 3451 bp, Homo sapiens
ctacaagcctatcgtggaattcatcgatgcacaattcgaggcctacctgcaggaagagctaaagatccgaagagtgctacacacctaccatgactcccgaatccatgtctgcttgtatttcattgcccccacgggtcattccctgaagtctctggacctagtgactatgaagaagctggacagtaaggtgaacatcatccccatcattgccaaagcagatgccatttcgaagagtgagctaacaaagttcaaaatcaaaatcaccagcgagcttgtcagcaacggagtccagatctatcagtttcctacagatgatgagtcggtggcagagatcaatggaaccatgaactacacccgagatgtgtttgttatcaccatcaccatcttagacaaatctggctcaagggcccacctgccgtttgctgtcattggcagcacagaagaactgaagataggcaacaagatgatgagggcgcggcagtatccttggggcactgtgcaggttgaaaacgaggcccactgcgactttgtgaagctgcgggagatgctgattcgggtcaacatggaggatctgcgggagcagacccacacccggcactatgagctgtatcgccgctgtaagctggaggagatgggcttcaaggacaccgaccctgacagcaaacccttcagtttacaggagacatatgaggccaaaaggaacgagttcctaggggaactccagaaaaaagaagaggagatgagacagatgttcgtccagcgagtcaaagagaaagaagcggagctcaaagaggcagagaaagagctgcacgagaagtttgaccgtctgaagaaactgcaccaggacgagaagaagaaactggaggataagaagaaatccctggatgatgaagtgaatgctttcaagcaaagaaagacggcggctgagctgctccagtcccagggctcccaggctggaggctcacagactctgaagagagacaaagagaagaaaaatgcgtcaaaggcccgtagtcgtcactggagggaaaaaagtacgtcgcgcgagattctgcgacgggatttggaagttagggaacagccgcggcgcaagcgcactggcctcacaaccccggacggcacgcggtcggcttcgtccctggggtccctgcttgggggcggagaagatggctggaggacgtctgctgttggggggcgacttcctgtcgcgccgccgctgccccccctcccgccgccgccgctgccgcccctcccgccgcccccgcccgagccagtgctggagcagtggcgctatagccacgaaagtgactggcagtgggctctgcggcgcagcttcatctgtcggcacctgcacagctatcccggggctgccctcgaccagctcctcgcgctctccgccgcctggaccaaccacgtcttcctgggctgcaggtacagcccacgcttgatggaaaaaattctccaaatggctgaaggtattgatattggggagatgccttcatatgatctggtgctgtccaaaccttccaaaggtcaaaaacgccacctctcaacatgtgatgctagtagttcaaaagatgaaagacaggaagatccttatggccctcaaacaaaagaggtaaatgaacaaacacattttgccagcatgccaagagacatctaccaagattatactcaagactctttcagtatacaagatgggaattctcagtattgtgattcatcaggattcattctcacaaaagaccagcctgtaacagccaacatgtattttgacagtgggaaccctgccccaagcaccacatcacagcaggcaaactctcagtcaactcctgagccttcaccatcacagacatttcccgagtctgtggtagccgagaagcagtattttattgaaaaattaacggcgacaatctggaagaacctttctaatccagaaatgacttctggatctgataaaattaattatacatatatgttaactcgttgtattcaggcgtgtaagacaaatcctgagtatatatatgctcctttaaaggaaattcctcctgccgacatccccaaaaataaaaaacttctaactgatggctatgcttgtgaagttagatgccaaaatatctacttaactacaggttatgctggcagcaagaatgggtccagggatcgagctacagagctagctgtaaaactcttgcagaaacgtattgaagttagagttgtccggcggaaattcaagcatacatttggagaggacctcgtggtgtgtcagattggcatgtcctcctatgaatttcctccagctctgaagccaccagaagacctggtggtgctgggtaaagatgcttccgggcagccaatttttaatgcttctgccaaacactggaccaattttgtcattacagaaaatgcaaatgatgcaattggtatccttaacaattctgcctcattcaacaagatgtcaattgaatacaaatatgagatgatgccaaatcgcacatggcgttgtcgagtgtttttacaagatcactgcttagctgaaggttatggaaccaagaaaacaagtaaacatgcagctgccgacgaggctttgaaaattcttcaaaaaacacagcccacttatccatctgtcaaaagttcacaatgccatacaggctcttcacccagaggatctggaaagaagaaagatataaaggatcttgtagtttatgagaattcttcaaatcccgtgtgcacgctgaacgacacagctcagtttaaccgaatgacagttgagtatgtctatgaaaggatgacaggcctccgctggaaatgcaaagtgattctagagagtgaagtaattgcagaagcagttggggtgaagaaaactgtcaaatatgaagctgctggggaagctgtgaaaaccctcaaaaagacccagccaactgtcattaacaacttgaagaaaggagctgttgaagatgtgatttcaagaaatgaaattcagggccgctcagcagaggaggcttacaaacagcaaatcaaagaagataatattggaaatcagctgctgagaaagatgggttggactggtggtggtttaggtaaatctggtgagggcatacgggagcctatctcagtgaaagagcagcataagcgggaagggcttggtctggatgtagagagggtgaataaaattgccaagagagatattgaacagatcatcagaaactacgcccgctccgagagccacacagatttgactttctctagagagctgactaatgatgaacggaagcaaatacatcagattgcccagaagtatggtcttaagaagagactcacagcaactctccattatagctttcacacggtttggatgtgcagcacatccaaggcaaccacagctgtggtagagcttggtaaaagactgaagatacattggtgctttgatgaaaagataaatcaagtataa

SEQ ID NO: 134806 - DNA, 4979 bp, Homo sapiens
tttcgtcccgccccccttcgtagaagcctatggctggggttgcaggaagaactggaactgggctggccatagggggaagcggcgcgttaaatccgccccctctccataccctactttcaaggggtgggcggtagaggggaggttggggttggagcagcggcgagggggcccctcccttgcacctccccccaccggacttggtcgcgcccgaagtgtaacactttctctttgtcggaggagctcctctgtttcctgtgcagtagctcccgttgcggcggcacccgtggcagccctggcggacgcaggagcgatggcagcgaccgatatatctcgccaggtgggtgaaggttgccgaactgtccccctggctggacatgtggggtttgacagcttgcctgaccagctggtgaataagtccgtcagccagggcttctgcgttcaacatccttgttcgtgggagagacaggtttgggcaagtcccaccctcatgggacaccctgtttcaacaccaaatttcgaagggggagccagccacccacacacagccgggtgtccagctccagtctaatacctatgacctccaagagagcaacgtgaggctaaagctcacgatcgttagcacagttggctttggggaccagatcaacaaagaggacagctacaagccatatcgtggaattcatcgatgcacaatctcgaggccttacttcaaggaggacccaaaagttcggaagagtgctacagacctaccatgactcccgaatccatgtctgcttgtatttcattgcccccacgggtcattgcctgaagtctctggacctagtgactatgaagaagctggacagtaaggtgaacatcatccccatcattgccaaagcagatgccatttcgaagagtgagctaacaaagttcaaaatcaaaatcacccagcgagcttgtcagcaacggagtccagatctatcagtttccttacagatgatgagtcggtggcagagattcaattgaacccatgaacgccccaccttcccgtttgctgtcattggcagcacagaagaactgaagataggcaacaagatgatgagggcgcggcagtatccttggggcactgtgcaggttgaaaacgaggcccactgcgactttgtgaagctgcgggagatgctgattcgggtcaacatggaggatctgcgggagcagacccacacccggcactatgagctgtatcgccgctgtaagctggaggagatgggctttaaggacaccgaccctgacagcaaacccttcagtttacaggagacatatgaggccaaaaggaacgagttcctaggggaactccagaaaaaagaagaggagatgagacagatgttcgtccagcgagtcaaagagaaagaagcggagctcaaagaggcagagaaagagctgcacgagaagtttgaccgtctgaagaaactgcaccaggacgagaagaagaaactggaggataagaagaaatccctggatgatgaagtgaatgctttcaagcaaagaaagacggcggctgagctgctccagtcccagggctcccaggctggaggctcacagactctgaagagagacaaagagaagaaaaattaaactctgctgtttgctgcatgctgcatgagacccagggtcctgtttgggcttcctgtagacacccttttcctgcggcaacagagctgggcctccctttctctaatttcccccttaacatgcctggggggcatacaatccaacccgcgccctctcctctcttcctgccaaggtttatagaaacctgagaatctgagggtgatgtctggccgctggtcaagaagccaacagtcatgtggctcgcagatgcatcctgcatcccagtccccctcccagcacccccagccatcccccctgtcttcccccacatctttgccagaggtgtgacatggtcagggggcccatctgctactctttcccaccagctcccctgttccagttctggttgctgtttagtttcccctggaggtatttgcaacccacccatggctggggtaacccaccgaatcagcacagctggtccccttgggtctcctgttattcccagttcattagttcctcctgggggtccaccccaccctcatcctcaggagccacagccatttcttagagggtttcaaaaaggacagcctttggcgccttttccttctaacctttgagtccagccctttccagttttcattcactcgaagtaactgcacttcaagctgcgctcaaaatcggcaacgcatttatttacaccaagcccttcccataaaacacaactgctgaagaaaatagcagacgtatcccctctctctaactctgggtatcccacagatgcaaaagggagaataaacctgaatattattaccagcctagagtcttgaatgatagccttaccgaattcttcttgcgaggtatttcagcatctcggcgggtaatttccggaagggctccatactgtcccaataaggtgaggccagtagcaggaataataaatcccactttgtaggctggaaaactgagctgtcaaaagaatcaagtgtttgggggtttgctctgatgagtcttctagttcatttggtgaatgtcatgatgatttttaacatgcattttgcatgcatcccccaataagaagagatgagactcggccggagagaagaaaaggcccttaactttctttccaatttaaggagttgagagtttaaaaatattccagccctaacgtttttatcatgggtcccatctgatagtggctttgggaacctctgtgaagtagagagccctcccttgtcagggttatgaggcacagtggcctttggtgtttggccagtgacagtgtgagagatggagttgacctggcaatgatctgtggctaaacatgccgttctctctgccctatcctttgcagtaatccatggctgtgtactgaatagtattccccgctacagctggtactggactccatttagccttataagccgaggttcctattttaactgacagctttcctttggggtgccaggcagcgaggccccccacccctatcctgccatgtacttcaagctcacttcttctttttgagttccgcaacttgctcctgcctcccagccccactggcactgaccatgaccacctacttctattttttttttagagtttctttttttgatcacttactttcaaaagcacacagtcaaacaaggttatgccaaatttccaggcctttttgaagtattgagaaggggaaggggatttctcacttccaattatagatcataataggaagcaaaaagaaaaaaatgaaaagcaaacatatgcacgcacttttcttgttgacaaagcaagaatgtaggtttgctgtgtaggtttggtgctctattgattgggtgagtgaccagagcaagtatgaaggttgatgctgccaaagcacaagcctttttgaagtattgagaaggggaaggggatttctcacttcaattatagatcataataggaagcaaaaagaaaaaaatgaaaagcaaacatatgcacgcacttttcttgttgacaaagcaagaatataggtttgctgtgtaggtttggtgctctattgattggtgagtgaccagagcaagtatgaaggtgatgctgccaaagcacaagccagtttcttgggaaaattcaagttacagtggagtatttttttgaagaccatatgcttggaggtagaaacaaaccaacgaccaaaaaaaaaaaaaaaaaaaaaatctgctcagatactcagccagtagctcagagagatgctgagttaggcctgtcaggtctccttgggaaaggcttcatatttgcaactttgatgattctatgtccagcttcagagctgctttcccagaaattcacgcttaaacaaccaaccggtaaccaccacttccccacaccgccgcctggtaattatttgcattacaaaccggaggcgccctcatttgcatttgtgtacagattaactagttaaggcttgagaagctctgaataattcaaaagtattagacccacacagccttggagagaccttcagaaactaaggaggagttttatattaagggagacattttagtcagtaagacgatataacctacttactccgtaaggggaaatgaaggcccagagaagggaagggacttgaccgaggtcccacttctgtttcgaggcagaagccagactaattttcatgcctcctgactcccaatcagtttcacaaagggattcaatctgtttatatacgttacattcctggatacgaggtcttttgatgttcagagtaactgactagttagtattagaagaccctcgaggtttttttccacagaaaaacatctgaagatggattgggtgagggctggcaaaacgaaggcatgccgggccagctccttaacccaatgacccagtgatgctgcaaggctggaacggggtccaggagactgtgtgtaacaggtgccctaggtgacccttataatcagggaagtttggtgaacaaaaatcgaacccatgagtgaacataaattaaaaagttgatcaacctattaaaatgtgtatttcattgggtagcttttctcactgtagacagattttttccttcttcaatgaaaaggcttttaaattagtacaactgttactatttaaaaaaaaaataccctaagtactctgtttacttctggtgaaacaaaaccagtcattagaaatggtctgtgcttttattttcccagactggagtggcttttctgaaacacacacacacacacacacacacacacacacgtacacacatccctcacttctcttaagccaagaagtttgctttccctagctgcagtgtagatggctcttgtttttgtttttttgttttaatcatttggcattcacatgtggctgttaatatgtgcttgtttttaattaaaacaagaagcttt

SEQ ID NO: 134807 - DNA, 1242 bp, Homo sapiens
atggtgggcatccctcccccagcctcgctgctgctttgcagtttggtctcagactgctgtgctggcaatgagaaagggaattcccctgaccccttgcgcttcctgggtgaggcgatgccttgccccctggcctttccaaggccttccaatggggcatttggggttggcttggccatgggccaaaccccctcttatcctttggtttcccccggagaacctaacctttccgcttcccccaaggttttaaaaaagaatgggaagaaaacggccgcaacaaggttatccccgggaaaacgccgcaacggggtttcgggaaacccagggaagaccgccccacagcggaagggggacgcctttcacaagggggggggaaaaaactgcccctggggccagtttgggccccagaaaggtccaaatttaaaattgccaaagccttggcgccaaccggaaccaaggtgttttgtgcacccggaacctttgggaaaaaaggccgggggaccaaggttggaaggccggccacaaccggcacaaatgttaaaaattggttccttttgtgtcaagcctaagctgctgatagctgtcattgaatgctgcttccacccttctgtttctgcaaacaggtacaagtctgcagccctggccaccagcatcatcaggtgctcccaaaccttgagcccaccagtggccggattttcaggatctccgcaggtcattaagcggatgatggatgtcattcaggagatcgaacgccagttgctgatggtgctgttggaaaacatcccggaacaggagtcgcgtccaaaacgtgaaaaccagagtttgcttaatggacctcaggtcgataccagcaaagccggtgtggtagccagtcaggatcaggatgcaggctggaatgacaaacgtatttctgatgcgctgaagcagggtgatacacgttacgtcaatattcggcagtcgattccggtgaatctctactacctgacggcctttgttggtgcagatggtcgtacccagtatcgacttggagaacttcattgccaagtttggggactctggttttgtccttgtgaccttgggctccatggtgaacacctgtcagaatccggaaatcttcaaggagatgaacaatgcctttgctcacctaccccaaggggtgatatggaagtgtcagtgttctcattggcccaaagatgtccacctggctgcaaatgtgaaaattgtggactggcttcctcagagtga

SEQ ID NO: 134808 - DNA, 2721 bp, Homo sapiens
  misc_feature (1)...(2721): n = a,t,c or g
ttttttttttttttgggagggtggggagagataacgctgtaaacttttatttttcaggaaatctggaaacctacagtctccatgcctgctcagccaagaaggagctcactgtgggcaccagagacagggacccaatgtggaaaggatgatttttggccatttttcctgttcttcaagaaaacaggagataactagaaggactagagaatggggctgccagaactagtgggaagctccctagaaatggtgacatcgcccaccaaacagaccccgccaaggctgcacctggccttatgtctccttcacctttctggccccacgcagccaccagacagccatgcccagcagcttcccacaaagccatagagtccccagagtgagccccagcagaaacacaaaaacgtcgagcaggtactgctcatgccagggctgctgaaagacatagggcttgaggtgcgtcgcgccccctgtctggaggacgtggtcaatccagcccaccagccgctgtgtggggcctgagcgggtgggaacgcaggatgacactggcaagccactgcccgcggacttgtatctcttgtccttcccatgatttgtttcatcttaaagagccaatgtctctgccttgagcttctttaactgaatagaaacaccaaactttttggcttctactcggaccatgttttcaggctggtctccaaagagagggatccccaccatgggcacaccatgctggatggcctccattatgctattctgcccgccgtgggtgacaaacagacggatgcttgggtgagccaggaggtcactctgaggaagccagtccacaattttcacatttgcagccaggtggacatctttgggccaatgagaacactgacacttccatatcaccccttggggtaggtgagcaaaggcattgttcatctccttgaagatttccggattctgacaggtgttcaccatggagcccaaggtcacaaggacaaaaccagagtccccaaacttggcaaggtgtttaccgtctttgggtgtatgcttgttattagtgccccatgttccgggttgtttgctgccccacccttcttggtatctttgtagctggtgcggtatgtttgtggttgggaattgtgtttcggtttcaatgtggtgctgctcgggtaagcccctttgattgggtgattgatgaacctggactgcagtgttcataaccacggcacagggggcacgcctttgtttttttgtgctactcaccgggggggttgttccgttgtgtggggggcgcccgctgttttgtgttctgtggtcgggctgctgttcggggggccgcttatttgggtgttgtgcgtcggggccgctgtgtgccataagtgccaagtgggggtttctgtttcggtgtgtttgtcctgctttggtaccggcgtttaatttgcctcccccatgggaaatttttgccttttgtggggtgctatcatccgcggtgatcgtggaacgccagcacccttgtttggattgggtgaactgacttgctagtgcatgcaaagcttgtgcactggcctgtctgtttataccaactgtctgttgcacttgggcaaaacccatggctgttaccctaacattcaatctgccatatgcaaagcaaccatcccccccatattctgcaccagccttgtgcatgtcaatcagctgcacatgcatgtgccctgcaacactgcattctggcccatatccttgtggtactggtttaataggtttttccatcaagcctccaatataaacagtgttgggaagcaggggccgggcaaaatcaaaggcaaaatcagagttaacaaaccacaactctgctttcagtagaagatgagacaaaactggcctagagccttctgggaaatgctccttgatggtgttgtcaaatgtagactgcatgtcccattggctcctggagaaactaaagaacatcagaaaattcttcactcggccccagaagtccatgtgatcagtcagcaaggaagggaatactggaacataagacaaggggcttggtagcccaaaatccaaagagccgaatgtggtgggaagaatggccacaaatggtttcacaagcttctcagcaatcaggaaagaacagaaatcaaatgcttcaacaaataccagatcatagttctcattctttaaggaatccattatatcctttctgcttagcaaataactacattgagtcccaaatatttccattagctttacaagggcttcagattcttttctgccatccaatgctgtttctatgtagctatcaaaatgcttcttaattcttttttgatgatcttcaggtgaaaaccacccggataacttggtatgatttttcctcctctttaatatctgggatcaaaaactttccactctgatgaagcatagtcacattatgaccatgctcttgaagaatctgagacacccggtccaacagtaggtaatggcttccacctcagcaatagaggcccctctctgccccacggctagattggcttctccctcctccagccaggtccgcaagcccagcctggaaaatcgcctggataactctgatcaatcgccgttcgctggagccctggcagtgcggngatccgggacgcgcctgtctgggaattctccggccaagcactcacccagtgtagatattgtcaggattttggcagcctctgagagcaggaccccagaaagaaggaa

SEQ ID NO: 134809 - DNA, 541 bp, Homo sapiens
tttcgtgcctgatacagtctaggtgacgcatccttgccgggccagcccgagcagaagctgggtcggcaagcgacaggagcacgggtcatcttttccccagaggcgtcggaatggacctgtgccacccacagcccgcggagctgagcagcggggagacggatgagttaccgaggatctagtggcaccgaaagcagctcctggaggacatccagaaactgaaggatgagattgcggatgtgtttgcccaaatcgactgcttcgagagtgcgggggacagccggatggcccataaagagaatgagctgtgtattgggcgcaagaagttcaacatggaccccgcccagggtatccagtatttgattgagcacaagctgctgacccctgacgtccatgacattgcacggttcctgtataaaggcgagggcctcaacaagacagccattggtacctacctgggggagaggtaagaacgagtggagccttagcgaggcaggaaatgaaggtgtgcaggtgtgtacaggtgtgtggatgtgcaggtgag

SEQ ID NO: 134810 - DNA, 1400 bp, Homo sapiens
cagctgggtcggcaagcgacaggagcacgggtcatcttttccccagaggcgtcggaatggacctgtgccacccaggtaagcaactgccgtcaacctctctgggcctcagggtgctctcttttagaatgggacagcagcccctgcctcacccatgggccaaggtaccaatatgggctcaagtaccagcgatgtccattccaattctacatctgtaggccaggaaagtggccatgaggacatccaggtgagtgcacactcgtgtccacacacgtgtccatgcccacactcctgcacgcttgtacgcaccccaccagctccttgggtggggacccccagaaactgccatggttgcttcccaaggatgtcatacaccttgaatgagggctgtggagggcccgggccacagggtgtgggggctgcatgggagcacctgcctggtgtcctctcgcgcgagggcctcaacaagacagccattggtacctacctgggggagaggtaagaacgagtggagccttagcgaggcaggaaatgaaggtgtgcaggtgtgtacaggtgtgtggatgtgcaggccctcaggtgagtagtcctggggcagggtcccggccctcaagggtggcacagccccagtggctgggggtgtcgcgatccacgatactgcctctgcaacccaggcgtcttccagtccacaggtgccaggaggggagtgggacccagggctccgggaccccttcagcattgccaggcatagatttcacagaccccgccgccttttgagcgctttgtgtccatgaaccgcggcatcaacaatggtagcgacctgcccgaggaccagctgcgggtgagagaggcgcagcccacccagcctggccccggggaatccaggagggacctgtccttagatggatggcccgtcttcaatccagaccgggagggttggctgctcaagctaggtgagagaccgacagacacacgtcgtcgcacacacactcatgcacgcgcgggcacacatcgttgcatgcacaccactgtgagcagggttctcctgggccttcccctgcccccgcctctccccgcacaacccacttcccaactcccactgataggtgttcaggttgcaggatcccgaggctggagccactgggaaatttcctaaacagaacgtggggagaggggggtggtggagggcaagcacgaatcgtaccgcatctcagccaccagtgccgaggaacgtgaccagtggatcgagtccatccggtaaggggtgcccaggtctggggacggcttcccgtcaccttccagaaggccctgcttcttttgggtcttgcttgattcctggaggtggcactgggggctggtcaccctgagagtcccatcgcctgcagcacctggagacccacctc

SEQ ID NO: 134811 - DNA, 364 bp, Homo sapiens
cctggtattggtactgaatgggctgcagttggctgtcattctgagtcatcttccttagccagggcctctttcagtgcaagcgctttattcaactcaaccagctccttagacatctgcgcttgacggagagcatgctgagtggtaaaagcgtcagaagacctgctcgtctctggactggtttctacttgctggaaaaaaatcaggataatgatttataagagaaacaagcaaatggagttccttaggcactatttcatcaagtctcacaggcacttctccattaacaatatctctgttcctttacaacagtggctctgcatacatttgttttaagtatctgaaataaatagctagcctagttccc

SEQ ID NO: 134812 - DNA, 4550 bp, Homo sapiens
  misc_feature (1)...(4550): n = a,t,c or g
gttgcgctacccgtccggaatttccgggtcgacgatttcgtccgggacggatttgaaacttggcggttaaagctctcggctgggacagggcggcgggaggcccagggagaacggggaagggacatttagtttgagacggtgctgagataggatcatgaaggaagaggtgaagggaattcctgtaagagtggcgctgcgttgtcgccctctggtccccaaagagattagcgagggctgccagatgtgcctttccttcgtgcccggagagcctcaggtggtggttggtacagataaatccttcacctacgattttgtatttgatccctctactgaacaggaagaagtcttcaatacagcagtagcgccactcataaaaggtgtatttaaaggatataatgcaacggtcctggcctatgggcagactggctctggaaaaacctattcaatgggaggtgcatatactgcagagcaagagaatgaaccaacagttggggttattcctagggtaatacaactgctcttcaaagaaattgataaaaagagtgactttgaatttactctgaaagtgtcttacttagagatttacaatgaagaaattttggatcttctatgtccatctcgtgagaaagctcaaataaatatacgagaggatcctaaggaaggcataaagattgtgggactcactgagaagactgttttggttgccttggatactgtttcctgtttggaacagggcaacaactctaggactgtggcctccacggctatgaactcccagtcgtcccgatctcatgccatcttaacaatctccttagagcaaggaaagaaaagtgacaagaatagcagctttcgctccaagctgcatcttgtagacctcgctggatcagaaagacagaagaaaaccaaggctgaaggggatcgtctaaaagagggtattaatattaaccgaggcctcctatgcttgggaaatgtaatcagtgctcttggagatgacaaaaagggtggctttgcgccctacagagattccaagttgactcgactgcttcaagattctctaggaggtaatagccatactcttatgatagcctgtgtgagtcctgctgactccaatctagaaggaaacattaaataccctttcggctatgctgacagagcaagcaagatcaagaacaaaccctaattggttaaatattggatccccagacagcttgaacttaatcatctaaagcaacaggtacaacagctacaagtcttgttgctacaggcccatggaggtaccctgcctggatctataactgtggaaccatcagagaatctacaatccctgatggagaagaatcagtccctggtagaggagaatgaaaaattaagtcgtggtctgagcgaggcagctggtcagacagcccagatgttggagaggatcatttggacagagcaagcgaatgaaaaaatgaacgccaagctagaagagctcaggcagcatgcggcctgcaaactggatcttcaaaagctagtggagactttggaagaccaggaattgaaagaaaatgtagagataatttgtaacctgcagcaattgattacccagttatcggatgaaactgttgcttgcatggctgcagccattgatactgcggtggagcaagaagcccaagtagaaaccagtccagagacgagcaggtcttctgacgcttttaccactcagcatgctctccgtcaagcgcagatgtctaaggagctggttgagttgaataaagcgcttgcactgaaagaggccctggctaggaagatgactcagaatgacagccaactgcagcctattcagtaccaataccaggataacataaaagagccagaattagaagtcatcaatctgcaaaaggaaaaggaagaattggttcttgaacttcagacagcaaagaaggatgccaaccaagccaagttgagtgagcgccgccgcaaacgtctccaggagctggagggtcaaattgctgatctgaagaagaaactgaatgagcagtccaaacttctgaaactaaaggaatccacagagcgtactgtctccaaactgaaccaggagatacggatgatgaaaaaccagcgggtacagttaatgcgtcaaatgaaagaagatgctgagaagtttagacagtggaagcagaaaagagacaaagaagtaatacagttaaaagaacgagaccgtaagaggcaatatgagctgctgaaacttgaaagaaacttccagaaacaatccaatgtgctcagacgtaaaacggaggaggcagcagctgccaacaagccgtctcaaggatgctctccagaaaccaacgggaggttgcagataagcgggaaagagactcagagccgtgggaatggaaggcactgcagctcgagtgaagaattggcttggaaacgaaattgaggttatggtcagtactgaggaagccaaacgccatctgaatgacctccttgaagatagaaagatcctggctcaagatgtggctcaactcaaagaaaaaaaggaatctggggagaatccacctcctaaactccggaggcgtacattctcccttactgaagtgcgtggtcaagtttcggagtcagaagattctattacaaagcagattgaaagcctagagactgaaatggaattcaggagtgctcagattgctgacctacagcagaagctgctggatgcagaaagtgaagacagaccaaaacaacgctgggagaatattgccaccattctggaagccaagtgtgccctgaaatatttgattggagagctggtctcctccaaaatacaggtcagcaaacttgaaagcagcctgaaacagagcaagaccagctgtgctgacatgcagaagatgctgtttgaggaacgaaatcattttgccgagatagagacagagttacaagctgagctggtcagaatggagcaacagcacccagagaaggtgctgtaccttctcagccagctgcagcaaagccaaatggcagagaagcagttagaggaatcagtcagtgaaaaggaacagcagctgcaaagcacactgaagtgtcaggatgaagaacttgagaaaatgcgagaagtgtgtgagcaaaatcagcagcttctcccgagagaatgaaatcatcaagcagaaactgaccctcctccaggtagccagcagacagaaacatcttcctaaggatacccttctatctccagactcttcttttgaatatgtcccacctaagccaaaaccttctcgtgttaaagaaaagttcctggagcaaagcatggacatcgaggatctaaaatattgttcagagcattctgtgaatgagcatgaggatggtgatggtgatgatgatgagggggatgacgaggaatggaagccaacaaaattagttaaggtgtccagggaagaacatccaagggtgttcctgcaagggctggtgtggaaacaagcaatgtgggtgcaggaagcaaaagtcagactgtggtgtggactgttgctgtgaccccacaaagtgtcggaaccgccagcaaggcaaggatagcttgggcactgttgaacggacccaggattcagaaagctccttcaaactggaggatcctaccgaggtgaccccaggattgagcttctttaatcccgtctgtgccacccccaatagcaagatcctgaaagagatgtgcgatgtggagcaggtgctgtcaaagaagactcccccagctccctccccttttgacctcccagagttaaaacatgtagcaacagaataccaagaaaacaagggctccgggaagaaaaagaaacgggctctggccagcaacaccagcttcttctctggcctgctccccctatcgaagaagaggcccactgaagttgggagtcatcatctctaccccccagtctggcttgggagatgctttcagggttgcagccagaaggggtttttttaaatgacttcctctggatttcaggtttctggctgttgaaaaaaggaacaaagcgttactgaaaaagaaaggtaaccctttgttggaatgtgggcccttaagcctcccaggtcccagactaactactctatgttctcccagaagggtgctaaagtcacctactgaagagagaacccaactgacttttcctattgactcatcaggaaccagtcctcaagtctggtcaagttgtttcttatttgtgagcagttcaggctaatcntcctgatggggatgaggcccaaaggcttttcttaatcttttggttgtctctgcttaatggaggagcctggcctaggatggaggcctggcttagatctttcattccacctcaggaatgaggttgtgatctttcctgtcctgaccctctctgaattatgtttcaatagtacttcttgattgtctgccatgttgttgaagcaaatgaattatttttaaatgttaagtaagtaaataaaccttagcccgtctactgtttgggaagatccttctgtgttagagggagaaataaaatttcaacctgtgttcctcagcccctgaggaagctattaaggggattcattac

SEQ ID NO: 134813 - DNA, 2529 bp, Homo sapiens
atgcgggatgccgggggcgcgcccagtccgggttgtagccgcgcgcggagcccgagggggccgagcaccgtgcaggggcggggacggcgtcccccttctcctggacgcccttccgactgcgctcgcagggaccccgctctcgccgcgccttccgccgtgccccgcctcgggctgcgctcgcagctccttactccagtgcccgcccgggaacccgggagctcctcgcgccggggccaacgtgcggcgctcctcgccggctacagcgggcgggagacgcgaggcggcgcgggagcaggggaaggaggggaaggagcgggggaggaggggacggacgaaggcagcacgcagtgggcggcggcagggcggaaggagctgagaaagggatcggcccggaagaatctgaatccctgctcggccctcctccctcggccgggagctcggtccctgcaggcagtaagcggtttgtcagcacccactatggccaggcctcggctacgcgctttgttagcaccatcccacatccgcctccgacaacccagcaattcaatactatttctatcaaaccgcctctggacttttaagcagagtggtcagggaagcttcactgagctgacaccagaaggaactctaaaaggcagtgaggaagttggctgcacagatgtcaggaatgaaagtattgcagacagaggaagcagccagtgccaaaaccccaaggcaggagggcacatgacttcctctgggaactgcagggggccacagaggctagaatgtgtgaagcagaagatggagcagatgaaagagatgagagcagtccctgggcagatgtgtctgaggtttaggagagaagttgacaataggaattacaatttgggagtcctgagcatattgatgatgtttaaggccctgagattggagaaggttttcttggagatgcaaggatcaaccctaggactccaacaggaagaggccagggagatggagaaggcagccagcttagacagaaagggatgggaaggaagagccctcgcagaggcagggattgagagagagctggatcaactgcctttggcgaaggaatacctgcctccgagaatagctgtgagaattaaatgcctagaaggattaccagcacctgccctgctggagaggacagcactccgaggagtagcagaggaaccagatggaagtagccatggtctgggacaacctcatgtagcaaaacggccctcctggcctggacagacagctgagggtgcaagccccgagaaatgcgagccatggctcttcatggctgaaggaattggtcacctaacactgacacggtctggaagaattattttgaatagtaggcctgagattcgtctgacagtagctattagcaagctctcctgggaaaaccaccagggagtaaagaagtggaaccaggaaggaaaagaccagcagcaaatatgtgatatcaagccaagtctccagagaaatcccaagggggagcttggggacactatgaattatcctgcagacacatttattctttcaaccactgtcctgttccagagggtccgctccctaccagtcctgcaccaaagcaacaatctccaaaaagcggctagtgacagaaataagcctgcagatcctgagggccaacgtatgctgacaaatgaattagacaagacagcatcctggggcagtgcacacagtggagtaggcagggctcataacagtggacttcacacctggtccctgccttcatggaatttgaagtctagtaagggaatcacagacataagcccacaagtagagttcataatgcacaccataagaggacacaaagtacaacagtgcaggtttgtcttcggccctcacatggtcagggctcaagaggtaccatcaacctacaatcctgaatcacctgaccccggggcaggctccttcttggatgtgtctttgtcttcgtgggtgcagaatggttctggcagatgctgtctcacttcagcagaaacagatctgggtttatggaaatgttttgcagatgggccttttcatatccccctccgcagctactcccactctgcttgtgtgtgcatgactcatcattcgtcatttcaattactgaggcctccattcatcggcctatccatctgccaggcactctctcgccagccagcagccaccactactgagaggtcctcatggaggttccaaagccaccatgaactcaacagatccaaagcagaatgcaggatgagtggtctcaacgttcactggtcctatatgtgcaaaacctgggactcatccttgactcctttctccccttaccccacatccggtctttcatcagttgggataccttacacatccgtggcctcttgccccatccaaggtggtgcaagttatccgagtgatgaactggaaaaggaatggcaccagcatactgatgctcactgtgccctctctgtggagtctgactttagggagtggcctctcttctgctccttcttgccagaagcttttcaggaccagctgccatga

SEQ ID NO: 134814 - DNA, 382 bp, Homo sapiens
cacacgaactgctcaaaggcttggagcgggtctagtaaggcgaacggactgcttccggccagaggtcccgggcggaggaggaagctgtggctgccggcggtgggacgccccggccgctcagcccccgggcactgctgtggggcgttcagctttccacacttggggcaaagcaagccgcgaggaggaaccagacagtcctgttagttgtggccagccctcattccctggaaatggcaaacaaggggaacaagaagcgtcggcagttctctctggaggagaaaatgaaagttgtgggagctgtagactcaggcaagaggaaaggtgatgtggcaaaaggaattttggtatcactccctcttactttaatctacattcttaaagg

SEQ ID NO: 134815 - DNA, 2123 bp, Homo sapiens
ctcaagtgatcctaatttgcagacaagtttggaaacccttggatgaatcaaaatacatcttgaatcaaggaccagagacagccaaaaacaaaagaaaagaaaacacacatattagtcaaattccattcaaagaagtttcctggctatttcagagtactggaatgttgtcacaataacattgctttacttaaattggctcaacaacctatctaaagaaatctttattcttgtaaactacattttctgaaataaattcctgcattattttgtttggaggaaatctgtaattttggaatcaataagggtttgtgtcactcttttcattaaatattcatctatgccatttaattgtccaaaaatgggcatcaggaatgtctacacaagtggaaaggaactgtctaagtttctgtacacttgatatggcttctgtgatggtgacttttggttgctctggtaaagatacctccccttcatcttcacttcctgcttcaactgggtattttcgccagccacccatgtccctggatgatgtctgtgtcctgagagataatgaggatcatcatctgcagtaacaaagtccctggaaatttacttcatttgggacacagggtgggcaatagcccctggtggtggccacaaacttttcaatgggcaatgtctgggttcactgggctggctgattctgtgtcacattctgcaaattccatagggacgatgcctgccttctgccaacatttcaccactgtggatggcttgactgaccaccacgctgcagcaatcatgtcgatggcctgcttgatgtccacctcttcttgatcctcactgctgttgagcttgaggaggatctgttttagaaggtggctctggtacagtactttcatggtgtgaattatgccaagattcagtggctgcaggacagcagtacagttggagggcagatacccaacctgaatcctttccaagtgtggaagcatgttatgagcagagcagttgtctatgagcaagaggatccggcgttccgccctcttcatcctggcatccacttgcatcagccactcattaaacagatcccttgtcatccaagcccactggttggctcggtaatcacaagggagggaatgaatgttcttgaggcagtgtgggctggctgacctaccaacaatcaatggtctcattttttcagtccccgaggcattgcaacaaaagagtgctgtcaaccgctgctttgctttcttgccccctctacagtggtctcctttagcagcaagtgtgtgctggggaagcaactggaaaaacactcctgtctcatcagcattaaagatatcatctgggctgtagtcagcaatcagttttataatttcccctgcatgccactcattaatcttatctattcctagaccattcattaacctgtcactatcttctctacagactgctttcaaagcaattccgtggcgatctctaaatctgttcagccagcccacacttgcttgaaaattgtcatagccaagcatgttggccaagtttagtgcttttttccgaatgacagaaccagtcacaagaatgtttttggcatggatttcttgaacccaaggcaaaaaccagccttatccaatgtcatcataaaagagcgctcctcatcctttttccgctggggtcccacggatgcctcccgcaccttttcttcaaatttggtgcgatcctttaagaatgtagataaagtagagggagtgataccaaattcttttgccacatcacctttcctcttgcctgagtcttacagctcccacaactttcattttctcctccagagagaactgccgacgcttcttgttccccttgtttgccatttccagggaatgagggctggccacaactaacaggactgtctggttcctcctcgcggcttgctttgccccaagtgtggaaagagtgcaaaatgatcaatctgactgcttcgtggagaatggattgtagaggggatgtggggagaactacatcagtccaggcaggagatgatggtggctagaaggttggtgatggcggtagatgcagagaagtaggcagactggaatacagtgagggttgtgcgggaacttgtacaaatgtggacaactttcatt

SEQ ID NO: 134816 - DNA, 1395 bp, Homo sapiens
atgcaagctgagactgcagccgggccagttggtgcaggcccagcatcctggctgtggatttgggcctgccttcttagattctgggagcctctgatggtttctgcccaggggagtgtcattccaaaggtggtgctggctagagtgtatacgtttggacccaagcttaacttttccaatgtggaatcctgggccttcattggtgccctaatgcatgagttatcaaatgatggtgctcgtagacaatttgaattttatctggaagaaatgatcctccctctcatggtagctagtgcccagagtggggaacgggaatgtcatatagtggtgcttacagatgatgatgtggttgattgggatgaagaatatccaccacagatgggagaagaatattcacaaaaatgttacccctgcacttacaccctcttcatctgttccatcccccaatcaacttccaccatatgcaatactttatcctcctcacatactcacacaggagtcgcatatgccactagtagtacagagtcctcagaaaatcccaaaaatattttgcctctctgcaagaaaaaaagggccctaggatttaatgtggccacagttgtgggaactgtctcactcttgccacttggaggttttacttaccatgaaatcacactacaagaacttaccgcctcccttgacatagccttagcaaaaactggcacaagtatatcagcgatagaaaagtctttagactcactaggaggaatggttttttgtaatggacaagctcaaaattacctcctagctgaacaaagaggaatctgtgctgtcatcaacaaaacttgttgcacctacattaatgtatctgaaaaaatggaaactgatacacacacttttccaaaaaaccacagtccagggcagacggaccatcatgacctgccatgggcagtcatcctcagagtgtgtgcagatcaagaggaccaggagaagggcagctggctctgccctgagagacaaagggggcccctttccttgaagaaggacaacaaaggggttgagtgtggactgggaggaggttcagaccggatatggagatccgggtgtcttcaagacagaggtgagtggtggatgagctcacccagggaggacgttaaggatgacgtgaaagggaccaagccaaaccagaagctaaggacaaagaacagagaaccagcagagcaggctgtggaggctggaatctcagcagctggaggagaaccgggagccgacccaggagaggcacgctcagcagagctgaagaaagcgaggcctgaggtgggagttctcgctgcagggagcagtcagctgggcattggcaatggcagccaagtaaaacaattaaaacaaggtgctgacagcgcagctgacaatctgtag

SEQ ID NO: 134817 - DNA, 2328 bp, Homo sapiens
  misc_feature (1)...(2328): n = a,t,c or g
ctattttcctgtaggtcttgccccgggggtgtaagcttcgaaggcggagactgtgtcttttacattttttcccgtttttattgcccagccagcccatgtaggtgactctcggtgtttcctaggcggccaaactgaaggagtttcagctggcacaggggttcccgccaaccgagcgtttaaaaataagcagcgggggacgttagggaacagagggtgtccctcacgacgaccgactctcatcaggtccacgccggcagaagcgattttgcagtttgctttgatgaggaaaacgctctccctgaagagtccctgcactatttctccaactctgtgaccgagacgctgtccacttttctccgtggccgccgcgccctcaactgccttctccttcggtgccccgcccacccctgggcggagagcaccgttctcgcgagaacgctgctggcctcgcctcttcgcattgtgagctctcgcggtaagaggctgaggagccggcctgcaacctgccggggcggctccgctacgcgcagccgcctcagtggcattcctgcacagccacctccggaggattctggctgaggaggaagtggaggtgtcactggcccccgccttttgcccaatcttgtgtgggcactgaaggggggactacaggttcgagagttatgggtgctacatgtgtgctttcagagcagtagtgtgaggaagcttggagtgggatggcaggacggcctcatccctatgatggtaactccagtgatccagagaattgggatcggaaattgcatagtagacctcgtaaactttataaacattcaagtacttcctcgcgtattgctaaaggaggagttgaccacaccaaaatgagtctacatggtgctagtgggggacatgagagatcaagagatagacgaaggtcaagtgacagatcacgagattcatctcatgaaagaacggagtctcagctcactcctttgtattagaaatgtgacttctccaacacgacagcaccatgttgaacgagaaaaagatcacagttcctctcgtccaagcagtccgcgtcctcaaaaagcatccccaaatggttccattagcagtgctggtaacttgcagcagaaacagtactcagtcaagttcagatggtagctgtaagacagctggggagatggtgtttgtatatgaaaatgcaaaagaaggagctcggaatataagaacgtcagaacgagtgacactaatagtgggataacactagatttgttgtagacccatccatttttacttgcacagcccaaatacaatgttggggcaggatgtttggatctggccgagaacataactttacacgacccaatgagaaaggagagtatgaggtggcagagggaattggttccactgtgtttcgagcgattctggattactataaaacaggaataatccgttgtcctgatggcatatctattcctgaactgagagaagcatgtgactatctttgtatctcttttgaatatagcactattaaatgtagagatctcagtgccctaatgcatgagttatcaaatgatggtgctcgtagacaatttgaattttatctggaagaaatgatcctccctctcatgggtaggctagtgcccagagtggggaacggggaatgtcatatagtgggtgcttacagatgatgatgtgggttgattgggatgaaggaatatcccacccacagatggggaaagaataattcacaaattattttatagcacaaaaattttataaaattttcaaagtatattgaaaacagagatgtggccaagtccagttttgaaggagaggggtcttaagaaggatttagattgggaatagaagggttatcctacctacaaagaaaaagtaaagaaaaggcctggaggccgcccagaagtgatctacaactatgtccaaagaccctttattcgaatgtcctggggagaaggaaggaaggaaagagtcggcatgtaggacttttcagtgtgtaaagagtaaatctattcaccaatcttgcagcagctgcagcaggacattccccagggaccagctggtagttcattgcatcccacttccacaagttggatggagctgggtatttttcccctattccatcccccctttttgggcaacagttgaccttcgatcccttgattgcacaggattcccattgctgttgttgctgttctttccttggaaaccctaggcttgttattttttcaccagtgacgttgtantctcntcattttgcactgcagggccattttcttcatgtgaggtgcacttacatgtttgggtttgcgtgtgggtttttaa

SEQ ID NO: 134818 - DNA, 481 bp, Homo sapiens
  misc_feature (1)...(481): n = a,t,c or g
nnnnnnnnnnnnnnnnnnnnnnnnnnnnnnnngcagacagcacgtactattttattgggcctcaaaagctttaaatacagaatgggctggccagagcgaagatgtgaacacactggcatttgagaatggacgtatcaaaaaaatcacataatcaacagttggacagagagctgggacgagggcagtctgggatagaggcaggtgccagctggcggccagcctgggtgttaggattactccctccactaggacatagtctttgatgtttcttcctgatttgaggactttttttttttaaaaaaagcccacaaacctccaaataaaaccaactggcagagactgtggatagcagtgcccatcatcccagaggacaagggtctgcatcatcagctcgaaagtctccatagcgccacaggttcagcctggcgctcttggctgactcttgggcattcaggtattctgggatcactttctggaactg

SEQ ID NO: 134819 - DNA, 1461 bp, Homo sapiens
atgggcaagatgtttgcaggtgaagagttagatgccggtgaaaaaggaaatcgggaaggtgatgacagaaagagctgtaataaaagggaacagagccccatgggcgacagctttatcgccatctacaacccaggatggattcggtggcagcactgtgcccaaggccagagatttctttcatctgcggctggctgggcccagggacttgtcaagcccaagttagcatatcgattgcaggcgacaggctggttaagtgtgaagctggtgctcacctgcgcaggagagcccggctgcaccctgcagtgttggccccaggtgtggctgctcattgctgggttccttctcatgttaaggagaatcccgtttgccccggtggaggtggaggtggagagcatggacaaggccggcaactttatcggctggctgcacatcgacggtgccaacctgtccgtcctgctggtggagcacgcgctctccaaggtccacttcaccgccgaacgcagctcctactacaagtccctgctgtctgccgaggaggccgcaaagcagaagaaagagaaggtctgggcccactatgaggagcagcccgtggaggaggtgatgccagtgctggaggagaaggagcgatctgctagctacaagcccgtgtttgtgactgagatcactgatgacctgcacttctacgtgcaggatgtggagaccggcacccagttggagaagctgatggagaacatgcgcaatgacattgccagtcacccccctgtagagggctcctatgccccccgcaggggagagttctgcattgccaaatttgtagatggagaatggtaccgtgcccgagtagagaaagtcgagtctcctgccaaaatacatgtcttctacattgactacggcaacagagaggtcctgccatccacccgcctgggtaccctatcacctgccttcaagcactcgggtgctgcccagctcaagccacggagtatgccttcgctttcatccaggtgccccaagatgatgatgcccgcacggacgccgtggacagccgtagtttcgggatattccagaacactcagtgcctgcttcaacgtgggaacacctggagttgccggcttgcccccatgtcaacctggcagttttgcagatttccaagggcgatgtgggggttggggttggtgaaggaagggctggtcatggtggaggtgcgcaagaagaaacatcaaagactatgtcctagtggagggagtaatcctaacacccaggctggccgccagctggcacctgcctctatcccagactgccctcgtcccagctctctgtccaactgttgattatgtgatttttctgatacgtccattctcaaatgccagtgtgttcacatcttcgctctggccagcccattctgtatttaaagcttttgaggcccaataaaatagtacgtgctgtctgcagcccttattgatc

SEQ ID NO: 134820 - DNA, 3566 bp, Homo sapiens
tttttttttttgtgatcaataagggctgcagacagcacgtactattttattgggcctccccaagctttaaatacagaatgggctggccagagcgaagatgtgaacacactggcattttgagaatggacgtatcagaaaaatcacataatcaacagttggacagagagcttgggacgagggcagtctcgggatagagcgcaggtgccagctgcgcgcgccagctgagcgtgttaggattactccctccactagggacataagtctttgatgtttcttccctgatttgaggactttttttttttaaaaaaaagccccacaaacctccaaataaaaccaactggcaggagacttgtggataggcagttgcccattcattcccagagggacaagggttttgcccccaggaaagcccttgggggtccccaccccggcaggccccggatgccacccccacgaggactttttcccacacattgaaggcaaagttgggacccaatctacaacccctctctggggttttgggagtttgaaaacaccctcccggcagagggaagaggggactggcgtgacggggggcttggggccaaaacccgatttccctccttaagcggctgtagcaaaattggtctggcatcatcagctcgaaagtctccatagccgccccaggttcagccctggcgctccttggctgactctttgggcatttcagggtattcctggatcacttttttggaactgggtctcctttgcgcacctccaccatgaccagccccttccttaaccaaggcccagcccccacattggcctttggaatctgcaaactgcagggggacatggggggcagccggcactcaggtgttccacgttgagcaggcactgagtgttctggatatcccgaactacgctgtccacggcgtccgtgcgggcatcatcatcttggggcacctggatgaaggcgaaggcaatactccgtggcttgagctggcagcacccgagtgctgaaggcaggtgatagggtacccaggcgggtggatggcaggacctctctgttgccgtagtcaatgtagaagacatgtattttggcaggagactcgactttctctactcgggcacggtaccattctccatctacaaatttggcaatgcagaactctcccctgcggggggcataggagccctctacaggggggtgactggcaatgtcattgcgcatgttctccatcagcttctggaactgggtgccggtctccacatcctgcacgtagaagtgcaggtcatcagtgatctcggtcacaaacacgggcttgtagctagcagatcgctccttctcctccagcactggcatcacctcctccacgggctgctcctcatagtgggcccagaccttctctttcttctgctttgcggcctcctcggcagacagcagggacttgtagtaggagctgcgttcggcggtgaagtggaccttggagagcgcgtgctccaccagcaggacggacaggttggcaccgtcgatgtgcagccagccgataaagttgccggccttgtccatgctctccacctccacctccacctctcgctgcagcaccagttccttggtgaaaagtgtagcttcctcgctgaagggctctccttcctgcaccaagccctgggaggtttcgggctcctctggggcattcaatgcctgcaagcaaagaggtgataagggcagtttcctttggcaaatagagtttgagacgagaaccactggaagacgtattcacccacagcttcagaacgacctgcccgctgaagaaaaggcaggaactgctttgctttttgggtatccccagatatatctgcaacacggtggataggcacttccttcttgttatgcaaatcctatcacattattaatagctttggcctctgcagcaagcagttcatcgtagtgtgatgatctctggtcatcatcctgccggtatctgatcactgtgggtagaactttggttacaaaaaccttaaccaatgtttaatccctcccaatggtgaacagtggcacaggtacgcctctgaaaaaggcaggcactgtctctgtggctgggctggctggtcctaatgtagtccaccgtcacattgaccttcttcccaataagcttttttcgaagaaattcccgggcctcaaacatgtaaggaatgtcatacaggggacgcagtttcttgttcttatcctgggtgttctaaacccaaaagcctcggtggacggatgctggacaggtgaatcgtgttgtggtcgcctgagttcagcttcacaacaatggcatcagcattcagaacctgcatcaccttggcaacaaactgcttgtccttttggtccaaattagctgtgggagccacatagtctctccatattctcagcctgcgctctttggcaaacctctctgccgccctcagcttttctgcgccccgggtgtaaactgcaatcgaccagtccacacagcgtgcgaaaccttccttcaggaggagctctgtgatgttgccatttggatgaaggatggtacccagaatgttctggttgtggcagctctccagaatgatctgaacatctctctgaagcagtcgcgactcagtgaaaaatttggcttctgcagcaaaaggctctgaagtttcactgccatctgcttcccgtagaaaagttgggcacttgatgcctgacagcatgactgtaaccaggtagtaatctgggaggaagcagggccctgaccacactgccgtcccgcacatgctcgatgatagcattaacaggcttctggtggtgtgagtccacaaagtgccttgggttttcaatggtatacttgagatcccggatagtatgtgaaccgttcccctcactccacatccctttcttggctgcctttgcttgttcttcacattctgaaagccggttctgctcaggattattagctctcatgccttctctccgggtggctaagccctctgcaaccagtgattctgcaatgttttccccattggtatcttttccaaggtagatcatgccatactctcgcccctggggagtcttgttttctatcgtgaaacagacttccttcccaatcagcttctttcgaaggaactctcgagctggaaatgcccagggctcatcaggggtatcctttgcatcaggttgtgtggcggctgcccggcgagcaagatttccagcacgaatgttgctgaggttgatctaccgctcaggaggaggcccaccacgaggctgacctcggacaatgatggcgcaccctgagaggaccatcttgatgatgccccgctgcacggtggggaccgcgggtcccccggaggagccgccgctctgcgcggaggacgccatgtgtggagatgcaaaggcaacgagtggagcggctggccggactggaggtgtcaatgtgggtgtcggtgttggtgaaagggagtcgaggcgaggggcaggctggctaccagctgcggacggtggacgggacggactcgccgggcgctcacaggagcagcagcgggacacggagcgaaagagacgcgatctccgccgcacgaaa

SEQ ID NO: 134821 - DNA, 403 bp, Homo sapiens
caatatccgccatcttcctccttttagttattaacacaatataatagccttataagaacctgacaaaaccctgtcatcaattatgaccaaatcttttggttctgttctatcaatcttcaagacacgatatttcgtttctgcattattgctcccaactagaaagtatctagctctagtctcatgcagaaccagcttctggaccgagctgatgatgggggcggcggccgtgggcatggcggcggcaaatgggggccccacaacagggcacgagcctccggaccgccccaggagactcggcgagaaaacccctcagcccctggacatcaagtccagccaggaaaaacaaacattaggcactaaacctatagatgatcaggacgaaatcgtcgacccgggaattcag

SEQ ID NO: 134822 - DNA, 621 bp, Homo sapiens
atggctgagggggcgggggaggccctgctggtgactgtgcatgcagtcatcatggtgatcctgttagcacaggggcagggcactggtagggggatgagtgtccctggctgtgctccactacaaacgctcccataccaaaccctctgggctctgcataagccagcgtgttgcccctaccacttctctgagcagctcttcctgccaactcgagtgtctgtgatggtcagggagtctccttctgtcaggattccagaggccttggcgagaagatactttctagttgggagcaataatgcagaaacgaaatatcgtgtcttgaagattgatagaacagaaccaaaagatttggtcataattgatgacaggcatgtctatactcaacaagaagtaagggaacttcttggccgcttggatcttggaaatagaacaaagatgggacagaaaggatcctcgggcttatttcgagcggtttcagcttttggtgttgtggtaaaggttttggatggaaagcccagagctgtcagcagttgtgtttcctaccacatgatccagagaagtggaggagcttggtctatggagagagagaagaatggagtagatgttcagagacatcttgactag

SEQ ID NO: 134823 - DNA, 633 bp, Homo sapiens
atgggggcggcggccgtgggcatggcggcggcaaatgggggccccacaacagggcacgagccttcggaccgccccaggagactcggcgagaaaacccctcaggccctggacatcaagtccagccaggaacaacacccattaggcactaaacctatagatgatcaggcaagccccgcccctcacgtcgggagcggggctggaggacgtatcatagagaggtcgggtagaggctcccgggacctgcgtgctgccgagagaggaagcgaagggcaccatctttggtccaaagtgactatttcgaattggaaaagaaatgacaaagaactacagccccgcctcccgaggccccgccccaccaagcagcaggtgcgtggcggccagaggtctccccggcaaccgcccgacagccccgcggagtccctggaggcagttgcttccctgaggagggtccggctgcggccaggtaaggagccttccggcggcccgctgggtcgtggtccgccctggaggcatcttggtatctgttgcacggaaccccgcctcctgcggggacccccagaccagcttcttttcttgcaaaacggtctctttgtaaatccactttttaaaaccacgtctcctttcaacgactga

SEQ ID NO: 134824 - DNA, 3605 bp, Homo sapiens
  misc_feature (1)...(3605): n = a,t,c or g
tcagtcgttgaaaggagacgtggttttaaaaagtggatttacaaagagaccgttttgcaagaaaagaagctggtctgggggtccccgcaggaggcggggttccgtgcaacagataccaagatgcctccagggcggaccacgacccagcgggccgccggaaggctccttacctggccgcagccggaccctcctcagggaagcaactgcctccagggactccgcggggctgtcgggcggttgccggggagacctctggccgccacgcacctgctgcttggtggggcggggcctcgagaggcggggctgtagttctttgtcatttcttttccaattcgaaatagtcacttttgtacctaatttggcatttataattataatacactcattttcacaacaaagatggtgcccttcgcttcctctctcggcagcacgcaggtcccgggagcctctacccgacctctctatgatacgtcctccagccccgctcccgacgtgaggggcggggcttgcctgatcatctataggtttagtgcctaatgggtgttgttcctggctggacttgatgtccagggcctgaggggttttctcgccgagtctcctggggcggtccggaggctcgtgccctgttgtggggccccccatttgccgccgccatgcccacagtcagacgtccccatctatcagctcggtccagaagctggctctgtatgagactagagctagatactttctagttgggagcaataatgctgaaacgaaatatcgcgtctcgatgattgatagaacatatccaaaagattcggccataaatgatgacaggcatgtctatactcaacaagaagttagggaacttcttggccgcttggatcttggaaatagaacacatatgggacagaaaggatcctcgggcttatctcgagcggtttcagcctttgggtgttgtgggttgtgtcaggttcttacaaggctattatattgtgttaataactaaaaggaggaagatggcggatattggaggtcatgcaatctataaggtcgaagatacaaatatgatctatatacccaatgattctgtacgggttactcatcctgatgaagctaggtatctacgaatatttcaaaatgtggacctatctagcaatttttactttagttacagctatgatttgtcccactcacttcaatataatctcactgtcttgcgaatgcccctggagatgttaaagtcagaaatgacccagaatcgccaagagagctttgacatctttgaagatgaaggattaattacacaaggtggaagcggggtatttgggatctgtagtgagccttatatgaaatatgtatggaatggtgaacttctggatataattaaaagtactgtgcatcgtgactggcttttgtatattattcatgggttctgtgggcagtcaaagctgttgatctatggacgaccagtgtatgtcactctaatagctagaagatccagtaaatttgctggcacccgttttcttaaaagaggtgcaaactgtgagggtgatgttgcaaatgaagtggagactgaacaaatactctgcgatgcttctgtgatgtctttcactgcaggaagttattcttcatatgtacaagttagaggatctgtgcccttatactggtctcaggacatttcaactatgatgcctaaaccacctattacattggatcaggcagatccatttgcacatgtggctgcccttcactttgaccagatgttccagaggtttggctctcccatcatcatcttgaatttagtgaaggaacgagagaaaagaaagcatgaaagaattctgagtgaagaacttgttgctgctgtgacctatctcaaccaatttttgcctcctgagcacactattgtttatattccctgggacatggccaagtataccaaaagcaagctgtgtaatgttcttgatcgactaaatgtgattgcagaaagtgtggtgaagaaaacaggtttctttgtaaaccgccctgattcttactgtagcattttgcggccagatgaaaagtggaatgaactaggaggatgtgtgattcccactggtcgcctgcagactggcatccttcgaaccaactgtgtggactgtttagatcgcaccaacacagcacagtttatggtgggaaaatgtgctctggcctatcagctgtattcactgggactgattgacaaacctaatctacagtttgatacagatgcagttaggttatttgaggaactctatgaagatcatggtgataccctatcccttcagtatggtggttctcaacttgttcatcgtgtgaaaacctacagaaagatagcaccatggacccagcactccaaagacatcatgcaaaccctgtctagatattacagcaatgctttttcagatgccgatagacaagattccattaatctcttcctgggagttttccatcccactgaagggaaacctcatctctgggagctcccaacagatttttatttgcatcacaaaaataccatgagacttttgccaacaagaagaagttatacttactggtggacaccagaggtgataaagcatttaccattgccctatgatgaagttatctgtgctgtgaacttaaagaagttgatagttgaagaaattccacaaatatggagaagagatttatatccacaatgagttctttcggccatatgagttgagcagctttgatgataccttttgcttggctatgacaagctcagcacgtgactttatgcctaagaccgttggaattgatccaagtccatttactgtgcgtaaaccagatgaaactgggaaaatcagtattgggaaacaaaagcaatagagaagaagctgtattacagcggcanaacggcagccagcgccccgccgccccccagcgaggaggctgtgtccagcagctctgaggatgactctgggactgatcgggaagaagagggctctgtgtctcagcgctccactcccgtgagagatgactgatgcaggagacagtgccaaagtgaccgagaatgtggtccaacccatgaaggagctatatggaacttaacctctcaagatggccttctcagaagaagatttctccattttattcaaagattttgttcaagcttggggcaagagtcaacattaaaacaagaccaagaattagcccagccagcccctgttcctagggtgcctcaagatgggaggttataaaaactaacacccccatctcgggctttctcgcaaagataacatcctatgaaagttcagccccccaagagtagacagaaaatcttacagagatcttcccaagccccacatcccaggccagcccaaggtatcatgcagcccctaggaaaagaggactcctccatgtaccgagagtacatcaggaaccgctacctgtgaaaagagcgcaggtccacctggtggacacgtctgattagcttagaacctgtcttgtctcatcttcaaaaggtaacttattaaaagtcctttgcgtctgaagcctttctccttttctgtcatttgcaaattccaaattatagctaagtaaagatgactagataaaaaaaaaaaaaaagggcggccgct

SEQ ID NO: 134825 - DNA, 403 bp, Homo sapiens; identical to SEQ ID NO: 131456

SEQ ID NO: 134826 - DNA, 408 bp, Homo sapiens; identical to SEQ ID NO: 110173

SEQ ID NO: 134827 - DNA, 398 bp, Homo sapiens; identical to SEQ ID NO: 131458

SEQ ID NO: 134828 - DNA, 621 bp, Homo sapiens
atggctctggcccgaggcagccggcagctgggggccctggtgtggggcgcctgcctgtgcgtgctggcgcggcacccattcggctttggccaggtgcccgacaactggcgcgaggtggccgtcggggacagcacgggcatggcccgggcccgcacctccgtctcccagcaacggcacgggggctccgcctcctcggtcgcggcttcggccttcgccagcacctaccgccagcagccctcctacccgcagcagttcccctacccgcaggcgcccttcgtcagccagtacgagaactacgaccccgcgtcgcggacctacgaccagggtttcgtgtactaccggcccgcgggcggcggcgtgggcgcggggggcggcctaaaagaatatcagcaaaggaagagccctggtattccagcaggagcaaagacaaaaaagaaaaaaactgacagtagccttgagacaaccacttccggtggttgccactcacctggggatattcaggacattctgaaggtgcgggtgtccaaccttaaccactccaatggggtagtgctcccccattggacaagtggaaggtcgttatttcccatttacgcaggttttacagacagaataagctga

SEQ ID NO: 134829 - DNA, 531 bp, Homo sapiens
  misc_feature (1)...(531): n = a,t,c or g
atggaagccatcacaaacggcatgatgaacctgaatcgccagcggcatcagcgccttgtcgccttgcgtataatatttgcccatggagatggaggacaacatctggacagtgaggaggaggaggcgcctcggcccacgccaaacatcccagaggacctggagagccgggaggccacgccgcaaacactcggacttgaaagccctgctaggtggactcttaaagcacccccctgggnagtgacggacagaacggtcaggacctggattggggaggcgggtgccgccgctgatgctgacggtgtgacgttctctgttccggtcacaccacatacgttccgccattcctatgcgatgcacatgctgtatgccggtataccgctgaaagttctgcaaagcctgatgggacataagtccatcagttcaacggaagtgtacacgaaggtttttgcgctggatgtggctgcccggcaccgggtgcagtttgcgatgccggagtctgatgcggttgcgatgctgaaacaattatcctga

SEQ ID NO: 134830 - DNA, 423 bp, Homo sapiens
atgggctgctggagcgggaatgagggggcgccagtggctccggaaacgggtgcaggttgtctgccctggcctctccgcaaacaatttaaatttacccaccacccaaatgcttctgcagaaaaagccagaaatgtcctagctgtggagactgtgcctggagagctggtgggagaacaagctgcaaatcagcccgccccagggcatccaaattccattaatttttactctttgaaacagtggggcaatgagctcaaggtgtcttcagatgagtcagcatgtgggctgttttactccccgctcagctcctccatgtggcctgggtcacaaatgattgtgatgattagccagtaccaagaactagcagtagccctggagtcaagctccgtgacaatcaatcaactcaatgaaaacatagaatcattg

SEQ ID NO: 134831 - DNA, 720 bp, Homo sapiens
gtcaaccctgtcaatgacccaccccacatcatctttccacatggcagcctcatggtgatcctggaacacttgcagaagccactggggcccgaggttttccaggcctatgacccggactctgcctgtgagggcctcgccttccagctccttggcaccccgtctggcctccccgtggagtgccgagaccagcctggagagccggcaaccgagttctcctgccgggagttggaggccggcagcctagtctatgtccaccgcggtggccctgcacaggacttgacgttctgggtcagcgatggactgcaggccagccccccggcgacgctgaaggtgatggccatccagccggccatacagatccaccgcagcacagggctgcacctggcccaaggctctgccatgcccatcttgcccgccaacctgttggtggagaccaatgccgtggggcaggatgtgacagagtcactaaaacaagtccagctagagcaggacgaatatgctaaacacataaaaggagagagggcccggtggcaggagaggatgtggaaaatgtcggtggaggctcgaacattaaaggaagagaagaagcgtgacatacatcggatacaggagctgaagaggagcttgtccgaactcaaaaaccagatggcggttatcaatcacaagaaacgtaaaagtggggcgcgaatcgtccagtcaaacgacctcactgaggcggac

SEQ ID NO: 134832 - DNA, 461 bp, Homo sapiens
ttttttttttttcctttatacttctgtttatttttcctgcttatgaaaacagccaacaattgcctttcaagggaagggaaggtaatgctgggaaaggtcctcaggagccctgagccaagttctcaagagagaagtgaggcagctggggatctgggaggccagagtccgggccagggcatcagcatcctagaaccagggctgcctcccgaagagcagttcagagggcgtgactccatacgggcagggcggctccacacaggcctggaacacccttctcctcagcccagggagctcatcagggtctgggcctgcttcagtttgcgtaggctgcagacccgcaagtgcttctgcaaggggctttgcttctcctcataacagcggcacaggctggccgcgtgctctttgggcagccccagctgctgcagttcactggacaaggattcgccatcgacactgtgctt

SEQ ID NO: 134833 - DNA, 1629 bp, Homo sapiens
atgtttgcaaactctggagtaaacaagagtgggaagctgataaggtggctggcctaccagccagcgcggccggaggtacagaccatgtacagaccacggcgaggggtgttaggggcttctcgggataaaggcagcgagtggctgcgcattccctccccgactctttcagaggtcactcggcgatttacttccttcccccgcttcctcacagtcctccacagccctacgacttccgcttgcctcgtcgtctgggaaaccgccgacttccggccgcgcagcggagatggaggacaacatctggacagtgaggaggaggaggcgcctcggcccacgccaaacatcccagaggacctggagagccgggaggccacgagccagtaccaagaactagcagtagccctggagtcaagctcagtgacaatcagtcaactcaatgaaaacatagaatcattgaaggaaatacctgaaggcaatttgggaattgccatcaaaagaggagcgactcaagccttcgcgaaagaaaataaccaaaaagcatacaaagaaacgtacggcgtctctcatattacacgccatgatatgctgcagatccctaaacagcagcaaaacgaaaaataccaagtgcctcaattcgatcaatcaacgattaaaaatattgagtctgcaaaaggacttgatgtgtgggacagctggccggtggaatcctatccatcttcttcaccgatatggtttgtggattctgaagacccaaatctgacatcagttctggaacgtctagaagatactaagaacaacaatttgattcagccaaaagtaataccttcccttttaagattaggctccaaaagagattatgaagttgcctttgcccatccttctcctgctctttccaatgctccctatgaggaaccccagtttgccatgatgatcacagctgccaccaacaacttcgctgcatgggattttcctgatttcggaaccaccatcaaacaggatttttgcttgctggggcaaaccagcgtggaccgcttgctgcaactctctcagggccaggcggtgaagggcaatcagctgttgcccgtctcactggtgaaaagaaaaaccaccctggcgcccaatacgcaaaccgcctctccccgcgcgttggcccgattcattaatgcagctggcacgacaggtttcccgactggaaagcgggcagtgagcgcaacgcaattaatggattttgccgatttcggaaccaccatcaaacaggattttcgcctgctggggcaaaccagcgtggaccgcttgctgcaactctctcagggccaggcggtgaagggcaatcagctgttgcccgtctcactggtgaaaagaaaaaccaccctggcgcccaatacgcaaaccgcctctcccccgcgcgttggccgattcattaatgcagctggcacgacaggtttcccgactggaaagcgggcagtgagcgcaacgcaattaatgggcactgcccgggatccccagattgaaacttctcacttcttcaccctccagtcctcgagctgcagagaagcggtcctccagtggcggttacagcagaccataaaggagcaggcactgctgaacgcacacgtgacacagacacagtaa

SEQ ID NO: 134834 - DNA, 1713 bp, Homo sapiens
atggcgctgtggcgcggctccgcgtacgcgggcttcctggcgctggccctgacctggcgggaccggaaaaagaaattcccgggcgatgatgaggcaccaggggtgaagcgcacatgggctgctggagcgggaatgagggggcgccagtggctccggaaacgggttgaggttgtctgcactggccgctccgcaaacacagtgtgtgcgggcgtcagggcagcaggtctggtagagaaaagtccaccgccatccctctcccgagtggggcggaggtttcggttctgtggtgatctggactgtcctgaccgggtcctggcagagatcagcacgctggccaagatggttgagtgcacagggtctacactgggtggaggagggtataagaagatcctgaaactcacagctgatgccaagtttgtggaggagcatgagggaaagaaagacattgacagtcccaccttcctgtcctctgccagctcctggtggagcagtagcagtgcctatggctccaggaggcctgggggctttgagctgaagttaatagggcaacagggagagtcaggcgatgtgaaggccacagtggcagtgctgagtttcatcctctccggtgcggccaagcacagtgtcgatggcaaatccttggccagtgaactgcagcagctggggctgcccaaagagcacgcggccagcccgtgctgctgttatgaggagaagcaaagccccttgcagaagcacttgcgggtctgcagcctacgcacgtggtccctggcagcacgagtggcagaagggacagcagagactgtggacccctcagctgcacctaagacctctgtgtggtctagccgtgtgtgctgggggaggcttttggccaccatttccccctctgtaaatgagaccgatacctgtggcatggaggacaggaggctggtggtgtgcaggccctggcgtgcacagtgccacatgaaggcctggggctggcgccaccctgaagaaggtggcacccactctggcgccccctctgctgtcctgcaggctctggcggtggccatccagcttggtggccatctggctgatccactcctccaggtggaccctctgtcctcatgtggtgcagtaagtttggacattctgatctacttggtgttttattatagaactgctagtgtgcccgagacttacattgtgaagacactttttaaaaaacttgagagccaaagcctaatccagagcaatgtcctaactcgctccaattctatgaaggctgagagaggtgaggaagctgcaaaagaaaagtcagaagctagcagaggttggttcatgaggtttaaggaaagaagctgtctccacaacataaaaatgcaaggtgaggcagcaagtgctgatgtagaagctgcagcaagttatccaaaagatctagctaagatcactgatgaacatggctacactaaacaacaggttcgatgtatacaaaacagccttctgttggagggtaatgctgaagaagtacgtaaaattattgtttgttctatgtcccctcccttaaaaccaggtggacctgtgactctggtagaagagttcctatgtgcttctaaggcttccgtgtcagcagtttctggctggattagcaagtggaggaactggcaggagattagaaggcaagaggaaagagaagacagggcttccctccccgaccttcaggcctcagagtcgtag

SEQ ID NO: 134835 - DNA, 5154 bp, Homo sapiens
atggagcggttagagacaatcaacatcctcacattggaaaaggcagacttgaagaccaccctttaccatactaaacgtgctgcccgacacttcgaagaagagtccaaggatctggctggccgcctgcaatactccttacagcgtattcaagaattggagcgggctctctgtgctgtgtctacacagcagcaggaagaggacagggggcactgcctgagctccccagatcaaaacttctcactcttcaccatccagtcctcgagctgcagagaagcggtcctccaccggcggttacagcagaccataaaggagcgggcgctgctgaacgcacacgtgacacaggtgacagagtcactaaaacaagtccagctagagcgagacgaatatgctaaacacataaaaggagagagggcccggtggcaggagaggatgtggaaaatgtcggtggaggctcgaacattgaaggaagagaagaagcgtgacatacatcggatacaggagctggagaggagcttgtccgaactcaaaaaccagatgggtaagatggggctgctacaagatgaggccaaacacctgaggcaggaggtggaaggtctggagggaaagctccaatcccaggtggaaaacaatcaggccttgagtctccttagcaaggaacaaaagcagagactccaggagcaggaggagatgctccgagagcaggaggtgcagagagtgcgggagcaggagagactgtgtgaacaaaacgagaggcttcgggagcagcagaagacgctacaggagcagggtgagaggctgcgaaagcaggagcagaggctacgcaaacaggaggagaggctgcgaaaggaggaggagaggctgcaaaagcaggaaaagaggctgtgggaccaggaggagaggctgtggaagaaggaggagaggctacaaaagcaggaggagaggctcgcgctctcccagaaccacaagctcgacaagcagctggccgagccacagtgcagcttcgaggatctgaacaacgagaaaaagagcgcactgcagttggagcagcaagtaaaggagctgcaggagaagctagacgaggtgaaggagatgcagtacgtggccacctatcagcagctgacctctgagaaggaggcgctgcacaggcagttactgctgcagacccagctcgtggaccagctgcagcagcaggaagcttggggcaaagcggagcacctagaagctgccagccagcagaaccaacagctagagacccagctaagcctcgtggctctcccgggagaagacccccttatgctcttggtttcccaccttctgattgctctggcccctcaccccttccgggagccagtggtcagacactttgtcacctgtgaccaacagctcggcatttaccagaaggcatttgaacatcttggcaatgcactgacttatgaccctaccaactacaaggccatcagctgcctgaaacgagccaactacttggcaccctttgattggaagattctgtataatttgggccttgtccatttgaccatgcagcagtatgcatcagcttttcattttctcagtgcggccatcaacttccagccaaagatgggggagctctacatgctcttggcaggtctgcttagcacgtgtaaccctttagtaaacctgaactatgctgtgctgctgtacaaccagggcgagaagaagaacgccctggcccaatatcaggagatggagaagaaagtcagcctactcaaggacaatagctctctggaatttgactctgaggtatgtcttttattagctcccaagagtcataaccagagcaatcagacaagagaaagaaagggcatccagatcagtaaagaagaagtaaaactgtcgctgtttgctgatgacatgatcgtatacctagaaaaccttaaagactcatccaaaaagctcctagaactggttcttctttgcggtccagttggtccaaagctacatgagcttcttgatgacaatgtctttgttccaccagagtcattgcaggaagtggatgagttccacctcattttagagtatcaagcaggggaggagtggggccagttaaaagctccccatgccaaccgattcatcttctctcacgacctctccaacggggccatgaatatgctggaggtgtttgtgtctagcctggaggagtttcagccagacctggtggtcctctctggattgcacatgatggagggacaaagcaaggagctccagaggaagagactcttggaggttgtaacctccatttctgacatccccactggtattccagttcacctagagctggccagtatgactaacagggagctcatgagcagcattgtccatcagttatttgatattggctgtggacccacaaagtcacacaaggctaaaggtcagaaccagttaaatatgtttccaagggtggacagcacggaagaggcagtacatcttaacaaaatcagggttctggatgaagggaggggtggtgaatggttgctgcaatcaacagttcatacttcaatggaaagaaggtgggatttgattcctggctgcaaatcttcactctgtcacctgctatctgtgtgccctcagaaaagctccaatattcacttagatactgcagaaggaaaagagaggctgaaagggttggatcaaggaagtaggaaagggaatttctggggcatttccttcccccaatcccagaatagccacagaaatcacagtcaccaagagctgctgcttctgaataacatgacagtgatggaacaaatccagcagaaagagtatccctctcccattgctgctcaaaccaagtaccaggattacctttgcttggacctgattggcttgccttgggtcagtgtggccctggttacgcctcctctggctcagtcacacagcagccttgtaggtgactggaggtgttcgctgatgtggccccaaccctacctccctccccaccccatgatgttagaagaatctcgacagaataaattggcagcagccaagaaaaagctaaaagaatatcagcaaaggaagagccctggtattccagcaggagcaaagacaaaaaagaaaaaaactgacagtagccctgagacaaccacttccggtggtggccactcacctggggatagccagtaccaagaactagcagtagccctggagtcaagctcagtgacaatcagtcaactcaatgaaaacatagaatcattgaaacagcagaagaaacaagtggaacatcagctggaagaagcaaagaaaacaaacaatgaaatacacaaagcacaaatggagcggttagagacaatcaacatcctcacattggaaaaggcagacttgaagaccaccctttaccatactaaacgtgctgcccgacacttcgaagaagagtccaaggatctggctggccgcctgcaatactccttacagcgtattcaagaattggagcgggctctctgtgctgtgtctacacagcagcaggaagaggacagggggcactgcctgagctccccagatcaaaacttctcactcttcaccatccagtcctcgagctgcagagaagcggtcctccaccggcggttacagcagaccataaaggagcgggcgctgctgaacgcacacgtgacacaggtgacagagtcactaaaacaagtccagctagagcgagacgaatatgctaaacacataaaaggagagagggcccggtggcaggagaggatgtggaaaatgtcggtggaggctcgaacattgaaggaagagaagaagcgtgacatacatcggatacaggagctggagaggagcttgtccgaactcaaaaaccagatggtggaaaacaatcaggccttgagtctccttagcaaggaacaaaagcagagactccaggagcaggaggagatgctccgagagcaggaggtgcagagagtgcgggagcaggagagactgtgtgaacaaaacgagaggcttcgggagcagcagaagacgctacaggagcagggtgagaggctgcgaaagcaggagcagaggctacgcaaacaggaggagaggctgcgaaaggaggaggagaggctgcaaaagcaggaaaagaggctgtgggaccaggaggagaggctgtggaagaaggaggagaggctacaaaagcaggaggagaggctcgcgctctcccagaaccacaagctcgacaagcagctggccgagccacagtgcagcttcgaggatctgaacaacgagaaaaagagcgcactgcagttggagcagcaagtaaaggagctgcaggagaagctagacgaggtgaaggagatgcagtacgtggccacctatcagcagctgacctctgagaaggaggcgctgcacaggcagttactgctgcagacccagctcgtggaccagctgcagcagcaggaagcttggggcaaagcggagcacctagaagctgccagccagcagaaccaacagctagagacccagctaagcctcgtggctctcccgggagaaggagatggaggacaacatctggacagtgaggaggaggaggcgcctcggcccacgccaaacatcccagaggacctggagagccgggaggccacgagcagctttatggacctcccgaaggagaaggcggacgggacggagcaggtggagagacgagagcttggattcgtccagccttctggagtgacagacggcatgagagagtccttcaccgtatatgaaagccagggggcagtgccaaacacgcggcaccaggagatggaggatgtcatcaggctggcccagaaggaggaggagatgaaggtgaagctgctggagctgcaagagttggtgttgccccttgtgggcaaccatgaggggcatggcaaattcctcatcgctgcccagaaccctgctgatgagcccactccaggggccccagcccccccaggaacttggggctgccgccaaagcctaatccagagcaatgtcctaactcgctccaattctatgaaggctgagagaggtgaggaagctgcaaaagaaaagtcagaagctagcagagaaattgccacagccaccccaagcttcagccaccaccctgatcagccagcagccatcaacatcaaggcaaaacactctgccagcaaaaagattatgaccgtctga

SEQ ID NO: 134836 - DNA, 634 bp, Homo sapiens
gaaaaagaaattcccgggccctggcttcttggcgcgatgaggttccggttctgtggtgatctggactgtcccgactgggtcctggcagaaatcagcacgctggccaagatgtcctctgtgaagttgcggctgctctgcagccaggtactaaaggagctgctgggacaggggattgattatgagaagatcctgaagctcacggctgacgccaagtttgagtcaggcgatgtgaaggccacagtggcagagctgagtttcatcctctccagtgcggccaagcacagtgtccgatggcgaatccttgtcccagtgaaactgcagcagctggggctgcccaaagagcacgcggccagcctgtgccgctgttatgaggagaagcaaagccccttgcagaagcacttgcgggtctgcagcctacgcatgaataggttggcaggtgtgggctggcgggtggactacaccctgagctccagcctgctgcaatccgtggaagagcccatggtgcacctgcggctggaggtggcagctgccccagggaccccagcccagcctgttgccatgtccctctcagcagacaagttccaggtcctcctggcagaactgaagcaggcccagaccctgatgagctccctgg

SEQ ID NO: 134837 - DNA, 4061 bp, Homo sapiens
atgagaccaggcttcgtggtgtcagtgggaatggtggaaggtgtacctggagagcctgatccatacccagtgctctgctacaccccatggcctggccacgacctccctgcctccagagcagccctggcccagggaagaagctggtctctgcatcgaatgatagggcaggattctgggagacggaggagcagacgccagcatttcgcccccggcacctccagcgggctgcggtccgctcccggcctcactcgagcaggtcccgccccgccagaggccgttagtccaagtcacgtgatcgtcgactcagctgacctggcgggaccggaaaaagaaattcccgggccctggcttcctcgcgcgatgtatgaggcaccaggggtgaagcgggcatgggctgctggagcgggaatgagggggcgccagtggctccggaaacgggttgaggttgtctgcactggccgctccgcaaacacagtgtgtgcgggcgtcagggcagcaggtctggtagagaaaagtccaccgccatccctctcccgaatggggcggaggtttcggttctgtggtgatctggactgtcctgaccgggtcctggcagagatcagcacgctggccaagatggttgagtgcacagggtctacactgggtggaggagggtataagaagatcctgaaactcacagctgatgccaagtttgtggaggagcatgagggaaagaaagacattgacagtcccaccttcctgtcctctgccagctcctggtggagcagtagcagtgcctatggctccaggaggcctgggggctttgagctgaagttaatagggcaacagggagagtcaggcgatgtgaaggccacagtggcagtgctgagtttcatcctctccggtgcggccaagcacagtgtcgatggcaaatccttggccagtgaactgcagcagctggggctgcccaaaggagcccaagcccagcccccacctgctacctccagagcttctccattctacccccagagcacgcggccagcccgtgctgctgttatgaggagaagcaaagcccccttgcagaagcacttgcgggtctgcagcctacgcacgtggtccctggcagcacgagtggcagaagggacagcagagactgtggacccctcagctgcacctaagacctctgtgtggtctagccgtgtgtgctgggggaggcttttggccaccatttccccctctgtaaatgagaccgatacctgtggcatggaggacaggaggctgggtgtgcaggccctggcgtgcacagtgccacatgacggcctgggctggcgccaccctgaagaaggtggcacccactctggcgggtctcccttggagcacctggagcccaagaagctgtccctcacctttgcaatcccagggactcgccccctgatcatgatgaaggtggacccaaacccgctgaggggcctgaaggagcaaagtgagccaattctctcccctgacgcccgtaagggctccagtggtgatggagaagtacagaggaacctggtgccggccgcagtcaacccctatgtgatgatctttctacccgccctctttcgtgtcttggtgctggctgctgtctttggccagctaaaagaatatcagcaaaggaagagccctggtattccagcaggagcaaagacaaaaaagaaaaaaactgacagtagccctgagacaaccacttccggtggttgccactcacctggggatagccagtaccaagaactagcagtagccctggagtcaagctcagtgacaatcaatcagctcaatgaaaacatagaatcattgaaacagcagaagaaacaagtggaacatcagctggaagaagcaaagaaaacaaacaatgaaatacacaaagcacaaatggagcagttagagacaatcaacatcctcacattggaaaaggcagacttgaagaccaccctttaccatactaaacgtgctgcccgacacttcgaagaagagtccaaggatctggctggccgcctgcaatactccttacagcgtattcaagaattggagcgggctctctgtgctgtgtctacacagcagcaggaagaggacagggggcactgcctgagctccccagatcaaaacttctcactcttcaccatccagtcctcgagctgcagagaagcggtcctccagcggcggttacagcagaccataaaggagcgggcgctgctgaacgcacacgtgacacaggtgacagagtcactaaaacaagtccagctagagcgagacgaatatgctaaacacataaaaggagagagggcccggtggcaggagaggatgtggaaaatgtcggtggaggctcgaacattgaaggaagagaagaagcgtgacatacatcggatacaggagctggagaggagcttgtccgaactcaaaaaccagatggctgagcccccatccctggcacccccagcagtgacctctgtggtggaacagctacaagatgaggccaaacacctgaggcaggaggtggaaggtctggagggaaagctccagtcccaggtggaaaacaatcaggccttgagtctccttagcaaggaacaaaagcagagactccaggagcaggaggagatgctccgagagcaggaggcgcagagagtgcgggagcaggagagactgtgtgaacaaaacgagaggcttcgggagcagcagaagatgctacaggagcagggtgagaggctgcgaaagcaggagcagaggctacgcaaacaggaggagaggctgcgaaaggaggaggagaggctgcaaaagcaggaaaagaggctgtgggaccaggaggagaggctgtggaagaaggaggagaggctacaaaagcaggaggagaggctcgcgctctcccagaaccacaagctcgacaagcagctggccgagccacagtgcagcttcgaggatctgaacaacgagaaaaagagcgcactgcagttggagcagcaagtaaaggagctgcaggagaagctagacgaggtgaaggagatgcagtacatggccacctatcagcagctgacctctgagaaggaggcgctgcacaggcagttactgctgcagacccagttcgtggaccagctgcagcagcaggaagcttggggcaaagcggagcacctagaagctgccagccaccagaaccaacagctagagacccagctaagcctcgtggctctccctggagaaggagatggaggacaacatctggacagtgaggaggaggaggcgcctcggcccacgccaaacatcccagaggacctggagagccgggaggccacggagccagaggcagaggccccagccccagggactgggggtgagtttgtgtgtggggagagctaccgggccctgaaggaggccatggtgaagctgaaagggagagagtccttcaccgtatatgaaagccagggggcagtgccaaacacgcggcaccaggagatggaggatgtcatcaggctggcccagaaggaggaggagatgaaggtgaagctgctggagctgcaagagttggtgttgccccttgtgggcaaccatgaggggcatggcaaattcctcatcgctgcccagaaccctgctgatgagcccactccaggggccccagccccccaggaacttggggctgccggtgagcaggatgttttttatgaagtgagcctggacaacaacgtggagcctgcaccaggagcggccagggagggttctccccatgacaaccccactgtacagcagatcgtgcagctgtctcctgtcatgcaggacacctaggagcacccaggcttgcccagcaaaccctgcgtgccattcttctaccaggcagccgagaacagggagataaacatcatcatcttctaagagctggtcaagaaatttaaaacaacaacaacaacaaaaagttacggggttcatctcctacacaattcatttactccatttgaatgctagagccactcacatttatttgtgtttctaatttaccgtttaaatttatttgtaaaaagttaagggagagttggtctttccctgatgttctttctggc

SEQ ID NO: 134838 - DNA, 412 bp, Homo sapiens
  misc_feature (1)...(412): n = a,t,c or g
caatcttatagagagtggtgttcacggagcacttctggccttagatgaaaccttcgacttcagtgcactggcactgctgttacagatcccgacgcagaacacacaggctcgtgctgtcttggaaagagaatttaacaaccttttggtcatggggactgatagaaggtttgatgaagatgatgataaaagctttaggagagcaccttcatggagaaaaaagtttagaccaaaggacattcgtggcttagctgctgggtcagcagagactctccctgcaaacttccgggtgacttcttctatgtcttccccctctatgcagccaaagaagatgcagatggacgtttacccacactacttctacagatgattatgcagcatttgaatccaaaatgtagntaatacttggtatatg

SEQ ID NO: 134839 - DNA, 234 bp, Homo sapiens
ctctagccagaccacaaccgttggcccgtcccattgggcaaaaggtaaaccttgtctccgggcttcctccagcaattcatgcttccttatgtccctgatgtcctcgtggctgacggtgtgcagcgcccctttgtgcagccggtctaaccgaagggctctcggggaggaaggcggggaggtttcacactttatggttgtcttgtcatctcgtacctcttctctggaaggtggcaa

SEQ ID NO: 134840 - DNA, 469 bp, Homo sapiens
cggcccggaattctcgggtcgagatcagcagtcattttaaaggacatgtaactttacatctctgacctttattttttaaatgaatcttgttttttgttccttaatttaccaggatgatgataaaagctttaggagagcaccttcatggagaaaaaagtttagaccaaaggacattcgtggcttagctgctgggtcagcagagactctccctgcaaacttccgggtgacttcttctatgtcttccccctctatgcagccaaagaagatgcagatggacggtatgtgatgggtcacactaacctgtcacttgttgggagcatgagcagctttctgtctggaacattaataatgatctaaaacggcctatttaatatgttacaaggcacttgagtatggttgcatgtccaaatataaatgtttttaaattaactctaacatttgtttataaaagtttaaccataataataga

SEQ ID NO: 134841 - DNA, 1632 bp, Homo sapiens
atgaaccacgagtggatcggcaacgagtggctccccagcctgggcctcccccagtaccgcagctacttcatggagtgccttgtagacgccaggatgctggaccacttgaccaagaaagaccttcgagggcagctgaaaatggtcgacagttttcacagaaacagtttccagtgtggaattatgtgcctgagaaggttaaattatgaccggaaagaactggaaagaaaaagagaagaaagtcagagtgaaataaaagatttgggccccacctctggacagcacgaaccagacatgaaagcgtgtgcacctcagctactgagacagcccacccacttcctgggcaccgtcggcccccgccctcgtggtcccaaggtacggccactcacgttcatgtctgagcccgccgggaagcaccggctgctgggccgctgcttgatggtcgccaccctcggttccacagccatgttctcagcagcgcgggagggcttggaggccgggactatctcctcgggtttatctgcaatagaaccaggcctgggaaggcagaaaagcctggcccagcagggtgcttacaagagtgggggccctgtccctgtgctggtctgtacaactagctgccccagtgctcctgggacgctcctgaatgggagcgcagcccagaggcagctgtctctaggtggcagcagggagggggaagccccagaaggtgaagtttacagctgcttcacacgccaccttcgaacaaagaaaagcaccctgatcgtaaacaacagccaagacgtcatgcccctcaccagccacactgtgctgtacgcatatcctcctgctatagattcttcaaaaactaaacatctggtatacccacaaacagaaaacttaaagcctgtgtgctgcttggtggattttcacaaatccaacatccctgcccaggatgtgccagttttggtcacctacgagacggctgcagaggtcctccaggcagggctgcgaggagcccagggaggactcagtggggccagggcagtccccgtgccagctgctctgcagtctctgctgtgggaccggctcattcccatgtactcagacccacccggtttcagcacattgctggtgttggcggtgaccgctgagcttaatgcgtcaacctttgaggatgtcacccaggtgtcctctgcctaccagaagacagtacctgtcgaagctgacgtgcttgtttggagcaatgatcgagtgattcgctggatcctgtcaattggccttaaagaatatgcaaacaatcttatagagagtggtgttcacggagcacttctggccttagatgaaaccttcgacttcagtgcactggcactgctgttacagatcccgacgcagaacacacagcgggcaccgaccacagccctcaccctgcgctccaagtccatgacctcggagctggaggagctcgcccaggcctcggaggcctgtgtgagctgctccccacgtggctcagaccagaaggctccatcctccggggatctgtgtgtagatagcgtgggcttggcagagcagtctggtctgcacagcaggcttagggaacgcccggcacctttgtgtaaggtctgcaagcaacagagagaggctctggccctctga

SEQ ID NO: 134842 - DNA, 762 bp, Homo sapiens
atggcccaaaaggaagatatggaagagagaatcactactcttgaaaaacgctacctcgctgcacagcgtgaagccacatctgtgcatgacctcaatgataaacttgaaaatgaaattgcaaataaagattctatgcatcgacagactgaagataaaaaccgccagttacaggagcgcttggaattggcagagcaaaagctgcaacagacactgaggaaggcagagacgctcccggaggtggaggcggagctggcccagagggtggcagcgctttccaaggctgaagagagacacggcaacattgaagaaaggttacgacagatggaagcacagttggaggagaagaatcaagaactgcagcgggcaaggcaaagagaaaaaatgaacgaagaacataataaacgtttatcagacactgttgacaagctgctttcagaatctaatgagaggcttcaacttcatcttaaagagagaatggctgctttggaagataaggatcagcttgtcctaaacattgaagcactgagggctgaactagaccacatgagactaagaggtgcttcacttcatcatgggtatggtattaaccaccgaccccacttgggcagtgtcccagatttcaggttccccatggcagacggccacacagactcctacagcaccagtgcagtgctgcggcgcccacagaaaggccggctggcagccctgcgagatgagccttccaaggcaaggtctttgtgtgaaatacctctgcttacgtga

SEQ ID NO: 134843 - DNA, 4361 bp, Homo sapiens
  misc_feature (1)...(4361): n = a,t,c or g
gaattccgggcccccggccgtccctcttaaggctcttcctccgctccgccagtgtccggccgcgggccggccttagtgactggggcggcgggccccggggccgcggcgtggggcgggcaggcggacgccggccgcgggctgctttcgtcggctcccaagctctcccggagcgagcagccgcccgcgagccgccgcggagcctcctcgcccgctcccgccggcgagcaagatgatgtgcgaggtgatgccgaccatcagcgaagcagaaggcccccctggaggaggtggaggccatggttccggctccccttcacagccagatgcagattcacattttgaacagttgatggtctccatgctagaagaaagggaccgccttcttgatacactgagagagactcaagaaacgctggccttaacccaggggaagttacacgaggttggtcatgaaagagattccttgcagagacagctcaacacggcacttccacaggagttcgcagcacttactaaagaactcaatgtatgcagggaacagctccttgaaagggaagaagaaattgctgaactgaaagcagaaaggaataacaccaggctgctgttagagcatttggaatgccttgtctccaggcatgagcggtctcttaggatgaccgtggtgaagagacaagcgcagtctccagcaggcgtgtccagcgaagtggaagtgctgaaagcactgaagtccttatttgaacaccacaaagctctggatgaaaaggtgagagagcgattacgagtagcacttgaaagatgtagtttgttagaagaggaattaggtgccacacacaaagagctaatgattcttaaagaacagaataatcagaaaaaaactctaacagatggagtgctggacataaaccatgaacaagaaaatacaccaagcacgagtggaaagagatcttctgatggttctttaagccacgaggaagaccttgctaaagtaattgagctccaagaaatcataagtaagcagtcaagggaacagagccaaatgaaagaacgcctggcttccctttccagtcatgtgacagaactggaagaggatctggacacggctagaaaagatctcatcaaatctgaagaaatgaacacaaaattgcaacgagatgtccgtgaagccatggcccaaaaggaagatatggaagagagaatcactactcttgaaaaacgctacctcgctgcacagcgtgaagccacatctgtgcatgacctcaatgataaacttgaaaatgaaattgcaaataaagattctatgcatcgacagactgaagataaaaaccgccagttacaggagcgcttggaattggcagagcaaaagctgcaacagacactgaggaaggcagagacgctcccggaggtggaggcggagctggcccagagggtggcagcgctttccaaggctgaagagagacacggcaacattgaagaaaggttacgacagatggaagcacagttggaggagaagaatcaagaactgcagcgggcaaggcaaagagaaaaaatgaacgaagaacataataaacgtttatcagacactgttgacaagctgctttcagaatctaatgagaggcttcaacttcatcttaaagagagaatggctgctttggaagataagaactctcttttaagagaagttgaaagtgcaaaaaagcagttagaagaaacaccaccacgataggattcgctttgtccttaaacattggagcacttgagggctgaactagaaccacaatgagactaagaggtgcttcacttcaatcatggccgaccccacttgggcagtgtcccagatttcaggttccccatggcagatggccacacagactcctacagcaccagtgcagtgctgcggcgcccacagaaagggccggctggcagccctgcgagatgagccttccaaggtacaaactcttaatgagcaggattgggaacgtgcccagcaagctagtgtcttggcaaatgtagcacaagcattcgagagtgatgctgacgtgtctgatggtgaagatgacagggacactctcctcagctcagttgacctcgtatccgccagcgggcaggccgacgcgcacacactagccatgatgcttcaggagcagctggacgccatcaacaaagagatcaggttgattcaggaagaaaaagaaaatacagagcagcgggcagaggagattgaaagtcgagttggcagtggaagtctagacaatcttggtcgttttagatcaatgagctccattcccccctaccctgcttcctcgcttgctagctcctcccctccgggcagtgggcgctccaccccacgaaggatccctcacagcccagctcgggaagtggacagactgggcgtcatgacccttttgccaccttccagagaagaggtacgagatgacaagacaaccataaagtgtgaaacctccccgccttcctccccgagagcccttcggttagaccggctgcacaaaggggcgctgcacaccgtcagccacgaagaccatcggggatgataaggacctccaacaggtcccaggattgttcccgtgtggcaaccccaacgagtagcaacagtagcaagaattcgctccacgaagcccgcaaagaaggaaggcacttaggtcttcaattgcccgctcttttggcagagaaagaaagaggaccgacctgaccaaaccggcaaaggaagcaataggacaacgctggtgtttccgagggggataaatacatctcaggatcccttgaacctagacaactgagggtgacaggcttaaaaaaattcgtaaacttcaaaaaaagcatgaattgctggaggaagccccggagaccaggttttacctttttgccccaatgggacgggccaacggttgtggtctggctagagctctgggttgggatgccagcctggtatgtggctgcctgccgagccaaacgtgaaaagcgggggccatcatgtcggcccctgtccgacaccagagatccagcgtgagattggcatcagcaacccccctgcacaggctgaagctgaggctggccatcccaggagatccatgtcgctgaacccagcccgtctgcccccgcccacatctagaacgacactcgcctatggggacatgaaccacgagtggatcggcaacgagtggctccccagcctgggcctcccccagtaccgcagctacttcatggagtgccttgtagacgccaggatgctggaccacttgaccaagaaagaccttcgagggcagctgaaaatggtcgacagttttcacagaaacagtttccgagtgtggaattatgtgcctgagaaggttaaattatgaccggaaagaactggaaagaaaaagagaagaaagtcagagtgaagtcagagtgaataaaagacgtgcttgtttggagcaatgatcgagtgattcgctggatcctgtcaattggccttaaagaatatgcaaacaatcttatagagagtggtgttcacggagcacttctggccttagatgaaaccttcgacttcaggtgcactggcactgctgttacagatcccgacgcagaacacacaggctcgtgctgtcttggaaagagatatttaacaaccttttggtcatggggactgatagaaggtttgatgaagatgatgataaaagctttaggagagcaccttcatggagaaaaaagtttagaccaaaggacattcgtggcttagctgctgggtcagcagagactctccctgcaaacttccgggtgacttcttctatgtcttccccctctatgcagccaaagaagatgcagatggacggtatgtgatgggtcacactaacctgtcacttgttgggagcatgagcagctttctgtctggaacattaataatgatctaaaacggcctatttaatattgttacaaggcacttgagtatggttgcatgtccaaatataaatgtttttaaattaactctaacatttgtttataaaagtttaaccataataatagaatttttaaaacacgcttgtctgggttgaatcttagcatatttttcccaactaaataaagctcagtattcgtctgtgttctcagagagagactgaggcatacttgtaaatttgtgtctgtgacaggccgtgctagaaagctctttcaggaaatagtagtgtagtagtagcttccaaaccacataatttactgctctccacaccagagaaaataactgagtacatttttaagaacacacagtttccagcttgtgtgagctctgcctatgctttctgccctccctgctgctgctgttccgtgcagtcacatgtctacccattanagggcagggaagggaggaaggt

SEQ ID NO: 134844 - DNA, 1150 bp, Homo sapiens
ccacagccaacctgaccgggcacgaggagaagcctacggcaaggtgttcctggtgcggaaggcgggcgggcacgacgcggggaagctgtacgccatgaaggtgctgcgcaaggcggcgctggtgcagcgcgccaagacgcaggagcacacgcgcaccgagcgctcggtgctggagctggtgcgccaggcgcccttcctggtcacgctgcactacgctttccagacggatgccaagctgcacctcatcctggactatgtgagcggcggggagatgttcacccacctctaccagcgccagtacttcaaggaggctgaggtgcgcgtgtatgggggtgagatcgtgctggccctggaacacctgcacaagctcggcatcatttaccgagacctgaaactggagaatgtgctgctggactccgagggccacattgtcctcacggacttcgggctgagcaaggagttcctgacggaggagaaagagcggaccttctccttctgtggcaccatcgagtacatggcccccgaaatcatccgtagcaagacggggcatggcaaggctgtggactggtggagcctgggcatcttgctcttcgagctgctgacgggggcctcgcccttcaccctggagggcgagaggaacacgcaggctgaggtgtctcgacggatcctgaagtgctcccctcccttcccccctcggatcgggcccgtggcgcaggacctgctgcagcggctgctttgtaaggatcctaagaagcgattgggcgcggggccccagggggcacaagaagtccggaaccatcccttcttccagacacacctgccagggtttgtggagcaggctgaggctctgaaggccaagggagtccaggtggtggcctgtctgagtgttaatgatgcctttgtgactggcgagtggggccgagcccacaaggcggaaggcaaggttcggctcctggctgatcccactggggcctttgggaaggagacagacttattactagatgattcgctggtgtccatctttgggaatcgacgtctcaagaggttctccatggtggtacaggatggcatagtgaaggccctgaatgtggaaccagatggcacaggcctcacctgcagcctggcacccaatatcatctcacagctctga

SEQ ID NO: 134845 - DNA, 1230 bp, Homo sapiens
atgggggacgaggacgacgatgagagctgcgccgtggagctgcggatcacagaagccaacctgaccgggcacgaggagaaggtgagcgtggagaacttcgagctgctcaaggtgctgggcacgggagcctacggcaaggtgttcctggtgcggaaggcgggcgggcacgacgcggggaagctgtacgccatgaaggtgctgcgcaaggcggcgctggtgcagcgcgccaagacgcaagagcacacgcgcaccgagcgctcggtgctggagctggtgcgccaggcgcccttcctggtcacgctgcactacgctttccagacggatgccaagctgcacctcatcctggactatgtgagcggcggggagatgttcacccacctctaccagcgccagtacttcaaggaggctgaggtgcgcgtgtatgggggtgagatcgtgctggccctggaacacctgcacaagctcggcatcatttaccgagacctgaaactggagaatgtgctgctggactccgagggccacattgtcctcacggacttcgggctgagcaaggagttcctgacggaggagaaagagcggaccttctccttctgtggcaccatcgagtacatggcccccgaaatcatccgtagcaagacggggcatggcaaggctgtggactggtggagcctgggcatcttgctcttcgagctgctgacgggggcctcgcccttcaccctggagggcgagaggaacacgcaggctgaggtgtctcgacggatcctgaagtgctcccctcccttcccccctcggatcgggcccgtggcgcaggacctgctgcagcggctgctttgtaaggatcctaagaagcgattgggcgcggggccccagggggcacaagaagtccggaaccatcccttcttccagggcctcgattgggtggctctggctgccaggaagattccagccccattccggccccaaatccgctcagagctggatgtgggcaactttgcggaggaattcactcggctggagcctgtctactcaccccctggcagccccccacctggggacccccgaatctttcaggccgggcactcagcagtagcgttatccagaagccctggtgccgagaagtacacattcgccgctgaacccctgcataacctccatctctgccaccatggccacgttgaacatggacacaatgggcaagcactgggctggctggggaaagaggataactga

SEQ ID NO: 134846 - DNA, 3165 bp, Homo sapiens
  misc_feature (1)...(3165): n = a,t,c or g
tttcgtccggagccgccatgtaaccggcgccgcccggagcccgagccgcgcgggccccagcgacccgcccgccatgggggacgaggacgacgatgagagctgcgccgtggagctgcggatcacagaagccaacctgaccgggcacgaggagaaggtgagcgtggagaacttcgagctgctcaaggtgctgggcacgggagcctacggcaaggtgttcctggtgcggaaggcgggcgggcacgacgcggggaagctgtacgccatgaaggtgctgcgcaaggcggcgctggtgcagcgcgccaagacgcaggagcacacgcgcaccgagcgctcggtgctggagctggtgcgccaggcgcccttcctggtcacgctgcactacgctttccagacggatgccaagctgcacctcatcctggactatgtgagcggcggggagatgttcacccacctctaccagcgccagtacttcaaggaggctgaggtgcgcgtgtatgggggtgagatcgtgctggccctggaacacctgcacaagctcggcatcatttaccgagacctgaaactggagaatgtgctgctggactccgagggccacattgtcctcacggacttcgggctgagcaaggagttcctgacggaggagaaagagcggaccttctccttctgtggcaccatcgagtacatggcccccgaaatcatccgtagcaagacggggcatggcaaggctgtggactggtggagcctgggcatcttgctcttcgagctgctgacgggggcctcgcccttcaccctggagggcgagaggaacacgcaggctgaggtgtctcgacggatcctgaagtgctcccctcccttcccccctcggatcgggcccgtggcgcaggacctgctgcagcggctgctttgtaaggatcctaagaagcgattgggcgcggggccccagggggcacaagaagtccggaaccatcccttcttccagggcctcgattgggtggctctggctgccaggaagattccagccccattccggccccaaatccgctcagagctggatgtgggcaaactttgcggaggaattcactcggctggagcctgtctactcaccccctggacagacccccacctggggacccccgaatctttcagggatactcctttgtggcaccctccattctctttgaccacaacaacgcggtgatgaccgatgggctggaagcgcctggtgctggagaccggccaggtcgggcagcggtggccaggagcgctatgatgcaggactcccctttcttccagcagtacgagctggacctgcggtagcctgcgctgggccagggcagcttttctgtgtgtcgccgctgccgccagcgccagagcggcccaggagttcgcagtcaagatcctcagtcgcaggctggaggcgaacacgcagcgcgaagtggctgccctgcgcctgtgccagtcacaccccaactgtggtgaatcatgactgatgtgcatcactgccagctgcacactgtacctggtcctggagctgctgctggggcggggagctgctggagcacatctgcaagaagcggcacttcagcgagtcggaagcaagccagatcctgcgcagcctcgtgtcggccgtgagcttcatgcacgaggaggcgggcgtggtgcaccgcgacctcaagccggagaacatcctgtacgccgacgacacgcccggggccccggtgaaaatcatcgacttcgggtctcgccgcggttgcggccgcagagtcccggggtgcccatgcagacgccctcattcacgctgcagtacgctgcccccgagctgctggcgcagcagggctacgacgagtcctgcgacctctggagcctgggcgtcattctgtaccatgatgctgtcggggcaggctcccttccagtgcggctctggccagggcggccagagccaggcggccgacatcatgtgcaaaatccgcgaggggcgcttctcccttgacggggaggcctggcagggtgtatccgaggaagccaaggagctggtccgagggctcctgaccgtggaccccgccaagcggctgaagctcgagggactgcggggcagctcgtggctgcaggacggcagcgcgcgctcctcgcccccgctccggaacgcccgacgtgcttcgagtcctctgggccccgcagtgcgcttcgnggtctcaacgccaccttcatggcattcaaccggggcaagcgggagggcttcttcctgaagagcgtggagaatgcacccctggccaagcggcggaagcagaagctgcggagcgccaccgcctcccgccggggctcccctgcaccagccaacccgggccgagcccccgtcgcctccaaaggggccccccgccgagccaacggccccctgcccccctcctaatccccaccactgtgacccccttccctcataggggctgtgacctgggagcccggctcactcccggaggcctctgcctgcggctgaccagaatccccaagggactgtcctttcctctcctaccccaccccactcccagacagagcagaagtatttttataagcagagaattttttatgtcttaccagatagagttgcagggaagggggggcctgctggggagtggggtttggggggccctctcccaggacactgcctcttctgggcagaaggcccctccagggggactgctccaacaggaaagagcccctcccccacttctaagcactgagttaggagtgctaactcctaaactgggaccccctaccctgttcttcccctgaggcccccgttcctgggaggggcacccctcaactgtcactttatggactgtcttgtgcaattacgtccaccaaagacccgtgttgggggtactgaaggagaggccctgggggaccctgctgaagcatttctgcctcactttatgtcatcttgcttctcccctgttggggctaaggaaggagataggtggctcctaaaagaggaggccatcttctcacccaccccttcctctttggcacagctactcctggctgggggtggggccttgggggtctgggctgggcatccatggtcactgcctcagcccagccaggctgtgcctttgactttaaaataaaagtaccacccagtgctgtgtgtggcaaaaaaaaaaaaaaaaa

SEQ ID NO: 134847 - DNA, 1719 bp, Homo sapiens
atgttgcccaggctggtctcgaactcttgggctcaatcggtcctcctgcctcccacagtgctgggatcacagtccccaggaaaccttcgtgcctccagacaaacccagatcacaagtcctgcccctggggaccacagctggtcgcccagagttgaaggagttattactgaagatttggtcagccatccccccggcagggacggcttctgctgctcatccgtgccccgtgctggagacaggacagcagtgagaccactacaaagtgttacgtgcaggctccatcctggtgcaaaagaaggcagcgaggagggtgccgttcacacgccccctccttggagcccaggtcccgaaccctttatcccgctgggtaccccgacactggcccagctcaggcatccccctcagtgtacttctcagtgtctgcaggagttgcagcagatgaacaaccatgatcccaagaactggcaaggggccgtgcggctgatcaccagctctgacaggagggaggcccgaggaggcttcccagaggtgtctgctcgaaagctcctgggcagcctgcctggaatgcagacagcagaagagaaagtaaaattatcaggaatagacagctccaagaaaaggaagctcaagatggctttcaacaacacaaagctgtcccactttgctctgattaaaatcagaaccatgatgagactgtttgtcacctatctgactggcaaaggaagtctggctcaccacgagccagtgggacgaggagtagatgagaaaggaaagggaggccctgagggaggtagggacccagcgcccagaaactacccagggggaacaggtctccacggaacttctgtcaacaaaggagcctggagtgaggatgatactagcacctacttcacaggttgctgtgaagatgaagtgaggccagacgatggccggatgcatgagtgtttcattatactgaaagccctttttcccctagccaaacgtgttgaaggaataaaagtggcaaataaatcatttgtcccatggctgggcccgctccagcctccgattggtacagagcgtccaatcggagaccttcgggcagaaaatgccaagcggggattggaaattttggaaaagcgctttcccgcctgctccagctccgtctccagctgccaggatggagccgggtcgggaccatccgggaaaggggacgccctcccggaccccggctcaccctcgggggcgccggctgcccgcacgcgcctctcccgccaccagcgccgccccggtatttatgagttcgcgggtgccgaggcctcttgccgcctacagccgtcccagccccggaagagccggtcgcctcggggtgacagcctccctagacagccagggccccgggtcccacaggcgcccactcatcagctggggagccccagggcacggacaccggcccctatcctggccctgcccgatccccaggtctttcagttttcctgtgcatttgaaaatgttcataataagatgttggggaaaatgcttggggacatccacgtagttgctgttgtcgacctttatggtgaagccacagcagcaactgattcccgagtgattgacacgctgtgtgttcatttaatgaccctgacaatctttaatgcagactttagaaattttacagatggacccattttacagacgaggaaactgaggctcagcaaggctaagcaccttgtcgtgtga

SEQ ID NO: 134848 - DNA, 402 bp, Homo sapiens
ttttaatattagcaaagttttactttttttttttctgctcataaatgactctgaaaaagccaatacgcaagaggctaacacaactgtagtctaaaggcaacgtcgaggtcactgatatgtccctcagacaagaggcactgctcagaatccccctgtgctgggggtgagggaaggaggggacggtttaggacagaggaataaatacatgtggttgtgggagttctgccatcagggatggtggccccagccaggaccccaaaaccctgaggcggtgcagtgggctgccaaccccccagctcggggttccccaaggctgcctcagtgtttggatgggctggaaggaaatgctgacatcccgactatggtccacggccgggaatggtgggcagacggggctgctgg

SEQ ID NO: 134849 - DNA, 557 bp, Homo sapiens
  misc_feature (1)...(557): n = a,t,c or g
ttttaatattagcaaagttttactttttttttttctgctcataaatgactctgaaaaagccaatacgcaagaggctaacacaactgtagtctaaaggcaacgtcgaggtcatgaggacagggatggggctgggcgtctctggtaaggaccagtaagtgccaggcaggacgtactctgaaggctcagccgtggcccatctgggacacagccctgctcccgaaggggctccaggggaactgctcagccaggtgattcaccagggcacgggcaggccaggctgaacccggggccccagtgtgcgatgtggggaagtgaccgggtgagcgtgaacagnggcgtgggtgcgcggggcgggtggccgtgtgaccgtgcccggccctcagaagaagaagcagcgctccgtggggtggcccacgtggtccaggttgggagaggcagcgtactggatcatgggtggggggccacacatcancaccagcggctcctcctcttggggtggaaagtggtccngatcatctcctattcacgaagccctggccgagtcccaagcttagggg

SEQ ID NO: 134850 - DNA, 291 bp, Homo sapiens
gcgcgacggtctcggcggcggcggcggcggcgacagagcgagcgcggcgcggggccaccatgggggcccagctcagcacggtaggcggggagggggcgccggggcaccccaccccacaagggcctgggcgagctacgtggtgaccgctacttacgccctggcagtctgcagcggggacccagccctcctgcccggggggcgcgccagagcccagcacccgggggcacctgggccctgccctggccgccgtggggccttggctgctggagggacccgtggttgtgagcgtgt

SEQ ID NO: 134851 - DNA, 1248 bp, Homo sapiens
atggagctttttctcatggtactgagcatagaagcccagttgggccatatggtgctcttcccagtctggttcctgtacagtctgctcatgaagctgttccagcgctccacgccagccatcaccctcgagagcccggacatcaagtacccgctgcggctcatcgaccgggagggccccgtgcagagggcccaggtcacagctcagcgtgagcctgccagaccctatgtgggtatcacgttcatacacgggtgtgtggaggtgcggcacctcacacgcagcgtgcatgtgtgtgcatctgtgcttggcgtcggcgtcacgtcttacaaggacaagcaggcactggggaagggtggggacacaaaggaggaatgggatgggggctccgaggcctgggagccgccctgggaggcctctgccctggggaccgttcagcagctttgggcctctctccagatcatcagccatgacacccggcgcttccgctttgccctgccgtcaccccagcacatcctgggcctccctgtcggccagcacatctacctctcggctcgaattgatggaaacctggtcgtccggccctatacacccatctccagcgatgatgacaagggcttcgtggacctggtcatcaaggtttacttcaaggacacccatcccaagtttcccgctggagggaagatgtctcagtacctggagagcatgcagattggagacaccattgagttccggggccccagtgggctgctggtctaccagggcaaagggaagttcgccatccgacctgacaaaaagtccaaccctatcatcaggacagtgaagtctgtgggcatgatcgcgggagggacaggcctcgctcagcacgtgcgaggcccggccggctattttgcaggcatcaccccgatgctgcaggtgatccgcgccatcatgaaggaccctgatgaccacactgtgtgccacctgctctttgccaaccagaccgagaaggacatcctgctgcgacctgagctggaggaactcaggaacaaacattctgcacgcttcaagctctggtacacgctggacagagcccctgaagcctgggactacggccagggcttcgtgaatgaggagatgatccgggaccaccttccacccccagaggaggagccgctggtgctgatgtgtggccccccacccatgatccagtacgcctgccttcccaacctggaccacgtgggccaccccacggagcgctgcttcgtcttctga

SEQ ID NO: 134852 - DNA, 2143 bp, Homo sapiens
  misc_feature (1)...(2143): n = a,t,c or g
tttttttttttttttttttaatattagcaaaagttttacttttttttttttctgctcataaaatgactctgaaaaagcccaatacgcaagacggctaacacaactggtagtctaaaaggcaacgtcgaggtcactgatatgtccctcagacaagaggcactgctcagaatcccccctgtgctgggggtgagggggaaaggaggggaacggtttaggacagaggaataaatacatgtgtgttgtgggagttctgccatcagggatggtgggccccagcccacggacccccaaaaccctgaggcgggggaagtgggctggcaacccccccaactcggggttccccaaaggctgcctcaatgggtttgatagggctggaaggaaatgctgatggtctgggggaagggccccatgggccagcccccctctttcccactctaaggccagaggaagagcccaagctccccggctgggccagggcccctggggtaagggaagcaagtgccccccaaagagggcttttcttggtgtcaaatgtcttcaatgcagcgtcaaggtggtgaggccttggccttggcccttgaggcgggagtgggggtgacaggcgaggcttggggtgggccctggcaccgtcagcttttgggctgcccatgtgtgtctgctgacatcccgactatggtccacggcacgggaatgggtcgcagacgtggctgctggcaggccttcaccttatagtgtgtgtggggggtggacgaggggtcattatggacagggatggggctgggcgtctctggtaaggaccagtaagtgccaggcaggacgtactctgaaggctcagccgtggcccatctgggacacagccctgctcccgaaggggctccaggggaagtgtatcagccaggtgattcaccagggcacgggcaggccagtctgaacccggggccccagtgtgcgatgtggggaggtgcccggtgtgagcgtgaacagggcgttgggtgcaaggggcgggtgaccgtgtgaccggtgcccggccctcagaagacgaagcagcgctccgtggggtggcccacgtggtccaggttgggaaggcaggcgtactggatcatgggtggggggccacacatcagcaccagcggctccctccctctgggggtggaaaggtggtccccggatcatctccctccattccacgaaagcccctggccgtagtccccaggcttcaggggctctgtccagcgtgtaccagagcttgaagcgtgcagaatgtttgttcctgagttcctccagctcaggtcgcagcaggatgtccttctcggtctggttggcaaagagcaggtggcaacacagtgtggtcatcagggtccttcatgatggcgcggatcacctgcagcatcggggttaatgcctgtcccttcccgcaatcatgcccacagacttcactgtccctgatgatagggtttgaactttttgtcaggtcggatggcgaacttcccttttgccctggtagaccagccagcccactggggccccggaacttcaatggtgtctccaatctgcatgctctccaggtactgagacatcttccctccagcgggaaacttgggatgggtgtccttgaagttaacccttgatgaccaggtccacgaagcccttgtcatcatcgctggagatgggtgtatagggccggacgaccaggtttccatcaattcgagccgagaggtagatgtgctggccgacagggaggcccaggatgtgctggggtgacggcagggcaaagcggaagcgccgggtgtcatggctgatgatcttgcatgaggcagtgagtgtggttcagagaaggggctctgtggacagagagaccagggtttaaattcctctgctacttcctggtggccttagcaagagacatcaccttgctttctccatctcccggtcgatgagccgcagcgggtacttgatgtccgggctctcgagggtgatggctggcgtggagcgctggaacagcttcatgagcagactgtacaggaaccagactgggaagagcaccatatggcccaacgtgctgagctgggcccccatggtggcnccgcgnnnnnnnnnnnnnnnnnnnnnnnnnnnnnnnnncgagacccgggaattcggacgg

SEQ ID NO: 134853 - DNA, 1064 bp, Homo sapiens
tggaccagcgtggtggaattccgtcgctgccgctgccgctgccgccgtcgttgttgttgtgctcggtgcgctgagctccgcgacttccgcgagcgggtgtctcgtccccttcccgccgccgccatgaagtggatgttcaaggaggaccgctggcgtggaacacagatgcgtggagtccgcgaagaattcgagcgaaatatcccgacagggttccggtgattgtggaaaaggttctcagggctctcagattgttgacattgacaaacggaagtacttggttccatctgatatcactgtgggctcagttcatgtgggatcatcaggaaaaggatccagcttccttctgaaaaggccgatcttcctgtttgtgggataagacagttcccacagttccagcctaactatggggacagctttacgaggaagggaaaaaggatgaagatgggattcttatatgtgggcctacagcgggagagtaacactttttggcttctgagggccattgctggggctaggtgcacccgtaactgccttgtgtattcttgttaaattagccagccattttcaggttattatacccagaacctcttcacatagacctattaggtgcatttggaacctggatttatttccttaatatattggaagggttttgtttccttagacctagtaaattatccataccagagttttaattttgaagtttttcctttttgtgccattgtccctcatgccctgtattccccccaggaaaccttgtcccttctggaaatcatattggaatgatatttcctatatcgaagtgaggtaggtgcggtattaaagtgaaagggaaggtgatgcatttattcctgggttatgcttgaagtgttagatggctaagtattaaaattatcccaaattaaatcccttagcagtcaagaacactctgcttcagctagaatatgccaagctgccaatcatgttggcactgagctaatcttgttcctctttcttgaaactattaaggataaaaacattacccaataaaaattcttcttataaaggccaaaaaaaaaaaaaaa

SEQ ID NO: 134854 - DNA, 618 bp, Homo sapiens
atgcattttgagcgaccagagggtagagtattttgggctgaaatgtgtccttccccagattataactccaagtacctccaactgtgcctgcatttgcagagagccggagcccggcccagtgctccagagaaaggccgtcctgcagcacccgccgctgtcgccgaccgcccgcacatccgtcgggccggccggcgtggcgctcggcgccgaacaggccccgaggaggccgcagttaggcctagtgattatccagttgccctgagcggctgcggaggtgcgctccataagcgggcagggtgggaaaagttcgcccgtttgtccggaaggcagttgatggacctggggtcgacaccactgcggacgcagggcacggcacgggggcgagaaggcgaaggctgcaggcgcggggatggggaaaaggacggcggcggcggcggcagcgcagcctccggcgcgacggcgtgtctgcgcaacagggcgtgctcgttcccttggcggcccttgcctttgtcgccatatgcgcgcgtacgttccagacgcctgcggcagcgccacctttcggccttcccctcacagcccatccttggctgggtgcagtgtcggctacgctttaggtga

SEQ ID NO: 134855 - DNA, 386 bp, Homo sapiens
aagctgatggcattccagccagcccccaaagtgattcgctgcatgaccaacacacctgtggtagtgcaggaaggcgctacagtgtacgccacgggcacccatgccctggtggaggatgggcagctcctggagcagctcatgagcagcgtgggcttctgcactgaggtggaagaggacctcatcgatgccgtcacggggctcagtggcagcgggcctgcctatggagctgccaagatgctgctggactcggagcagcatccatgccagcttaaggacaatgtctgctcccctgggggagccaccatccacgccctgcactttctagagagtgggggcttccgctctctgctcatcaatgcagttgaggcctcctgtatccgaacacg

SEQ ID NO: 134856 - DNA, 460 bp, Homo sapiens
ggaattcccgggtcgacgatttcgtgttgcaccatcccagaagctgctgttagctcgccggtcctcggcacgccgcccgttcgcccctgcgctgtgcgcccttggcctagcgttacttccggtccctcgctgagggggttcgtgcggctcccaggaggcgtgaaccgcggaccatgagcgtgggcttcatcggggccggccagctggcctatgctctggcgcggggcttcacggccgcagaagatgggtgtgaacctgacacgcagcaacaaggagacggtgaagcacagcgacgtcctgtttctggctgtgaagccacatatcatccccttcatcctggatgagattggggccgacgtgcaagccagacacatcgtggtctcctgtgcggctggtgtcaccatcagctctgtggagaagggagctgccaagatgctgctggactcggagcagcatccat

SEQ ID NO: 134857 - DNA, 1868 bp, Homo sapiens
atggctcacgcctgtaatcccagcactttgggaggccgaggtcagatccagagctccccacaacagaccacagccaggaaaagcaaagggccctgcagtgccctggtggactatggggagggtgagtatcctgcagaggagcaggcagcattaggaagttgtgaagggaggcgttacttccggtccctcgctgagggggttcgtgcggctcccaggaggcgtgaaccgcggaccatgagcgtgggcttcatcggggccggccagctggcctatgctctggcgcggggcttcacggccgcaggcatcctgtcggctcacaagataatagccagcttccccagaaaatgaaccctgcccacggtgtccgcgctcaaggaagatgggtgtgaacctgacaccgcagcaacaaaggagacgggtgaagcacaacgaccgtccctgttttctggctgtgaagaacattattcattcccctttcattcctgggatgagatttggggccgacgttgcaagccagacacatcgtgggtctcctgtggcggctgggtgttcaccattcagcttctgtgggagaaggaagcttgatgggcatttcccagccagcccccaaagtgattcggctgcatgaccaaacacacctgtggtagtgcaggaaggcgctacagtgtacgccacgggttcccatgccctggtggaggatgggcagctcctggagcagctcatgagcagcgtgggcttcctgcactgaggtggaagaggacctcatcgatgccgtcacggggcctcagtggcagcgggcctgcctatgcattcatggctctggacgcattggctgatggtggggtgaagatgggtttgccacggcgcctggcaatccaactcggggcccaggctttgctgggagctgccaagatgctgctggactcggagcaccatccatgccagcttaaggacaatgtctgctcccctggtgggagccaccatccacgccctgcactttctagagagtgggggcttcgcttctctgctcatcaatgcagttgaggcctccctgtatccgaacacgagagcctacagtcccatggccgacccaagaaaagatctccccagctggcccttaagaagaccctcttagacagagtgaagctggaatcccccacagtctccacactggaccccctccagccccagggaagttcctcacaagaagcctgggcctggggaggcaagaaggactaaggcagcatctgtcccctctgtgattcagagcccttagttgagagcccctgccgcccctgccaccccccctgccccgctcccaccattgcccctcctcagctgttgcaagggaggaaagcattgtttagggaagttttcaggttccttgttgattaaaacctcctttaaatttgttttcaggaccaaggcaattgggagttttccttttcctgttcccatgttggaaagttgcctctgaaaggggtggtagatgctgggaagcccagaacacaacccccctgcgacgcctgcctcaagttggtggagactgggggctgggactggaaatcagccccagctgggaggaggggcctggggaggatctgccagctgaaagcccgaggcagggttggtgtgatgcccaaggcaaagtggtgaggagaaaacaaggaaacggactttctctgaattggtaaatgggaaagaagtgagcaacttaagattgtggctgttaatcacaagtggacaggattagactgggtggatattgaactgtggctgtatatgtgtgccaatttaaagagtggttatttaatgctaagtttaactgctttaatcaagtttatttttaaatatcaaaaaaaaaaaaa

SEQ ID NO: 134858 - DNA, 424 bp, Homo sapiens
  misc_feature (1)...(424): n = a,t,c or g
cttgcggttgctttatatccagctgagtgagagggtttgagtcaaagcctgggtgagaatcctgcctctccccaaacattaatcaccaaagtattaatgtacagagtggcccctcacctgggcctttcctgtgccaacctgatgccccttccccaagaaggactagaaaaacttgggtctcttaccgcgagactgagaggcagaagtcagcccgaatgcctgtcagtttcatggaggggaaacgcaaaacctgcagttcctgagtaccttctacaggcccggcccagcctaggcccggggtggccacaccacagcaagccggccccccctcttttggccttgtggataagggagagttgaccgttttcatcctggcctccttttgctgtttggatgtttccacgggtctcacttataccaaagn

SEQ ID NO: 134859 - DNA, 3167 bp, Homo sapiens
cccaaactgacggaggggccaggctgagcagcagcccctctcttacctcagctatgaatctcctgccccccaagtccaagtgcaatccactgtggaatgagtctctgtcatcgctggaggaggggccttcagggtccaccccaccagaggagctgccttccccatcagcctcatccctggggcccatcctgccccctctgcctgggaaccatagtcccactaccctgtgctccttcttcccctggatgagcaacctgaggctggccaattgggccgggggacacctggggcctaatggggagccaggaagggcagccaatgatggggagggcattgtaggggcaaccatgccagactcattcccctacccctcctccaggacatgaacaagctgagtggaggtggtgggtgcaggactcaggtggaagggggccagctggggggtgaggagtggacccgccatgggagctttgtcaataagcccatgtggggctagctgcatcccaatgacaaagtcacgagacctggggtttcctacttggtttggtacatgggctgtgtggaggtcctgcagtcaatgagtgccctggacttcaacacctggactcaggtcaccagggaggccatcagttttgtgtgtgaggctgtgccaggtgccaagggggtgacaaggaggagaaagccctgtaaccatccactcagctctatcctggggaggagtaacctgaaatttgctgcaatgacaatcactctcaccatctccaccagcagcctcaacgtcatggttgcagactgcaaacagattatcaccaaccaccatatgcaatctatctcacttgcatccagtggggatccggacacagccaagtatgtcgccaacgttgccaaagaccctgtgagtcagaaagcatgccacattctggagtgtcctgaagggcttgctcaggatgtcatcagcaccactggccaggccttcaagttgcactttaaacaatacctcagaaaaccacccaaactggtcaccccccatgacaggatgactggctttgatggcttagcttgggatgaggaggaggaagagccgcctggccatcagcactataatgacttcctggggaaggaatcccctctttggcatgtggtatacatgaggcttcgggaaggagccactccaggggctgctcgacccactccacccagtgcccagacccccagccacttgggatctacactgcctgtaggacagtctgttgggggagatccagaagtttgcaaatagatgccacctccaccaccctgtccaggcagagagctctttgatgatccctccaatgtcaacgtgcagaacctagacaaggcccggcaagcagggggtggtgctgggacccccaatcctgccatcaatggcagcacaccctgagacctgtttgacatgaagccctttgaagacactcttcacatgcctcctcttccccagttggtgtccatggctaagcagctctgaggggacccctggttccaagggaagctgagctagcagggggctgaggcactgctgcagttcaatggggacttcctggtgcaggagagcatgaccacacctggccaagtatgtgctcactgctttgcagagtggggagtccaagccatttgctactggtggaccctaggggtgtggttcggataaaggatcaccgctttggaaagtgtcagtcaccttatcagcttaccacatggacaatcacttgcccatcatctctgcgggcagcgaactgtgtctacagcaacctgtggagcggaaactgtgatctgccctagcgctctcttccagaagatgccctccaactcctttccaccctattcccctaactctcgggacctcgtttgggagtgttctgttgggcttggccttgtgtcagagctgggagtagcatggactctgggtttcatatcccagctgaagtgaagagggtttgagtcaaaaagccctgggtgagaatccttgcctcttccccaaacattaatcaatcatcaaagtattaatgtacagaagtggccccttcacctgggcctttcctgtgccaacctgatgccccttccccaagaaggtgagtgcttgtcatggaaaatgccctgtgggtgataggcccagtggaacagtcacccttctgggcaagggggaacaaaatcacacctctgggcttcagggtatcccagacccctctcaacacccgccccccccatgtttaaactttgtgcctttgaccatctcttaggtcttaatgatattttatgcaaacagttcttggacccctgaatttcaatgacagggatgccaacaccttcttggcttctgggacctgtcttctccttgcctcagcaccctctccagtttgggttgggataacagaggcaggagtggcagctgtctcctctccctgggggatattgcaacccttaggagattgccccaggagccccactcccgggccaggcagggagatgggacccctcccttgctcagtgcctcctggccgggggggggtgcctcaccaaggcgtgtgtatatacatttcataaggcctgccctcccatgttgcatgcctattgtactctacagccaaagtgcagcccttcctcctgaagcctctgccctgcctccctttctggggagggcggggttgggggtgactgaaatttgggcctcttggtacagttaactctcccaggtggattttgtggaggtgagaaaaaggggcattgaggctataaagcagtagacaatccccacataccatctgtagagagttggaactgcattcttttaaaattttatatgcatatattttagggctgtagacttactttcctattttcttttccattgcttattcttgagcacaaaatgataatcaattattacatttatacatcacctttttgacttttccaagcccttttacagctcttggcattttcctcacccaggcctgtgaggaactgggaccggcagcattatctttatacagagacctgaggcagatgaaattgattcccagctaggactagaaaaccttgggcctcggactgcgaggctgagaggcagaagtttgcctgaatgcctgtcagttcacggatgataatgcaacctacaattaatgagtacc

SEQ ID NO: 134860 - DNA, 2444 bp, Homo sapiens
aaaaaaaaaagccctgcaagcatgtgtaggagggaggccagcctctggttctgctgtgccctccatcaccagcaccaccacctacctccattttgttcacccggccccatggatacaaaaactctgccgtgtatttagaataagaaaggtagtaaagctatgaagactttgtcttttgggccgctattccttaaacctccccatactccctcttcaatgtgttccactatccattcatctaacagcctgattacaactccctgggtgctctccaagtaagaggggtatttagggttttgctgagtgcaggggtgatgcctaaatgggtggatgaatggacaaactgacaaagcaacagacgaaaggaaacattcccaaacccttattgaacagacttttcttcatgacacctctcggaatgtaaacagagctttggtgtgaagaagatcaatctgatggttaaagatcaagtatggcctgcgtaaggcaagtttgacaatctaacccatcccctaaacaagattttccctaaaaactctgtggaaacaaacccaaaggagaaaggcaatattcctcccctttcccaaaaaggtggggcaaatgtgcctctttccttggaaggttatttttacaagcacggggcccctgaaagcaggcagcctccccatcagccatttttggcgtgagcagttaacagctggcacacttttgcaacttgtccccgccttgaggtctgatgtcagaagagcatggtcagtccactttccactttcagagagggtttggtgggtgtcaggcaagccctgctgttccaaggttcctaatcctttgaatcacagcaattggggtctcagttttaatgggctttcttggctggatttccagcatcatgggcagggtattttaccacatctgtcacattcttataggactcaggagcctcttccatatccagtttgggtgaaggcaaacacggatccgcaaattcccccatatcctgcccaatttgtcctaagacatccctggaaatcctaaattacgtcgagattttgcctcgggacaatgcacgggcccgctcccatgacaagtttgttcccaaaggttctcagtcatgcccctgttccagtgccagtaagaacataactacaggttcccatggtgccaccaatgagcactggctgtccagtgagttggtaatcaacagcaatgagcggatggtgaggagggaaagcgcgggtggatcccttcctgtgtactaacagtgtccgttcctttccgtccaccacatgctgctccactttggcaatgttgtgagaaacatcatagatcacatgtaggtccaagtcatcaggggttgtgttgaagaccttggcgaaagcctgacgggttaagaaggtcatggaagagcggttgacccaggcatagttcccagcagctgccattcccttcagatagtcttgaccctctggggaagcgattcgagcacaagccaactgccgatcattgactataatcttgtctctcttcatggccttctccatagctaccagcgcatctgtggctacttggtggcccaagcctctgcttccactgtggatcatcacacacacctgtcccttatggtcgatgcccatttttttagcagcatactcattgaaaatctcatccacaacctggatttctgcataatggttgcctgctcccagggtccccaactgaggaaggcctcttttcttcgcccttgcagaaactttattggggtcagcctgcagcatccttccgtactcctcgcagtgctccttgtcttcagcccaggcatacccttctcttaaggaccagtccacccccatctccaaggcctcctccaagtctttggcattcattgggatgacaccttttgaccccaccccaacaggaatgtggtcaaacatagcttgggcaagttgctccttcacaggctggacatcactttcatctaaattggttcttagcaagcggacaccacagttgatgtcaaacccgacaccacctggggatactactgcttcagggtcattcatatcaaaggctgccatgttcccaatagcaaacccatatcctgaatggacatcaggaagcccaatagatcgatgaacaattccaggcagggctgccacattgccaatctgtttcatggctggcaggaagccaccaacaccaccacctcgacaggcattccttaattcctcaaacatcaatttctccagagcatcattcacatagaaaacaccttcaacctgcatgttgggcacgaagcccttcttgatcctccagcagtttttattgatcttctccaagaactgcagctcatcattatagctgcgactcatggtggcgaaaactgtagcaaaaactcccggctccgctttgaagagccgctgccgcgtagtccggcttctcagagc

SEQ ID NO: 134861 - DNA, 876 bp, Homo sapiens
atgggttcatggcccagtgactgtaagaagagttggagatgtggagctgccctgggaagccaaagtgaggggctgtgtctgctgaagagatcctgggtgagggaagacaaactaagcagtcaagagattccattcctgaacattcttgtgactattctccgaaaggccactcagtctatagtattttattgcggcaatccaagtagactaagaaattactaccaagaagtgggtgctgctgtaacaaataatgtggaatcagctttggaaacggatgatgtacagataatggagaagtttcagatgcatgctaacaatatggacatgaaatgtgattctgatgaggactcagatggaaaagagaggctgggcatgtttcttcagcagcagagtcagaggtacaaaaagcaaatgcccactcagccactgcccagtctcaaggtcattttcattcatggaggagggagaattctaacccggcacaagcaaccccggttgggtgctccacatcccatcatctctggctgtggctctagaagccagcggatgagctacgaggatccacattatctgcactgtgctttagagagtgtgtcccggagcctggatcttgggcagcacaggaacccctctaagctcgtggccataaagggcttctcacatgttggagtttatttcacacacgttcacggtgtttttgattatgaaccagaagcccattgtgaagtgtcaagaccaggaaataacagacacggcagttccacgagaagacattcaacctctctgtcttccagtgtacagtgccaaacaggagtttctgttcctgacaaccatgccggaagtgaggaagttgccagaagagaagcacattcctga

SEQ ID NO: 134862 - DNA, 849 bp, Homo sapiens
atggatggagctggaagccgttatcctcagcaaaccaacacaggaacagaaaaccagatgctgcatattctcacttatgagtgggaactgaacaatgagaacacatggacacagggaggggaacaacacacactggggcctgtcggcggaaacacacgaagccttatacacgggcacctgagggtggtttgcgagccatccggagaaaacccaggcagcttggcaggtggtgagctccccactgcaggctgtattcaggtgtggccggataactacgtggtgggaagagtcagtgaatggctgcggtgtgacaacatgcaccaccagtggcttctgctggccgcatgcttttgggtgattttcatgttcatggtggctagcaagttcatcacgttgacctttaaagacccagatgcagggcgcctctcaggctcgcagttgggaattctctttgcctcatgtcatcatgagaggtgcagcctcaactgcttggcatgcccgtgtggtggccacatgtttgaaggtcaccctccatgcagcggaggagggtcatttaaatgtatgtcttcaggttgtcttggaggctttcttagctctcctttactgaacgtaggcattcagatgaggacggataaagagcgccaaattgggtctcagaatgctgattctacttcgtgctcttgtcatttgcttatctacatcacaatgtttcttccaccaaatggacaccctgcctgctccggcaccgcccatgattgccctgagcatgaggctgactcagagcatgaggaccctttcccacacccctatgacttcatcctcaaccaaccagcagcacccactccctag

SEQ ID NO: 134863 - DNA, 1443 bp, Homo sapiens
atggggtcatgtggagaaccatctcctacacaggaatgccctcaggatgcctccagagaacaaggaggtgtgagcagcaaggggactttaactcaccgaggacagggggcctctgagcaacttctgtgtgtactggcacatctccctgtgccccctccaacccatgcacacacaaggcctctcacattacagccaactgggaaggagcttccagacagccagctcgttcagcccctggtctacatggagcgcctggaactcatcagaaacgtctgcagggatgatgccctgaagaatctctcgcacactcctgtctccaagtttgtcctggaccgaatatttgtctgtgacaagcacaagattcttttctgccagactcccaaagtgggcaacacccagtggaagaaagtgctgattgttctaaatggtgtgtgtgggtctactgaatgtccactgggaagggtcttggtggccggtgctgaggaggctggggaggacagcaaggaggagtcacaagagggctggtttgacctgaagggactggtggccgtccagacaggcctgtttttgttgtttcctgttagtgttgtgccttacaagttccctgtgctgatggttatagtcacccactctgtccgacatccccagggccccacactcgcagagccaccaggaagcctcacggtcaccctctctgcatctcagagtagagtaagtgttgctggtgttaggagttctgtttgcatgcagcgatcttcctctaatggcagatttagcccagttaggtccattgccaggggagcattttcttccattgaggagatccccgaaaacgtggtgcacgaccacgagaagaacggccttcctcggctctcttccttcagtgatgcagaaattcagaagcgattgaaaacatacttcaagttttttattgtaagagatcccttcgaaagacttatttctgcatttaaggataaatttgttcacaatccccggtttgagccttggtacaggcatgagattgctcctggcatcatcagaaaatacaggaggaaccggacagagacccgggggatccagtttgaagatttcgtgcgctacctcggcgatccgaaccacagatggctagaccttcagtttggggaccacatcattcactgggtgacgtatgtagagctctgtgctccctgtgagataatgtacagtgtgattggacaccacgagaccctggaggacgatgccccatacatcttaaaagaggctggcattgaccacctggtgtcatacccgactatccctccgggcattaccgtgtataacagaaccaaggtggagcactatttcctgggcatcagcaaacgagacatccgacgcctgtatgcccgtttcgaaggggactttaagctctttgggtaccagaaaccagactttttgctaaactaa

SEQ ID NO: 134864 - DNA, 2709 bp, Homo sapiens
  misc_feature (1)...(2709): n = a,t,c or g
ttttttttttttcagggtttggcacataaattttatttaactttcacattgacacaatcaggaaaccattctgagaaaaggtagaggccgccttgaagcgaagcctgggctccctcctccaccccgggctcggcggcaccatgcaggctcaggctggcactcatcccaggaaactgtcccagttctcagcgggtcctgggctgtgggacggtatctgaaatgggtcgctgcggcttgccctgcaccagggccttaccttgttgccagggaagccgcactgctgggaggctacctggggcgctggggttttattgctgggtgaacttgggttacccacctttccagtcacatgggtccagggatgggtgggtgtgatcagaaatggtctttgggcagtgcccattttgctggagatgaaaggaattcgaaatgtattaaacttacactgaattctgtgatagttggcaggtttgcccctgctcgtcttcagccccaacatgggagctccctggagaagacaggtggagattcactgctgtccacccaggtaaggcaagtcagaactgatgcgccgggatccacagcagcctgagctccaagcccaaccagcgcccccattcctgggccatggtccttttaaggccctcaaagacactccccttctcaggtagaaaaagcctcccctcccctcaccttctaaaatcgtatgtcttgtgctgaatgaaataggcgcttggcagacacaggttcagaagcatggaccagcattacacaggcatggattctggaaagatggatccctggacaccacaccaccctctgggccatcgctgactgtctacaggaacaaaatagtcacagaaagaatgctttgcctccacaattgtcgcagcaccaagatgaaggccagaggtgccgttttactcctcagatctgatgctgcaaaagtctctgcgatttcaagcagcccccttgcttctctgtccctcctcagagtcctgggtgctgttcctgcaacccaccagtgatgggtgaagccaccccgactagccaggagaacctcaggggcatccccttccttaacacctgaaggaaacggctcctaacgctgtgtgatgcttcctccctgctgggctgtcaaactgcaaatctttagccttttcctcccctctgaggtgaacaaaaggcccagcgaacatccctaatgcacgccaggggtgtgggcagggtccctcagagcatccttacatcccaaactaagttgtaacagttggggttctgcgtcatatgccgaggcaactcacaggcctgtgggagaccccgggcgtcctcaaaggaggggtgtggtggaggaagggtcatttctgggctcagatcttcacctggttagccccaggtctaataaagatatttgaattcataggtcttatgcattagtttagcaaaaagtctggtttctggtaccccaaagaccttaaaaatcccccttcgaaaacggggcaataacaggccgtcggatgtcctccgtttgctgatgccccaggaaatagtgctcccaccttggttctgttatacacggtaatgcccggagggatagtcgggtatgacacccaggtggtcaatgccagcctcttttaagatgtatggggcatcgtcctcccagggtctcgtggtgtccaatcacactgtacattatctcacagggagcacagagctctacatacgtcacccccantgaatgaatgtggtcccccaaactgaaaggtcctagcccacctgtggttcgggatcgcccgaggtagcgccacgaaaatccttcaaaactggatcccccgggtcctctgtccggttcctcctgtattttctgatgatgcccaggagcaatctcatgcctgtaccaaggctcaaaccggggattgtgaacaaatttatccttaaatgcagaaataagtctttcgaagggatctcttacaataaaaaacttgaagtatgttttcaatcgcttctgaatttctgcatcactgaaggaagagagccgaggaaggccgttcttctcgtggtcgtgcaccacgttttcggggatctcctcaatggaagaaaatgctccatttagaacaatcagcactttcttccactgggtgttgcccactttgggagtctggcagaaaagaatcttgtgcttgtcacagacaaatattcggtcccaggacaaacttggagacaggagtgtgcgagagattcttcagggcatcaatcccctgcaagacgtttcctgaatgaagttcccaggcgctcccatgtaagacccaggggctgaacgagctggctgtctggaagctccttcccagttggcttcagttcctcaggaatgtgcttctcttctggcaacttcctcacttccggcatggttgtcaggaacagaaactcctgtttggcactgtacacatctgggtctttaaaggtcaacgtgatgaacttgctagccaccatgaacatgaaaatcacccaaaagcatgcggccagcagaagccacttggtggtgcatgttgtcacaccgcagccattcactgactcttccttctgcagcctggggctcacatttccttgctgtgtttcccctgaactgaggttcttggttcctcttgtcacctactggagcggcgctcgtccgggtccttaggctcctcccccggcacgaggcctcgtgcc

SEQ ID NO: 134865 - DNA, 426 bp, Homo sapiens
agttttctgccacacagatttgcggaagaacctgaccgtggacgagggcaccatgaaggtagaggtgctgcctgccctgaccgacaactacatgtacctggtcattgatgatgagaccaaggaggctgccattgtggatccggtgcagccccagaaggtcgtggacgcggcgagaaagcacgggggtgaaactgaccacagtgctcaccacccaccaccactgggaccatgctggcgggaatgagaaactggtcaagctggagtcagcggatttggggattaggctcttttaggtaactggctttcctgctggtccgtgcgggaaattcagtcttgatttaaccttaattttacagcccttggcttgtgttatcggacgttttaatgcatatttataagagaagtttaacaagtatttattcccat

SEQ ID NO: 134866 - DNA, 633 bp, Homo sapiens; identical to SEQ ID NO: 124004

SEQ ID NO: 134867 - DNA, 444 bp, Homo sapiens
atgttgggcaccgcagagagcccacggatcttccatggcaaacggctgagatcacaatatgccaaaacaggtgtagacagctgtcacttaagcgcccatataggtgacaccttgtttgtggctggctgcgggaagttctatgaagggactgcggatgagatgtgtaaagctctgctggaggtcttgggccggctccccccggacacagtaggcagcgcctccctgcgggccgggagagtctactgtggccacgagtacaccatcaacaacctcaagtttgcacgccacgtggagcccggcaatgccgccatccgggagaagctggcctgggccaaggcccccacatcgcctttggtcaccatgtctcactgggctcctcagggctgtgacagtgtttctggtgacctggacggttttgaggaatgctggtgtgggatcgtatag

SEQ ID NO: 134868 - DNA, 620 bp, Homo sapiens
tttcgtgggtgcggaaagcgctaggtccagccctgctgggagttttctgccacacagatttgcggaagaacctgaccgtggacgagggcaccatgaaggtagaggtgctgcctgccctgaccgacaactacatgtacctggtcattgatgatgagaccaaggaggctgccattgtggatccggtgcagccccagaaggtcgtggacgcggcgagaaagcacggggtgaaactgaccacagtgctcaccacccaccaccactggtaagtgccgcgtctcacctgggggtgtgggacctggctcacttctcgccccggtgggtttagggacatcaaggcctgtctccccccacggctctgtcttgtttgtgagggacaagcccccagcagacttctgagaaagactcgggactcaccgtagcccccaaggggcaagtctggtgctcagtgactctgaggccccgagggtgaggggagaaggttacagccttaccctcaggccccaccccccggctctctcctgggccatgcgggtttgtgccctggcacgttggcctcaatgttggggaggaaatgagtctacaggtgagtggtttttaaaaaaaaaaaacaaacaaacaaa

SEQ ID NO: 134869 - DNA, 1589 bp, Homo sapiens
gctcggcagtccagcccggcccggtcatggtggtgggccgaggctgctcgcgccgcagcctcgccgcgctgggagccgcctgcgcccgccgaggcctcggtccagccctgctgggagttttctgccacacagatttgcggaagaacctgaccgtggacgagggcaccatgaaggtagaggtgctgcctgccctgaccgacaactacatgtacctggtcattgatgatgagaccaaggaggctgccattgtggatccggtgcagccccagaaggtcgtggacgcggcgagaaagcacggggtgaaactgaccacagtgctcaccacccaccaccactgggaccatgctggcgggaatgagaaactggtcaagctggagtcgggactgaaggtgtacgggggtgacgaccgtatcggggccctgactcacaagatcactcacctgtccacactgcaggtgggggtctctgaacgtcaagtgcctggcgaccccgtggccacacttcaggacacatttgttacttcgtgagcaaagcccggaggctcggagcccccctgccgtgttcacaggtgacaccttgtttgtgggctggctgcggggaagttcttatgaagggactgcgggatgagatgtgtaaagctcttcttgaggtctttgggccggctccccccggacacagtaggcagcgcctccctgcgggccgggagagtctactgtggccaacgagtacaccatcaaacaaacctcaaagtttgcacgcccacgtggaaaccggcaatgcccgccatccgggaaaaagctgccctgggcccaaggagaagtacagcatcggggagcccacagtgccatccacccctggcagagggagtttacctacaacccccttcataaaagtgagggaagaaagacggtgcaagcagcacgcaggttaatacgaaccccggtgaccaccatgcgggccgtgcgcagggagaaggaccaagttcaaagatgccccgggacctgaggccgcccctgcaccttcagcaggatttggggattaaggctcttttagacagactcttctgagtggaggggcagagcggccctgggacctaggagcaagcctggcccgaggcttgtggattgaagaggaaggctggcactgcacttctagaccacatgcatgccctccccccggaggggtcactggtctgttccgcaataactcgccagtacccctctgggatgcccacggaaagccaggccgtgtgtgaaggaggcagggcagactgctttctccggcttttcttctcccactacccccaccccagcgcaaagagtttgttctattgttcagcaaatattcttaggccagaatcttaaatgtttccattctataacaaacactgtgctcatttgtcaacatggagaaacctgatctctactaaaaatacaaaaattagctgggcgtggtggcatgtgcctgtagtcccagctactctggaagctgaggcacgagaatcgcttgaacatggaagcagaggttgcagtgagccaagatcatgccattgcactccagcctgagtgacagagtgagactttgtctca

SEQ ID NO: 134870 - DNA, 4860 bp, Homo sapiens
atgccgctccggggcctccacgaggtgacctcgccacgcgcctcggccatgttccccccatttccagggagtggctctgtcaaaggtcgagtccgtgacgtcaaagagcctggaccaatcacagcacaccggatgcgtttttttttccgaacgcccgcagcagagtcagaagagaggtggtcgccgtgcagtagtggtgtggcgtgtattccgagcgttggtgtctggcggtttccgagcgttggtgtctggcggtttctggacggttggtgtctggcggtttccgacggttggtgtgtggcacgcgccaccctgtcttgttttggttgcgccatgctgatgtaccaggtggcaaaatatccaaagaaagggtcccaagcggtacatcgtcatagccggaaacagtcagagccaccagccaatgatattttcaatgctgcgaaagctgccaaaagtgacatgcaggactggatggtttccatgatcgtggacagagagtacagtgtggcagtggaggccgtcagattactgatacttatccttaagaacatggaaggggtgctgatggacgtggactgtgagagcgtctaccccattgtacttttctaccctgagtgcgagataagaacgatgggtggaagagagcaacgccagagcccaggcgcccagaggactttcttccagcttctgctgtccttctttgtggagagcaagctccacgaccacgctgcttacttagtagacaacctgtgggactgtgcagggactcagctgaaggactgggagggtctgacaagcctgctgctggagaaggaccagagcacgtgccacatggagccagggccagggaccttccacctcctaggtgtccagaagaagaccaaggacagaacagagactaggtttggtgagatgggacagattttgggaaagatcatgatgagccatcaaccgcagccccaggaagagcagagcccccagcggagcacctcagggtaccccctccaggaggtggtggatgatgaagtgtcgggaccatcagcccctggggtagatcccagccccccacgtaggtcccttggctggaaaaggaagagggaatgtttggatgaatctgatgatgagccagagaaggagctcgcccctgagcctgaggagacctgggtggcggagacgctgtgtggcctcaagatgaaggcgaagcgacggcgagtgtcgctcgtgctccctgagtactacgaggccttcaacaggctgcttgaggatcctgtcattaaaagactcctggcctgggacaaagatctgagggtgtcggacaagatcccatcggagcccaccatcctgggagcatcaccgaaaacccttcctccggcttctcggatttgcatccgaccttcgaatacccctccaccccgcaatttccacatgagcacagtcaccccaatgctgagctatctggccaatgacatggaggaggacgatgaggcccccaaacaaaacatcttctacttcctgtacgaggagacccgctctcatatacccttgctccgtgagctttggttccagttatgccgttacatgaacccgagggccaggaagaactgctctcagatagccttgttccggaagtatcggttccacttcttttgttccatgcgctgcagggcttgggtttccctggaggagttggaagagagaccaaaggccaatgagctaccgcagccaccagtcccggaacccgccaatgctgggaagcggaaagtgagggagttcaacttcgagaaatggaatgctcgcatcactgatctacgtaaacaagttgaagaattgtttgaaaggaaatatgctcaagccataaaagccaaaggtccggtgacgatcccgtaccctcttttccagtctcatgttgaagatctttatgtagaaggacttcctgaaggaattccttttagaaggccatctacttacggaattcctcgcctggagaggatattacttgcaaaggaaaggattcgttttgtgattaagaaacatgagcttctgaattcaacacgtgaagatttacagcttgataagccagcttcaggagcggaagccttggggagcactgaagccaaggctgtaccgtaccaaaaatttgaggcacacccgaatgatctgtacgtggaaggactgccagaaaacattcctttccgaagtccctcatggtatggaatcccaaggctggaaaaaatcattcaagtgggcaatcgaattaaatttgttattaaaagaccagaacttctgactcacagtaccactgaagttactcagccaagaacgaatacaccagtcaaagaagattggaatgtcagaattaccaagctacggaagcaagtggaagagatttttaatttgaaatttgctcaagctcttggactcaccgaggcagtaaaagtaccatatcctgtgtttgaatcaaacccggagttcttgtatgtggaaggcttgccagaggggattcccttccgaagccctacctggtttggaattccacgacttgaaaggatcgtccgcgggagtaataaaatcaagttcgttgttaaaaaacctgaactagttatttcctacttgcctcctgggatggctagtaaaataaacactaaagctttgcagtcccccaaaagaccacgaagtcctgggagtaattcaaaggttcctgaaattgaggtcaccgtggaaggccctaataacaacaatcctcaaacctcagctgttcgaaccccgacccagactaacggttctaacgttcccttcaagccacgagggagagagttttcctttgaggcctggaatgccaaaatcacggacctaaaacagaaagttgaaaatctcttcaatgagaaatgtggggaagctcttggccttaaacaagctgtgaaggtgccgttcgcgttatttgagtctttcccggaagacttttatgtggaaggcttacctgagggtgtgccattccgaagaccatcgacttttggcattccgaggctggagaagatactcagaaacaaagccaaaattaagttcatcattaaaaagcccgaaatgtttgagacggcgattaaggagagcacctcctctaagagccctcccagaaaaataaattcatcacccaatgttaatactactgcatcaggtgttgaagaccttaacatcattcaggtgacaattccagatgatgataatgaaagactctcgaaagttgaaaaagctagacagctaagagaacaagtgaatgacctctttagtcggaaatttggtgaagctattggtatgggttttcctgtgaaagttccctacaggaaaatcacaattaaccctggctgtgtggtagttgatggcatgcccccgggggtgtccttcaaagcccccagctacctggaaatcagctccatgagaaggatcttagactctgccgagtttatcaaattcacggtcattagagtcttcctgaaacacagctacacccgtattatccatggctgctttcctgtcacatgtaaagaactggccaagtccaaggcagaagtggcctgcatcgcagtgtacgaaacagacgtgtttgtcgtcggaaccgagagaggatgcgcttttgttaatgccaggacggattttcagaaagattttgcaaaatacttgcatttaaggcgcagcctggaagtgccagggagcactggaggccacccagtcatgggggacaccttcatccgtcacatcgccctgctgggctttgagaagcgcttcgtacccagccagcactatgtgtacatgttcctggtgaaatggcaggacctgtcggagaaggtggtctaccggcgcttcaccgagatctacgagttccataaaaccttaaaagaaatgttccctattgaggcaggggcgatcaatccagagaacaggatcatcccccacctcccagctcccaagtggtttgacgggcagcgggccgccgagaaccgccagggcacacttaccgagtactgcagcacgctcatgagcctgcccaccaagatctcccgctgtccccacctcctcgacttcttcaaggtgcgccctgatgacctcaagctccccacggacaaccagacaaaaaagccagagacatacttgatgcccaaagatggcaagagtaccgcgacagacatcaccggccccatcatcctgcagacgtaccgcgccattgccaactacgagaagacctcgggctccgagatggctctgtccacgggggacgtggtggaggtcgtagagaagagcgagagcggttggtggttctgtcagatgaaagcaaagcgaggctggatcccagcgtccttcctcgagcccctggacagtcctgacgagacggaagaccctgagcccaactatgcaggtgagccatacgtcgccatcaaggcctacactgctgtggagggggacgaggtgtccctgctcgagggtgaagctgttgaggtcattcacaagctcctggacggctggtgggtcatcaggaaagacgacgtcacaggctacttcccgtccatgtacctgcaaaagtcagggcaagacgtgtcccaggcccaacgccagatcaagcggggggcgccgcgcaggtcgtccatccgcaacgcgcacagcatccaccagcggtcgcggaagcgcctcagccaggacgcctatcgccgcaacagcgtccgttttctgcagcagcgacgccgccaggcgcggccgggaccgcagagccccgggagcccgctcgccggcgtgcccccgcggccgagcgccgacctcatcctgaaccgctgcagcgagagcaccaagcggaagctggcgtctgccgtctga

SEQ ID NO: 134871 - DNA, 3489 bp, Homo sapiens; identical to SEQ ID NO: 124940

SEQ ID NO: 134872 - DNA, 445 bp, Homo sapiens
gggcctcacggtgactccgcggaggcgattgtcactattttccttgcacggatgaagatgattgagtatgggcaggggcaatggacagtacccggactgcagctcacagccaggctttgccatcaaggacttacagccacgcctgtcacctctagcttgaaaaacatcttaacagaaatgtcattttattgttttgattccagaaacgactacagtggcaaaaagaacttactttttaacaacgaacttgattttattactcccgcggacgatcctttcaagtcgtggaattccaaaccaggtagggcttcggaagggaatcccctctggcaagccttccacatacaagaactccgggtttgattcaaacacaggatatggtacttttactgcctcggtgagtccaagagcttgagctgaaagtgcaagagaacgttaagttgcg

SEQ ID NO: 134873 - DNA, 499 bp, Homo sapiens
ttcccgttcgacgatttcgtgctttcctttgaggcctggaatgccaaaatcacggacctaaaacagatagttgaaaatctcttcaatgagaaatgtggtaagtctattttgaaaccttcttactgccacgcagggtgccttcatgggagtaggagggagcagagtgggatactgagcgttggagtatccctgtcattggcaacgtgtgggtttttcgggattgaatggcgtcatttcgcccatgttctgtttcgtgtacgcggctgttttgcaggggaagctcttggccttaaacaagctgtgaaggtgccgttcgcgttatttgagtctttcccggaagacttttatgtggaaggcttacctgagggtgtgccattccgaagaccatcgacttttggcattccgaggctggagaagatactcagaaacaaagccaaaattaagttcatcattaaaaagcccgaaatgtttgagacggcgattaaggagagcacctcct

SEQ ID NO: 134874 - DNA, 4140 bp, Homo sapiens
atgcccgacgatgatgagccaaaacggcacgtctatgaagttcatgattacgtagacaatcgaagcgacctgattgagtgcacaagtcattgcagattggatgaatatacactctccctgcgatatcctctctgggaatccagctgccaagctgtgagaagccctagccccatggagagaggcacccgtcaaccaggcttcagacacagagtaaagaagcttccaggcgaccccagcccccaggcatccaaatcaccgccagcattcaggtctttccaagctcagaggctcaggcaagagctacagatgctcatgaccgaatgtctcacctgggccaggaatggcagcagcaagcaccctctcagcctagcccagaagccagagttcctatttcatcagttgcaaagcagagacaatgccatctgcccgatagcagagcaaaaggcagtcctgagggtgcccgcgctcctgcatttcccgtgcaccgggctgccggtagctccggccgcccagcccccgcggcagcaacagcagcaacagcagcagcagcagcagcaccgggggagcccccccaggcggactacaagtcccggcagccgcgcgcggccgcgcatgcgcagcggggaccggcgtttgagtggcaagttgtttgttacagcgaacaccagctgctccccccgcgccgggcgccgcgcgccgctgctccgccgctcggcccctcggctgctgctctgccggcgctgcctccctcgccccgcggctcccccttgcaacttggcgggcctcctcccttttgtccggcccggcccggccgccgccgccccccgcgcccggcgccgagctcccgggtctccgggccggctgtcgggcgcggagggggcgggggccgcggctcgtccccccgcggatgagccgccgcggacggggcgcgggcggacgatggaactccacatcctggagcaccggctgcaagttgccagcgtcgccaaggagagtatcccgctgttcacctacggcctgatcaaacttgccttcctgtcctccaagaccagaaagcagcctgtcctgtcccaggcccaggaagccaccctggtgcctgatgatgattattctccaccgtctaagagaccaaaggccaatgagctaccgcagccaccagtcccggaacccgccaatgctgggaagcggaaagtgagggagttcaacttcgagaaatggaatgctcgcatcactgatctacgtaaacaagttgaagaattgtttgaaaggaaatatgcggaagccttggggagcactgaagccaaggctgtaccgtaccaaaaatttgaggcacacccgaatgatctgtacgtggaaggactgccagaaaacattcctttccgaagtccctcatggtatggaatcccaaggctggaaaaaatcattcaagtgggcaatcgaattaaatttgttattaaaagaccagaacttctgactcacagtaccactgaagttactcagccaagaacgaatacaccagtcaaagaagattggaatgtcagaattaccaagctacggaagcaagtggaagagatttttaatttgaaatttgctcaagctcttggactcaccgaggcagtaaaagtaccatatcctgtgtttgaatcaaacccggagttcttgtatgtggaaggcttgccagaggggattcccttccgaagccctacctggtttggaattccacgacttgaaaggatcgtccacgggagtaataaaatcaagttcgttgttaaaaaacctgaactagttatttcctacttgcctcctgggatggctagtaaaataaacactaaagctttgcagtcccccaaaagaccacgaagtcctgggagtaattcaaaggttcctgaaattgaggtcaccgtggaaggccctaataacaacaatcctcaaacctcagctgttcgaaccccgacccagactaacggttctaacgttcccttcaagccacgagggagagagttttcctttgaggcctggaatgccaaaatcacggacctaaaacagaaagttgaaaatctcttcaatgagaaatgtggggaagctcttggccttaaacaagctgtgaaggtgccgttcgcgttatttgagtctttcccggaagacttttatgtggaaggcttacctgagggtgtgccattccgaagaccatcgacttttggcattccgaggctggagaagatactcagaaacaaagccaaaattaagttcatcattaaaaagcccgaaatgtttgagacggcgattaaggagagcacctcctctaagagccctcccagaaaaataaattcatcacccaatgttaatactactgcatcaggtgttgaagaccttaacatcattcaggtgacaattccagatgatgataatgaaagactctcgaaagttgaaaaagctagacagctaagagaacaagtgaatgacctctttagtcggaaatttggtgaagctattggtatgggttttcctgtgaaagttccctacaggaaaatcacaattaaccctggctgtgtggtggttgatggcatgcccccgggggtgtccttcaaagcccccagctacctggaaatcagctccatgagaaggatcttagactctgccgagtttatcaaattcacggtcattagaagcaatagcagggcttgctgtggcatccgcttcctgcgggggctcaaggttgctcgttcctcaggctacataaagcagagatcaggtccggaccacgagctgaccctggactcaggcaaggtgcatttaaggcgcagcctggaagtgccagggagcactggaggccacccagtcatgggggacaccttcatccgtcacatcgccctgctgggctttgagaagcgcttcgtacccagccagcactatgacaactgcaaagatggtcctcaccccaatcctctgggcttcctccagtgggtagtgggatcctgggtgcacacagcaaagcctctttggaggctgaatggggtcccccgactctggctttcccccaggtacatgttcctggtgaaatggcaggacctgtcggagaaggtggtctaccggcgcttcaccgagatctacgagttccataaaaccttaaaagaaatgttccctattgaggcaggggcgatcaatccagagaacaggatcatcccccacctcccagctcccaagtggtttgacgggcagcgggccgccgagaaccaccagggcacacttaccgagtactgcggcacgctcatgagcctgcccaccaagatctcccgctgtccccacctccttgacttcttcaaggtgcgccctgatgacctcaagctccccacggacaaccagacaaaaaagccagagacatacttgatgcccaaagatggcaagagtaccgcgacagacatcaccggccccatcatcctgcagacgtaccgcgccattgccaactacgagaagacctcgggctccgagatggctctgtccacgggggacgtggtggaggtcgtggagaagagcgagagcggttggtggttctgtcagatgaaagcaaagcgaggctggatcccagcatccttcctcgagcccctggacagtcctgacgagacggaagaccctgagcccaactatgcaggtgagccatacgtcgccatcaaggcctacactgctgtggagggggacgaggtgtccctgctcgagggtgaagctgttgaggtaattcacaagctcctggacggctggtgggtcatcaggaaagacgacgtcacaggctacttcccgtccatgtacctgcaaaagtcagggcaagacgtgtcccaggcccaacgccagatcaagcggggggcgccgccccgcaggtcgtccatccgcaacgtgcacagcatccaccagcggtcgcggaagcgcctcagccaggacgcctatcgccgcaacagcgtccgttttctgcagcagcgacgccgccaggcgcggccgggaccgcagagccccgggagcccgctcgaggaggagcggcagacgcagcgctctaaaccgcagccggcggtgcccccgcggccgagcgccgacctcatcctgaaccgctgcagcgagagcaccaagcggaagctggcgtctgccgtctga

SEQ ID NO: 134875 - DNA, 4424 bp, Homo sapiens
cgcccccccgcttccccgcacgcgctctccagccgcggccgcccgcctgccgcggtcaccccggcctctgcctctgtcccccagtgatcggatcaaggcgctgagcgaggccctgcctgcggggcggccatgcggcggtgacaggagcgcgaccgacacgcacgggcccctcgccccctctcgcctcccgtccgctcgccagctcccctcagccgaggctgctccgcggcggccgcagcccgcgcgcggcccacactcgcctcccctcggcacccccggccccggagctgcctggaggcggccgcactcggggatcatggcccaagttgcaatgtccaccctccccgttgaagatgaggagtcctcggagagcaggatggtggtgacattcctcatgtcagctctcgagtccatgtgtaaagaactggccaagtccaaagccgaagtggcctgcattgcagtgtatgaaacagacgtgtttgtcgtcggaactgaaagaggacgtgcttttgtcaataccagaaaggattttcaaaaagattttgtaaaatattgtgttgaagaagaagaaaaagctgcagagatgcataaaatgaaatctacaacccaggcaaatcggatgagtgtagatgctgtagaaattgaaacactcagaaaaacagttgaggactatttctgcttttgctatgggaaagctttaggcaaatccacagtggtacctgtaccatatgagaagatgctgcgagaccagtcggctgtggtagtgcaggggcttccggaaggtgttgcctttaaacaccccgagaactatgatcttgcaaccctgaaatggattttggagaacaaagcagggatttcattcatcattaagagaccttttttagagccaaagaagcatgtaggtggtcgtgtgatggtaacagatgctgacaggtcaatactatctccaggtggaagttgtggccccatcaaagtgaaaactgaacccacagaagattctggcatttccctggaaatggcagctgtgacagtaaaggaagaatcagaagatcctgattattatcaatataacattcaaggaagccaccattcttcagagggcaatgaaggcacagaaatggaagtaccagcagaagattctactcaacatgtccctttcagaaacaagtgaggaccctgaagttgaggtgactattgaagatgatgattattctccaccgtctaagagaccaaaggccaatgagctaccgcagccaccagtcccggaacccgccaatgctgggaagcggaaagtgagggagttcaacttcgagaaatggaatgctcgcatcactgatctacgtaaacaagttgaagaattgtttgaaaggaaatatgctcaagccataaaagccaaaggtccggtgacgatcccgtaccctcttttccagtctcatgttgaagatctttatgtagaaggacttcctgaaggaattccttttagaaggccatctacttacggaattcctcgcctggagaggatattacttgcaaaggaaaggattcgttttgtgattaagaaacatgagcttctgaattcaacacgtgaagatttacagcttgataagccagcttcaggagtaaaggaagaatggtatgccagaatcactaaattaagaaagatggtggatcagcttttctgcaaaaaatttgcggaagccttggggagcactgaagccaaggctgtaccgtaccaaaaatttgaggcacacccgaatgatctgtacgtggaaggactgccagaaaacattcctttccgaagtccctcatggtatggaatcccaaggctggaaaaaatcattcaagtgggcaatcgaattaaatttgttattaaaagaccagaacttctgactcacagtaccactgaagttactcagccaagaacgaatacaccagtcaaggaagattggaatgtcagaattaccaagctacggaagcaagtggaagagatttttaatttgaaatttgctcaagctcttggactcaccgaggcagtaaaagtaccatatcctgtgtttgaatcaaacccggagttcttgtatgtggaaggcttgccagaggggattcccttccgaagccctacctggtttggaattccacgacttgaaaggatcgtccgcgggagtaataaaatcaagttcgttgttaaaaaacctgaactagttatttcctacttgcctcctgggatggctagtaaaataaacactaaagctttgcagtcccccaaaagaccacgaagtcctgggagtaattcaaaggttcctgaaattgaggtcaccgtggaaggccctaataacaacaatcctcaaacctcagctgttcgaaccccgacccagactaacggttctaacgttcccttcaagccacgagggagagagttttcctttgaggcctggaatgccaaaatcacggacctaaaacagaaagttgaaaatctcttcaatgagaaatgtggggaagctcttggccttaaacaagctgtgaaggtgccgttcgcgttatttgagtctttcccggaagacttttatgtggaaggcttacctgagggtgtgccattccgaagaccatcgacttttggcattccgaggctggagaagatactcagaaacaaagccaaaattaagttcatcattaaaaagcccgaaatgtttgagacggcgattaaggagagcacctcctctaagagccctcccagaaaaataaattcatcacccaatgttaatactactgcatcaggtgttgaagaccttaacatcattcaggtgacaattccagatgatgataatgaaagactctcgaaagttgaaaaagctagacagctaagagaacaagtgaatgacctctttagtcggaaatttggtgaagctattggtatgggttttcctgtgaaagttccctacaggaaaatcacaattaaccctggctgtgtggtggttgatggcatgcccccgggggtgtccttcaaagcccccagctacctggaaatcagctccatgagaaggatcttagactctgccgagtttatcaaattcacggtcattagaccatttccaggacttgtgattaataaccagctggttgatcagagtgagtcagaaggccccgtgatacaagaatcagctgaaccaagccagttggaagttccagccacagaagaaataaaagagactgatggaagctctcagatcaagcaagaaccagaccccacgtggtagacctcttccctcctaggcttaaagtatcagtggttgagaagagcttttcggacctgttactaccccaagctgtgtaatatacttgtataacagaaataccttctatacaaacctttttttctacttttagatagaaatgtctactttttcagcagttctgtgaattaaagagcagagtgactgtgggtctggaatggctggtgtacttgggaatgtactatcaggattttacagcaatgctgggaaatgacagggaaaatgacaggaatgaatctcaccagattttttatgtactcagcagagccttgagttacggtgtttattttccaatcaagtgaagatatctcctacttctcctactggaacatctcagcttctgcagtgaagaaaaattcctgtgatagttcagttctttagtttttctatttgaaaaaaaaaaatcatttaaatgatcctttgttcacggctctccttaatgactgagtgaacagttcctatctgtatatttgactaaaccttttcctaagctatctctcatggttcctatgtttttttatcataattaaaagcaaaaccatctggatcacctaacagtcagaggtcagtatctcagcgtgtgaattatagaggaaatacagagagaacctcttccacttttacttttcgtccaaataaaatgcatggtgtaccagaagttgaagatcgggttgaggattggggctagctcgatgacactaaggccccaacatcgcgggacctgctgtggcgcggattcttaggaacgctgttctagccggccccctctccaggggtcgcgtggccggcattatttcctagttcttcttgtaaccctgaggtgccagcgcggggagtgaggaggggtcagggggctaaggatgcaacctctgacgttctgcgccttcctaggagagtcttacatgtgttgagatttcacaagcaatgcgagttgtaaaataccagctctacaagaagctaggctctgtgacggcatagttttcagtagctttatcacaatattcacaatggagaattatatgacatggtagcagaaataggcccttttatgtgttgcttctattttacctcaaattgtagatatagggtaatcaataaaatccatccatgcctttcacacactaaaaagtcgga

SEQ ID NO: 134876 - DNA, 3610 bp, Homo sapiens
  misc_feature (1)...(3610): n = a,t,c or g
gcgccgggcgccgcgcgccgctgctccgccgctcggcccctcggctgctgctccgccggcgctgcctccctcgccccgcggctcccccttgcaacttggcgggcctcctcccttttgtccggcccggcccggccgccgccgccccccgcgcccggcgccgagctcccgggtctccgggccggctgtcngtgcccgcaagggcccggagggggcgggggccacngctcgtccccccgcggatgaaccgccgcggacggggcgcgggcggacgatggaactccacatcctggagcaccggctgcaagttgccagcgtcgccaaggagagtatcccgctgttcacctacggcctgatcaaacttgacttcctgtcctccaagaccagatgatgattattctccaccgtctaagagaccaaaggccaatgagctaccggagccaccagtcccggaacccgccaatgctgggaagcggaaagtgaggggagttcaacttcgagaaatggaatgctcgcatcactgatctacgtaaacaagttgaagaattgtttgaaaggaaatatgctcaagccataaaagccaaaggtccggtgacgatcccgtaccctcttttctagtctcatgttgaagatctttatgtagaaggacttcctgaaggaattccttttagaaggccatctacttacggaattcctcgcctggagaggatattacttgcaaagggaaaggattcgttttgtgattaagaaacatgagcttctgagttcaacacgtgaagatttacagcttgataagccagcttcaggagtaaaggaagaatggtatgccagaatcactaaattaagaaagatggtggatcagcttttctgcaaaaaatttgcggaagccttggggagcactgaagccaaggctgtaccgtaccaaaaatttgaggcacacccgaatgatctgtacgtggaaggactgccagaaaacattcctttccgaagtccctcatggtatggaatcccaaggctggaaaaaatcattcaagtgggcaatcgaattaaatttgttattaaaagaccagaacttctgactcacagtaccactgaagttactcagccaagaacgaatacaccagtcaaggaagattggaatgtcagaattaccaagctacggaagcaagtggaagagatttttaatttgaaatttgctcaagctcttggactcaccgaggcagtaaaagtaccatatcctgtgtttgaatcaaacccggagttcttgtatgtggaaggcttgccagaggggattcccttccgaagccctacctggtttggaattccacgacttgaaaggatcgtccacgggagtaataaaatcaagttcgttgttaaaaaacctgaactagttatttcctacttgcctcctgggatggctagtaaaataaacactaaagctttgcagtcccccaaaagaccacgaagtcctgggagtaattcaaaggttcctgaaattgaggtcaccgtggaaggccctaataacaacaatcctcaaacctcagctgttcgaaccccgacccagactaacggttctaacgttcccttcaagccacgagggagagagttttcctttgaggcctggaatgccaaaatcacggacctaaaacagaaagttgaaaatctcttcaatgagaaatgtggggaagctcttggccttaaacaagctgtgaaggtgccgttcgcgttatttgagtctttcccggaagacttttatgtggaaggcttacctgagggtgtgccattccgaagaccatcgacttttggcattccgaggctggagaagatactcagaaacaaagccaaaattaagttcatcattaaaaagcccgaaatgtttgagacggcgattaaggagagcacctcctctaagagccctcccagaaaaataaattcatcacccaatgttaatactactgcatcaggtgttgaagaccttaacatcattcaggtgacaattccagatgatgataatgaaagactctcgaaagttgaaaaagctagacagctaagagaacaagtgaatgacctctttagtcggaaatttggtgaagctattggtatgggttttcctgtgaaagttccctacaggaaaatcacaattaaccctggctgtgtggtggttgatggcatgcccccgggggtgtccttcaaagcccccagctacctggaaatcagctccatgagaaggatcttagactctgccgagtttatcaaatttacggtcattagaccatttccaggacttgtgattaataaccagctggttgatcagagtgagtcagaaggccccgtgatacaagaatcagctgaaccaagccagttggaagttccagccacagaagaaataaaagagactgatggaagctctcagatcaagcaagaaccagaccccacgtggtagacctcttccctcctaggcttaaagtatcagtggttgagaagagcttttcggacctgttactaccccaagctgtgtaatatacttgtataacagaaataccttctatacaaacctttttttctacttttagatagaaatgtctactttttcagcagttctgtgaattaaagagcagagtgactgtgggtctggaatggctggtgtacttgggaatgtactatcaggattttacagcaatgctgggaaatgacagggaaaatgacaggaatgaatctcaccagattttttatgtactcagcagagccttgagttacggtgtttattttccaatcaagtgaagatatctcctacttctcctactggaacatctcagcttctgcagtgaagaaaaattcctgtgatagttcagttctttagtttttctatttgaaaaaaaaaaatcatttaaatgatcctttgttcacggctctccttaatgactgagtgaacagttcctatctgtatatttgactaaaccttttcctaagctatctctcatggttcctatgtttttttatcataattaaaagcaaaaccatctggatcacctaacagtcagaggtcagtatctcagcgtgtgaattatagaggaaatacagagagaacctcttccacttttacttttcgtccaaataaaatgcatggtgtaccagaagttgaagatcgggttgaggattggggctagctcgatgacactaaggccccaacatcgcgggacctgctgtggcgcggattcttaggaacgctgttctagccggccccctctccaggggtcgcgtggccggcattatttcctagttcttcttgtaaccctgaggtgccagcgcggggagtgaggaggggtcagggggctaaggatgcaacctctgacgttctgcgccttcctaggagagtcttacatgtgttgagatttcacaagcaatgcgagttgtaaaataccagctctacaagaagctaggctctgtgacggcatagttttcagtagctttatcacaatattcacaatggagaattatatgacatggtagcagaaataggcccttttatgtgttgcttctattttacctcaaattgtagatatagggtaatcaataaaatccatccatgcctttcacacactaaaaagtcgga

SEQ ID NO: 134877 - DNA, 4523 bp, Homo sapiens
tccgactttttagtgtgtgaaaggcatggatggattttattgattaccctatatctacaatttgaggtaaaatagaagcaacacataaaagggcctatttctgctaccatgtcatataattctccattgtgaatattgtgataaagctactgaaaactatgccgtcacagagcctagcttcttgtagagctggtattttacaactcgcattgcttgtgaaatctcaacacatgtaagactctcctaggaaggcgcagaacgtcagaggttgcatccttagccccctgacccctcctcactccccgcgctggcacctcagggttacaagaagaactaggaaataatgccggccacgcgacccctggagagggggccggctagaacagcgttcctaagaatccgcgccacagcaggtcccgcgatgttggggccttagtgtcatcgagctagccccaatcctcaacccgatcttcaacttctggtacaccatgcattttatttggacgaaaagtaaaagtggaagaggttctctctgtatttcctctataattcacacgctgagatactgacctctgactgttaggtgatccagatggttttgcttttaattatgataaaaaaacataggaaccatgagagatagcttaggaaaaggtttagtcaaatatacagataggaactgttcactcagtcattaaggagagccgtgaacaaaggatcatttaaatgcattttttttttttcaaatagaaaaactaaagtaactgaactatcacaggaatttttcttcactgcagaagctgagatgttccagtaggagaagtaggagatatcttcacttgattggaaaataaacacccgtaactcaaggctctgctgagtacataaaaaatctggtgaggattcattcctgtcattttccctgtcatttcccaggcattgctgttaaaatcctggataggtacattcccaaggtacaccaggccattccaggacccacagttcactctggctcttttaatttcacaggaactgtctggaaaaaggtaggacattttctatcttaaaaggtaggaaaaaaagggtttgtataggaagggtatttcctgttatacaaggtattattacacaggcttggggggtaggtaacagggtccgaaaaggctctttttcaaccactggattactttaagcctaggagggaagaggtctaccacgtggggtctggttcttgcttgatctgagagcttccatcagtctcttttatttcttctgtggctggaacttccaactggcttggttcagctgattcttgtatcacggggccttctgactcactctgatcaaccagctggttattaatcacaagtcctggaaatggtctaatgaccgtgaatttgataaactcggcagagtctaagatccttctcatggagctgatttccaggtagctgggggctttgaaggacacccccgggggcatgccatcaaccaccacacagccagggttaattgtgattttcctgtagggaactttcacaggaaaacccataccaatagcttcaccaaatttccgactaaagaggtcattcacttgttctcttagctgtctagctttttcaactttcgagagtctttcattatcatcatctggaattgtcacctgaatgatgttaaggtcttcaacacctgatgcagtagtattaacattgggtgatgaatttatttttctgggagggctcttagaggaggtgctctccttaatcgccgtctcaaacatttcgggctttttaatgatgaacttaattttggctttgtttctgagtatcttctccagcctcggaatgccaaaagtcgatggtcttcggaatggcacaccctcaggtaagccttccacataaaagtcttccgggaaagactcaaataacgcgaacggcaccttcacagcttgtttaaggccaagagcttccccacatttctcattgaagagattttcaactttctgttttaggtccgtgattttggcattccaggcctcaaaggaaaactctctccctcgtggcttgaagggaacgttagaaccgttagtctgggtcggggttcgaacagctgaggtttgaggattgttgttattagggccttccacggtgacctcaatttcaggaacctttgaattactcccaggacttcgtggtcttttgggggactgcaaagctttagtgtttattttactagccatcccaggaggcaagtaggaaataactagttcaggttttttaacaacgaacttgattttattactcccgcggacgatcctttcaagtcgtggaattccaaaccaggtagggcttcggaagggaatcccctctggcaagccttccacatacaagaactccgggtttgattcaaacacaggatatggtacttttactgcctcggtgagtccaagagcttgagcaaatttcaaattaaaaatctcttccacttgcttccgtagcttggtaattctgacattccaatcttccttgactggtgtattcgttcttggctgagtaacttcagtggtactgtgagtcagaagttctggtcttttaataacaaatttaattcgattgcccacttgaatgattttttccagccttgggattccataccatgagggacttcggaaaggaatgttttctggcagtccttccacgtacagatcattcgggtgtgcctcaaatttttggtacggtacagccttggcttcagtgctccccaaggcttccgcaaattttttgcagaaaagctgatccaccatctttcttaatttagtgattctggcataccattcttcctttactcctgaagctggcttatcaagctgtaaatcttcacgtgttgaattcagaagctcatgtttcttaatcacaaaacgaatcctttcctttgcaagtaatatcctctccaggcgaggaattccgtaagtagatggccttctaaaaggaattccttcaggaagtccttctacataaagatcttcaacatgagactggaaaagagggtacgggatcgtcaccggacctttggcttttatggcttgagcatatttcctttcaaacaattcttcaacttgtttacgtagatcagtgatgcgagcattccatttctcgaagttgaactccctcactttccgcttcccagcattggcgggttccgggactggtggctgcggtagctcattggcctttggtctcttagacggtggagaataatcatcatcttcaatagtcacctcaacttcagggtcctcacttgtttctgaagggacatgttgagtagaatcttctgctggtacttccatttctgtgccttcattgccctctgaagaatggtggcttccttgcaaaggcttcgataggggctgtttttcatcaacatcatcagtttcagaagggcctgcttgaatgttatattgataataatcaggatcttctgattcttcctttactgtcacagctgccatttccagggaaatgccagaatcttctgtgggttcagttttcactttgatggggccacaacttccacctggagatagtattgacctgtcagcatctgttaccatcacacgaccacctacatgcttctttggctctaaaaaaggtctcttaatgatgaatgaaatccctgctttgttctccaaaatccatttcagggttgcaagatcatagttctcggggtgtttaaaggcaacaccttccggaagcccctgcactaccacagccgactggtctcgcagcatcttctcatatggtacaggtaccactgtggatttgcctaaagctttcccatagcaaaagcagaaatagtcctcaactgtttttctgagtgtttcaatttctacagcatctacactcatccgatttgcctgggttgtagatttcattttatgcatctctgcagctttttcttcttcttcaacacaatattttacaaaatctttttgaaaatcctttctggtattgacaaaagcacgtcctctttcagttccgacgacaaacacgtctgtttcatacactgcaatgcaggccacttcggctttggacttggccagttctttacacatggactcgagagctgacatgaggaatgtcaccaccatcctgctctccgaggactcctcatcttcaacggggagggtggacattgcaacttgggccatgatccccgagtgcggccgcctccaggcagctccggggccgggggtgccgaggggaggcgagtgtgggccgcgcgcgggctgcggccgccgcggagcagcctcggctgaggggagctggcgagcggacgggaggcgagagggggcgaggggcccgtgcgtgtcggtcgcgctcctgtcaccgccgcatggccgccccgcaggcagggcctcgctcagcgccttgatccgatcactgggggacagaggcagaggccggggtgaccgcggcaggcgggcggccgcggctggagagcgcgtgcggggaagcgggggggcg

SEQ ID NO: 134878 - DNA, 4307 bp, Homo sapiens
ctgtctcccaagctggagtgcagtggtgtggtcataggtcactgcagcgtcgaactcctaggctcaagtgatcctcttgcctcaggctcctgagtagctgggacaacaggcgtgtaccacacctggatactttttaaatttttggtagagaagggatctcactctattgccaagctggtgtcgaactcttggtcttaagcagccctcccacgtcagcatcccaaagtgttgggatttcagagggatcatggcccaagttgcaatgtccaccctccccgttgaagatgaggagtcctcggagagcaggatggtggtgacattcctcatgtcagctctcgagtccatgtgtaaagaactggccaagtccaaagccgaagtggcctgcattgcagtgtatgaaacagacgtgtttgtcgtcggaactgaaagaagacgtgcttttgtcaataccagaaaggattttcaaaaagattttgtaaaatattgtgttgaagaagaagaaaaagctgcagagatgcataaaaatgaaatctacaacccaggcaaatcggatgagtgtagatgctgtagaaattgaaacactcagaaaaacagttgaggactatttctgcttttgctatggggaaagctttaggcaaatccacagtgggtacctggtaccatatgagaagatgctgccgagaccagtcggctgtgggtagtgcaggggcttccggaaggtgttgcctttaaacaccccgagaactatgatcttgcaaccctgaaatggattttggagaacaaagcagggatttcattcatcattaagagttgtggccccatcaaagtgaaaactgaacccacagaagattctggcatttccctggaaatggcagctgtgacagtaaaggaagaatcagaagatcctgattattatcaatataacattcaaggcccttctgaaactgatgatgttgatgaaaaacagcccctatcgaagcctttgcaaggaagccaccattcttcagagggcaatgaaggcacagaaatggaagtaccagcagaagatgatgattattctccaccgtctaagagaccaaaggccaatgagctaccgcagccaccagtcccggaacccgccaatgctgggaagcggaaagtgagggagttcaacttcgagaaatggaatgctcgcatcactgatctacgtaaacaagttgaagaattgtttgaaaggaaatatgctcaagccataaaagccaaaggtccggtgacgatcccgtaccctcttttccagtctcatgttgaagatctttatgtagaaggacttcctgaaggaattccttttagaaggccatctacttacggaattcctcgcctggagaggatattacttgcaaaggaaaggattcgttttgtgattaagaaacatgagcttctggaattcaacacgtgaagatttacagcttgataagccagcttcaggagcggaagccttggggagcactgaagccaaggctgtaccgtaccaaaaatttgaggcacacccgaatgatctgtacgtggaaggactgccagaaaacattcctttccgaagtccctcatggtatggaatcccaaggctggaaaaaatcattcaagtgggcaatcgaattaaatttgttattaaaagcttgaggagctccgcagtgatggatggcagcacattcttcattggcttctccagtaattggaagatgcaaggacctggccagcaacaagtcaaagaagattggaatgtcagaattaccaagctacggaagcaagtggaagagatttttaatttgaaatttgctcaagctcttggactcaccgaggcagtaaaagtaccatatcctgtgtttgaatcaaacccggagttcttgtatgtggaaggcttgccagaggggattcccttccgaagccctacctggtttggaattccacgacttgaaaggatcgtccgcgggagtaataaaatcaagttcgttgttaaaaaacctgaactagttatttcctacttgcctccctgggatggctaggtaaaataaacactaaagctttgcagtcccccaaaagaccacggaagtcctggggagtaattcaaaggttcctgaaattaagggtcaccgtggaaggccctaataacaacaatcctcaaacctcagcttgttcgaaccccgacccagacttaacggttcttaacgttccctttcaagccacggagggaggagagttttcctttgaaggcctgggaatgccaaaatcacgggaccttaaaacaggaaagtttgaaaatcttctttcaattgaggaaatttggggggaagctttttggcctttaaacaagctgttgaagggtgcccgttcgcgttatttggagtctttccccggaaggactttttatgtgggaaggctttacctgaggggtgttgccctttccgaaggacccattcgactttttgggcatttccgagggttggagaagatattcaggaaacaaaggccaaaattaaggttcatcatttaaaaagcccgaaatgtttgagacggcgattaaggagagcacctccttttaaggagccctcccagaaaaaataaattcatcacccaatgttaatactactgcatcaggtgttgaaggacctttaacatcatttcagggtgacaattccaggatggatggataatggaaaggactcttcggaaagttggaaaaaggctaggacagctaaggaggaacaagtggaatggacctctttagttcgggaatttgggtggaagctattggtatgggttttcctgtgaaagttccctacaggaaaatcacaattaaccctggctgtgtggtggttgatggcatgcccccgggggtgtccttcaaagcccccagctacctggaaatcagctccatgagaaggatcttagactctgccgagtttatcaaattcacggtcattagaagcaatagcagggcttgctgtggcatccgcttcctgcgggggctcaaggttgctcgttcctcaggctacataaagcagagatcaggtccggaccatgagctgaccctggactcaggcaaggtgcatttaaggcgcagcctggaagtgccagggagcactggaggccacccagtcatgggggacaccttcatccgtcacatcgccctgctgggctttgagaagcgcttcgtacccagccagcactatgtgtacatgttcctggtgaaatggcaggacctgtcggagaaggtggtctaccggcgcttcaccgagatctacgagttccataaaaccttaaaagaaatgttccctattgaggcaggggcgatcaatccagagaacaggatcatcccccacctcccagctcccaagtggtttgacgggcagcgggccgccgagaaccgccagggcacacttaccgagtactgcagcacgctcatgagcctgcccaccaagatctcccgctgtccccacctcctcgacttcttcaaggtgcgccctgatgacctcaagctccccacggacaaccagacaaaaaagccagagacatacttgatgcccaaagatggcaagagtaccgcgacagacatcaccggccccatcatcctgcagacgtaccgcgccattgccaactacgagaagacctcgggctccgagatggctctgtccacgggggacgtggtggaggtcgtagagaagagcgagagcggttggtggttctgtcagatgaaagcaaagcgaggctggatcccagcgtccttcctcgagcccctggacagtcctgacgagacggaagaccctgagcccaactatgcaggtgagccatacgtcgccatcaaggcctacactgctgtggagggggacgaggtgtccctgctcgagggtgaagctgttgaggtcattcacaagctcctggacggctggtgggtcatcaggaaagacgacgtcacaggctacttcccgtccatgtacctgcaaaagtcagggcaagacgtgtcccaggcccaacgccagatcaagcggggggcgccgccccgcaggtcgtccatccgcaacgcgcacagcatccaccagcggtcgcggaagcgcctcagccaggacgcctatcgccgcaacagcgtccgttttctgcagcagcgacgccgccaggcgcggccgggaccgcagagccccgggagcccgctcgaggaggagcggcagacgcagcgctctaaaccgcagccggcggtgcccccgcggccgagcgccgacctcatcctgaaccgctgcagcgagagcaccaagcggaagctggcgtctgccgtctga

SEQ ID NO: 134879 - DNA, 4827 bp, Homo sapiens
  misc_feature (1)...(4827): n = a,t,c or g
ggggagagatgagggcgcgcaaaaacaaaaaaatagtgtcccgccgcggggagggagatagtttatttatataggggaggccccccacaacggtatggtttttttttactaactgccatatacagacataatgaggatacatataacctttcttcaaagtttgtgttttttttggttcccttttttttttttagtgtgtgaaaatgcatggatggattttattgattaccctatatcttacaactttaaaaggtaaaatagaagcacacacataaaagggcctattttttgcttaccatgtcatatatattctccattgtgaatattgtgataaagctactgaaaactatgcccgtcacagagacctagacttcttgtaggagctgggtatttttacaactccgcattggcttgtggaaaatctcaaacaacatgtaaggactctccctagggaagggcgcagcnccgcccggcaggttgcatcccttaggccccctgaccccctccctcacttccccgcgctgggcaccctccaggggttacaaggaaggaactaagggaaaataaatggccgggccacggcggaccccccttgggaagaagggggggcccgggctaagaaacaagcggttccctaaggaatcccgcggccaacagcagggtncccgcgatgttgggggccttaagtggtcattcgagctttagcccccaatccctcaacccgatctttcaactttctgggtacacccatggcattttatttgggacggaaaagtaaaaagtgggaagaaggttcctcccctgtatttccctcctataattccacacgcctgagatactggacctctgaactgttaggtggatcccagatggttttgccttttaattatgaataaaaaaaacatagggaaccatgagagatagccttaggaaaaaggttttagtcaaaataatacagaatagggacctagttcactcagtcattaaggagagccgtgaacaaaggatcatttaaatgatttttttttttttcaaataggaaaaactaaagaactgaactatcacaggaatctcttcttcactgcagaagctgaggatgttccagtagggaggaagtagggagatatcttccacttgattgggaaaataaacaccgtaaactcaagggctctgctgcggtacataaaaaatctgggtgaggattcattcctggtcattttccctgtccatttccccaggcattgctggttaaaatcctggataggtacattccccaagttacacccagccatttccagacccaaaagtcaactctggctcttttaattcacagaactggctggaaaaaagtaggacatttccaatcctaaaaagtaggaaaaaaaaggtttgtatagaaggtatttctgttataccaaggtatattacacagcttgggggtagtaacaggtccgaaaagctctttcttcaaccactggatacttttaagcctaggagggaagaggtcctacccacgtggggtctggttcttgccttgatctgagagcttcccatcagtctcttttatttcttctgtggctggaacttcccaactggccttggttccagctgaatacttgtatcaacggggccttttgactcactctggatcaaaccagctggttaattaatcacaagtccctggaaatggtctaatgaccgtgaaatttgataaactcggccagagtcataagatccttctcatggcagtctgattttccaggtaagctgggggctttgaaaggacacccccggggggcatgccgagtcgaccaccacgcagccaggggttaattgtgattttcctgtaggggaactttcacaggaaaacccataccaaatagcttcaccaaaatttccgacttaaagaggtcattaacttggtcctcttaagctggctagctttttcaactttcgaagagcctttcattatcatcatctgggaattgtcacctgaatgatgttaaggtcttcaacacctgatgcagtagtattaacattgggtgatgaatttatttttctgggagggctcttagaggaggtgctctccttaatcgccgtctcaaacatttcgggctttttaatgatgaacttaattttggctttgtttctgagtatcttctccagcctcggaatgccaaaagtcgatggtcttcggaatggcacaccctcaggtaagccttccacataaaagtcttccgggaaagactcaaataacgcgaacggcaccttcacagcttgtttaaggccaagagcttccccacatttctcattgaagagattttcaactttctgttttaggtccgtgattttggcattccaggcctcaaaggaaaactctctccctcgtggcttgaagggaacgttagaaccgttagtctgggtcggggttcgaacagctgaggtttgaggattgttgttattagggccttcccacggtgacctcaaatttcaggaaacctttgaaantaactccccggacttccgtggtcttttgggggactgcaaagctttagtgtttattttaactagccatccccaggaggcaagtaggaaataactagttcaggttttttaacaacgaacttgattttattactcccgcggacgatcctttcaagtcgtggaattccaaaccaggtagggcttcggaagggaatcccctctggcaagccttccacatacaagaactccgggtttgattcaaacacaggatatggtacttttactgcctcggtgagtccaagagcttgagcaaatttcaaattaaaaatctcttccacttgcttccgtagcttggtaattctgacattccaatcttctttgactggtgtattcgttcttggctgagtaacttcagtggtactggtgagtcagaaagttctggtcttttaattaacaaatttaaatccgattgcccacttgaatgattttttcccagccttgggattccatacccatgagggacttcggaaaggaatgttttctggcagtccttccacgtacagatcattcggggtgtgcctcaaatttttggtacggtacagccttggctttcagtgctccccaaggggttccgcaaattttttgcagaaaagctgatccaccatctttcttaaatttagtgattctgggcataccattcttcctttactcctgaagctggcttatcaagctgtaaatcttcacgtgttgaattcagaagctcatgtttcttaatcacaaaacgaatcctttcctttgcaagtaatatcctctccaggcgaggaattccgtaagtagatggccttctaaaaggaattccttcaggaagtccttctacataaagatcttcaacatgagactggaaaagagggtacgggatcgtcaccggacctttggcttttatggcttgagcatatttcctttcaaacaattcttcaacttgtttacgtagatcagtgatgcgagcattccatttctcgaagttgaactccctcactttccgcttcccagcattggcgggttccgggactggtggctgcggtagctcattggcctttggtctcttagacggtggagaataatcatcatcttctgctggtacttccatttctgtgccttcattgccctctgaagaatggtggcttccttgaatgttatattgataataatcaggatcttctgattcttcctttactgtcacagctgccatttccagggaaatgccagaatcttctgtgggttcagttttcactttgatggggccacaacttccacctgggagatagtattgacctgtcagcatctgttaccatcacacgaccacctacatgcttctttgggctctaaaaaaggtctcttaatgatgaatgaaatccctgctttgttctccaaaatccatttcaggggttgcaagatcatagttctcgggggtgtttaaggccaacacctttcggaaagactctggcacacacacaaccgactgatctcgcagcatcttctcaaatggaacaggtaccactgtggatttgccctaaagcctttccccatagcaaaagcagaaatagtcctcgaactgtttttcctgaagtgtttcaaatttcctacagcatcctacactcatccgatttgccctgggttgtagatctcactcttacgcatctctgcagctcctctctctctctcccccacacaatatttcacaaaatctttttgaaactcctttctggtattgacaaaagcacgtcctctttcagttccgaccacaaacacctctgtttcataccactccaatgcaggccacttcggctttggacttggccagttcgtttacacatggactcgagagctgacatgaggaatgctcaccaccatcctgctctcaggaggactcctcatcttcaacggggagggtggacattgcaacttgggccatgatccaccgagtgcggccgcctccaggcagctccggggccgggggtgccgaggggaggcgagtgtgggccgcgcgcgggctgcggccgccgcggagcagcctcggctgaggggagctggcgagcggacgggaggcgagagggggcgaggggcccgtgcgtgtcggtcgcgctcctgtcaccgccgcatggccgccccgcaggcagggcctcgctcagcgccttgatccgatcactgggggacagaggcagaggccggggtgaccgcggcaggcgggcggccgcggctggagagcgcgtgcggggaagcgggggggcgaccggtggccccttttctctgctctcccagcttctctctcaccctcctcctcct

SEQ ID NO: 134880 - DNA, 467 bp, Homo sapiens
ttgggcttaggacatcttcaattatcatcttggtgttgtaatattggcctcctttgtacatgttgtccacaaaccgcacacgcaggtccctgtgcaaccagtgctgacttctgggggctgctttctcactgttggctgcaggcccatcctgtctgtggagaaggtgccagcaccaggcttagctcttcatcagatgctctttccagttgccctcccttagcctatgctatgaaacccacccacaatgcagttccccgttccttctatgagcccgccttgccttggaagccttccctggctgctcgagcctacccacagccctgccttcttgacccctcccgcatgctcagagtcccaccagtctggaaggaagtttccgcttcctctctgagttgtcctgctggatgtagagttcttgattccagagggtcttccgtgatgaggcacgaaatcgtcgacccgggaat

SEQ ID NO: 134881 - DNA, 1987 bp, Homo sapiens
ggcccctagcgatctgaacccaaactaaatttcccagcaagcagcgcgccggcctgggaaaaggagcaagatggctgactccaaagagggtgttttgccgctgacggctgcttccactgccccaatttcattcggcttcactcgcacgtccgcacggaggcggctggccgactcggctctgaatgaaggagtgtgacccactgaccctgccattctcccaaccccacccctctgtgtccacatcagtgtgaagccccaggaggcccccaaggaactcgtcatccctttgatccagaatggccatcgcaggcagccaccagcccggcccccttgaaggaagaagaggaagaaggtggaaggatagagtgggacttcattgctccctcctattcttcctttagaatccaagaagtctctggaagagagagagaatgcgggtgtcgaccccacgctcgccccgggcagagacagtgagctggccccttgtccccctcctgccccagcctttctttgccctgtccgccaggctgtgtccctgcacgtagcagggaaagtctgtgtgtgtgctagaggccccaagtgcacttcaaatagaagacccagtgtaagcaaagcctgaccctccttcctctacctgaacctgtaggtgccagaggaggctaattatgaggcggtccccgtggaggggaagaggaagtaaataaggtgttgaagactgttgcatcctctccaacaaacccatattcctccctgcagagtagtgaagccccgtgtcaactcactgaggcccaaggggttagggctgggtgccaacctgaccgaggcccaggccttgacccccactggcccctcccgcatgccaagaccagatgaggagcaagagaaagataaggaagatcagacatcttggtcctaggaatgtgggtggagtccacaacccctacctgacttcttcccctcaacactttaggtggaaggccttgatcctgacaatgttcgggccatggttcgtctggctgtggggagccgggtgactgaggctctgtcctggttctcctcataacctcttgaacaggccagatgagcaaaacttccttccccagggcaacagaacggaactgcctcatcacggaagaggcaaagggagggcaactggaaagtgcatctgatgaagagctaagcctggtgctggcaccttctccacagacaggatgggcctgcagccaagagtgagaaagcagcccccagaagtcagcactgcctccctctcctagggactgggcccccctacctctctaaaatctcacatccccctgacctgtatccccaggcccttctgacaggacgctggttgggctggtccttgctgtgggcctcactcccctctcccttatccataggcctgagggaagacatttgtgggtcgttcagggcctgtcccaggatctaggcttgccttgctgattccacttcacctctgttccaggtgggacatttgctgagccgggacagagcacggagccgggctttggtgcaactgcccaagagaaaatcaaggtggtggagcttcactacgatgccatctgcccagtacatgggccctagtgacacagatgatgacttgacccatgggactcctcccatcccccagggtggttaccagttctgtaccatatgagaaagttgccttcagaaggtgggaagatcattgttccatcctctacttctggtgcagtcctgggacaaggacaagggaaagggatgggtgaaccagtagggaagctagaaacaaaccacaatattaaccaaaatatagaatataataaaaaccatttcaagtacttaatagaaagatgaaatcataagtggtatgatgagctgcgagttaaggtgggaactgagttgactgaggtgggaaccatttcacttttaagccttgcttttctgctcagggtacaggacaagttaaaggactcatttgattgtg

SEQ ID NO: 134882 - DNA, 1107 bp, Homo sapiens
atggaggcacttgccatgaaccaccagctcaaggattctatgcatacttcaaagataaagaaaaagcgaagaaaaaagaaaccttcagtgccccagagtcaccttactttgtctactgagtataatattaatccattgttaattataccatccgcagcccttaacagttacagcaagtacgagatacactcagagggaatcacaacaaagtcaacaaaaatcatgtatcaagaggagagggggaaaaagctttcagagaaatattgcaatagtgtctttctcttcctattatattttatacggaacggctggaccactgtggctggagcagaatgtgcaatgtgttcgaggatggaggaaatgacatcaaataaaacagagctgggaccagacctgggccttggtgtccactttaagggctttgacatttattccaacttggttccagtgtcagaagcaagcataatcattgctgtgtcctcagcccacagagctgcatctcttgaagctgtgagctatgccattgatactttaaaagccaaggtgcccatgatggtaaaagatataatgcaacagccaacacccaccccttatctccaatggggacaggcggaagctcgatggcaagccagagtgacactgaactgtgaaggacacgataaatacaccctccactccagagtgcatgtatctcatgaacaatctcttgatatactcacaacatcgcagcacaacacgggcaccaaatcagcaatgaaacatcaagatacagtggaggtattgccactttcacgtacatgcccatcccctctcaccactatggtaccaagcaccacacctaaagctgtctttgtctttatccaacaaaaaaggaagaacagaagtgacagtgattctactggaactgggttcccttcacaaactggcaaaaccccagataatgtagcagcaaccggaaaaccgagtcggacggtacgccatctcaagtccctgtcaaagaaatatatcgcaaagggaaaccgtaggaccttacaaggagtcagaagtgagtctctcactccacatatttataaggaaagctcacagccggatatgagacatgcttga

SEQ ID NO: 134883 - DNA, 1778 bp, Homo sapiens
ttttttttttttttttttaaacttttggaaaatccaggggttttaagtttaattattttttaatcatatttcctgaaaatgttataatatccaagactgtcctgataatgcttttttaatactttcccagttctgcccaacattcctgtcatgcatcccttaataacaatgctcatcccagaaccgggatgggggggcggtgaggtggggttggtggggggagtaccgtttctgagctagttaaaggtcactgaggagggcccatacctcaatgtgtgtggagttaccaattaggaaattagtccatggaaggaccatgtctacccacagatatcttttcctcacaatttaaaattattccatttcttcctaccagtcctcctttctatcttttagttccattttaaaataacccttgcatcctacatacccatttatcttggcttcctttttctcccttttggtcccactaggtataggggattgtggcttcggtaaactatcctgatgtggagagaaaaaaatcaaaatgtgatcaataataatagtttaacaaagttaagattgcatgctctaaaaacataagtgattaactggttggatgcccaaaagcactctttgtttcctttccaagttgatgactcttccgtatatttccttttttcccatatgggcacccttggccttttaaaggtatcaaagggcaatagctcaacagcttcaaagagatgccagctctgtgggctggaggacacagcaaatgattatggcttggcttctgacactggaaccaagccaagtctatggaacactgctatgtgtttgactggccatttctgcctaatgtcactacaaatctttctgacttcattttccgccatgggtagatatgcttcatattcgtaagctaatgacttttttccccttcaaaggtattttctgtaaggcccttccaattggggatattgcaccacaagagcggagaaatcaccaaactgtgagacttcatctactgaaaagtttctcggcagtaaagtttataacatctttagatttctcttcaacttcatcccatatctttcctagatgggctcaaaaagcactatcctccactaatgggggggataacggcaatttcgtctcccaggctgaagcacgaggagctgatctccaagctcgacatattcttgacgaacagcaaatattatctgatttctaacatcagccaactccaggatgtcgagtttctatctccttccacagctgcaacgcttttatttcttgaggcacagaaatggtctctgaacgaactcctgttatttcagcactttttgcaaaatacaatacttcaacctgtatccgtgcaaacaactctttacgaaataattacaggtttgcaaatgatcaagggtgtagaaatccacagatgaagcacagttcttcacaagaattctccatgaggtgcatttctttttagattaaaattttagcttcatcaaaacgaataatctgggaaagaggtggtcataaaagtgtgtgggcgccttcacaacgagtccgtccttgctgccgtgagctgacaagagttctcggagaggacccgacttctgctggggcagtcgcagtaaagcccggagacaggaagggcccgggggcgggggcgggggcgcccccgaacccaagacgccggccaggttgggggctagtggggaggtccgactgaccaaggccaggcccgcacgcacacccgccacccttacctggcacagcggcaccat

SEQ ID NO: 134884 - DNA, 2460 bp, Homo sapiens
atgagtcagctgaggctgctgccgtcccgtcttggggtacaggctgcgaggctcctggctgcacatgacgtcccggtgtttggctggcgcagcaggtcctccgggccaccggccaccttcccaagcagcaaaggtggaggcggctccagttacatggaggagatgtacttcgcctggttggaaaacccccagagtgtccacaagtcctgggacagcttcttcagggaagccagcgaggaagccttttctggctctgctcagccacggcccccttctgttgtccatgagagcaggtctgcagtctcaagtcggaccaagaccagcaaattggtggaggaccacctggctgtgcagtccctgatccgggcctaccagatccggggtcaccatgtggcccagctggaccccctgggcattctggatgcagacctggactcctttgtgccctcagacttgatcacaaccattgataaactgggttggacccagagggagggcactggggagactgggaggtctgccttctatgaccttcaggaggctgaccttgataaggagttccagctgccgacaaccaccttcattgggggctctgaaaacaccctttctctgcgggagatcattcggcgcctggagaacacctactgccagcacattggcctggagttcatgttcatcaacgatgtggagcagtgccagtggatccggcagaagtttgagacccctggtgtgatgcagttctccagcgaggagaagcggaccctgctggcccggctagtgcgctccatgagcaggtttgaagacttcctggcccggaaatggtcctcagagaagcggtttggcctggagggctgtgaagtgatgattcctgccctcaagaccatcatcgacaaatccagcgagatggggattgagaatgtcatcttggggatgccacacaggggaaggctgaacgtgctggccaacgtgatccgcaaggacctggagcagatcttctgccagtttgaccccaagctggaggcggcggacgagggctccggggatgtcaagtaccacctgggcatgtaccatgagaggatcaaccgcgtcaccaaccggaacatcactctgtcgctggttgccaacccctcccacctggaggcagtggaccctgtggtgcaggggaagacaaaggcagagcagttctaccgtggagatgcccagggcaagaaggtcatgtccatcctggttcatggggacgccgcctttgctggccagggcgtggtatatgagaccttccacctgagcgacctgccctcctacacgaccaatggtaccgtgcacgtcgtcgtcaacaaccagattggattcaccacagacccccgaatggcccgctcctcaccatacccgaccgacgtggcccgggtggtcaatgcgcctatcttccatgtgaatgccgatgacccagaggctgtgatatatgtgtgcagtgtggcagccgaatggagaaacactttcaacaaagatgttgtcgtggacctggtctgttaccgccggcgtggccacaatgagatggacgagcccatgttcacccagccgctcatgtacaagcagatccacagacaggtgcctgtgctgaagaagtacgcagacaagctgattgccgagggcacagtcaccctgcaggagtttgaggaagaaattgccaaatacgaccggatctgtgaggaggcttatggcaggtccaaggataaaaagattctgcatataaagcactggttggactccccctggcctggcttcttcaacgtagatggggagcccaagagcatgacatgcccagccacggggatccctgaggacatgctcacccacatcggcagtgtggccagctctgtgcccctggaggactttaagatccacactggcctctctcgcattctgcggggccgtgcggacatgaccaagaaccggacggtggactgggcgttggcagagtacatggcctttggctccctgctgaaggaaggcatccacgtgcggctcagcgggcaggatgtggagaggggcacattcaggtggcatcatcagatggccacctcgctgaccccccagggcaagtgtgcagagctcactgctgggcccaagctgtccactaaggtcaagctggtggccatctgtggtcctcaggatcatgtgtgtgtggggggtgtgtggtggaatgtttttgccatcaagtgtgaagttaatagtgacagattgtttgtttcaggtactgagcagtacagtgaatacacaggctatgctgagacatatcgttggtcccggagccacgaagatgggagtgaaagggacgactggcagcggcgctgcactgagatcgttgccatcgatgctcttcacttcagacgctacctcgatcagtttgtgcctgagaaaatgagacgcgagctgaacaaggccagtaaccttatttcttag

SEQ ID NO: 134885 - DNA, 3734 bp, Homo sapiens
tgtcgtcctgacctgcagcctccggacctcgctgcagcgcggacccggcccgcccgcccgaatgagtcagctgaggctgctgccgtcccgtcttggggtacaggctgcgaggctcctggctgcacatgacgtcccggtgtttggctggcgcagcaggtcctccgggccaccggccaccttcccaagcagcaaaggtggaggcggctccagctacatggaggagatgtacttcgcctggttggaaaacccccagagtgtccacaagtcctgggacagcttcttcagggaagccagcgaggaagccttctctggctctgctcagccacggcccccttctgttgtccatgagagcaggtctgcagtctcaagtcggaccaagaccagcaaattggtggaggaccacctggctgtgcagtccctgatccgggcctaccagatccggggtcaccatgtggcccagctggaccccctgggcattctggatgcagacctggactcctttgtgccctcagacttgatcacaaccattgataaactggccttctatgaccttcatgaggctgaccttgataaagagttccaggtgccgacaaccaccttcattgatggctcttgaaacaccctttctctgcgggagatcattcggcgcctggagaacacctactgccagcacattggcctggagttcatgttcatcaacgatgtggagcagtgccagtggatccggcagaagtttgagacccctggtgtgatgcagttctccagcgaggagaagcggaccctgctggcccggctagtgcgctccatgaggtttgaagacttcctggcccggaaatggtcctcagagaagcggtttggcctggagggctgtgaagtgatgattcctgccctcaagaccatcatcgacaaatccagcgagatggggattgagaatgtcatcttggggatgccacacaggggaaggctgaacgtgctggccaacgtgatccgcaaggacctggagcagatcttctgccagtttgaccccaagctggaggcggcggacgagggctccggggatgtcaagtaccacctgggcatgtaccatgagaggatcaaccgcgtcaccaaccggaacatcactctgtcgctggttgccaacccctcccacctggaggcagtggaccctgtggtgcaggggaagacaaaggcagagcagttctaccgtggagatgcccagggcaagaaggtcatgtccatcctggttcatggggacgccgcctttgctggccagggcgtggtatatgagaccttccacctgagcgacctgccctcctacacgaccaatggtaccgtgcacgtcgtcgtcaacaaccagattggattcaccacagacccccgaatggcccgctcctcaccatacccgaccgacgtggcccgggtggtcaatgcgcctatcttccatgtgaatgccgatgacccagaggctgtgatatatgtgtgcagtgtggcagccgaatggagaaacactttcaacaaagatgttgtcgtggacctggtctgttaccgccggcgtggccacaatgagatggacgagcccatgttcacccagccgctcatgtacaagcagatccacagacaggtgcctgtgctgaagaagtacgcagacaagctgattgccgagggcacagtcaccctgcaggagtttgaggaagaaattgccaaatacgaccggatctgtgaggaggcttatggcaggtccaaggataaaaagattctgcatataaagcactggttggactccccctggcctggcttcttcaacgtagatggggagcccaagagcatgacatgcccagccacggggatccctgaggacatgctcacccacatcggcaatgggggcaagtttgggccccttggaggactttaagaatcccactggcctctctcgcattctgcggggccgtgcggacatgaccaagaaccggacggtggactgggcgttggcagagtacatggccttttggttccttgttgaaggaagggatacacgtgccggtcaacgtgcaggatgttgagaggggcacattcagtcaccggcaccatgttctccatgaccaggaggttgaccgcaggacgtgtgtgcctatgaatcatctctggcctgaccaggccccgtacaccgtgtgcaacagctccctctcggagtacggagtcctggggctttgagctgggctatgccatggccagccccaatgccctggtcctctgggaggcccagtttggggacttccacaacacggaccagtgcatcatcgaccagttcatcagcaccggccaggccaagtgggtgcggcataatggcattgtgctgctgctgccccatggcatggaaggcatgggcccagagcactcgtcagcgaggcccgaaaggttcctgcagatgagcaatgatgactcggatgcctaccctgcattcaccaaggacttcgaggtgagccagctctatgactgcaactggatcgtggtcaactgctccacaccggccaactacttccacgtgctgcgccggcagatcctgctgcccttccgcaagccgctgattatcttcacacctaaatctctgctgaggcacccagaggccaagtccagctttgaccaaatggtatccgggaccagcttccagcgggtgattcctgaagatggggccgcagcacgggcccctgagcaggtgcagcggcttcatcttcttgcacgggaaaggtgtactatgacctggtgaaggagcggagcagccagggacctgggaggagaaagtggccatcacgcgcctgggagcagatctctccatttcccctttcgacttgattcaaggcaggaggcagagcaagttacccaggtgcggagctggcctggttgtcaggaggagcacaagaacatgggctactatgactacattagcccacgcttcatgaccatcctgaggcgcgcacggcccatatggtatgttggccgggacccagcggctgcaccagccacaggaaacaggaacactcacctggtgtcactgaagaagtttctggatactgccttcaatctccaggcctttgagggcaagacattttagagctgggcaaaacctgtgtaggtctcgctgtgggtttgctggggaccaagggggtgatgaaaaggggaggggcggagctcctgcccaagagaggggctgtggggcccccaggataaaacagacacagtgacagggccaagagccagcactgctggccttggtggtcatgccagaatctaccaggactgagggagccagaggagtcctgtaggcaggctactgtgctggagcatccccccagctgctccccatcttgctggaatttttttgggcggcttctccacctgtatctcaagacagacacccgggggcctgtgtctgtggccgctcccatcccggcaagccctgggttgctgctcgcccccaccctcgcttatcctgtagattcaaagcgatgttctcttcctgtgctcttagaagtagggagttcagcagtaacagcccaggtgaagcgaacctgctgggtgaatttgtttgcgctctgttttatggggcattcctgcgagatgtgtcagcttctgtgtgaaatgcagccacagctcatgtgtaccaaagtagaaaaccaaatcacagagaaataaaaacatgcttcagagagatttgctgttttcatttcatgttgtaa

SEQ ID NO: 134886 - DNA, 1062 bp, Homo sapiens
atgcgggacctggatgttgggtttgattatcctttacaggctctccatagtgacgaaagtgatgtgcctactcactgtcctagtcagtggtggccgtatgccggtcactgttacaagattcacagagatgagaaaaaaatccagagggatgctctgaccacctgcaggaaggaaggcggtgacctcacaagtatccacaccatcgaggaattggactttattatctcccagctaggatatggcaggtccagaggtgccatacaggagccaggaactagagtcaaaaccttagaagtctacctggtgttctaccgtattgcagctgaattggcactcgaatcacaagacgcagaggagccttactctgtggccagcaccaccacaggtccatggggagagctgccacactactgccaatgttcccttaaggcccaagggctcttgaatcaacttctggtgaatgctgcctaccctaggactcacccttcaggttcctctctggtttccattgaaagtgctgcagaatccagttttctgtcatatcgggttgagccacttaaaagtaaaaccaatttttggataggattgttcagaaatgttgaagggacgtggctgtggataaataacagtccggtctcctttgtcaactggaacacaggagatccctctggtgaacggaatgattgtgtagctttacatgcgtcttctgggttttggagtaatattcactgttcatcctacaaaggatatatttgtaaaagaccaaaaattattgatgctaaacctactcatgaattacttacaacaaaagctgacacaaggaagatggacccttctaaaccgtcttccaacgtggccggagtagtcatcattgtgatcctcctgattttaacgggtgctggccttgccgcctatttcttttataagaaaagacgtgtgcacctacctcaagagggcgcctttgaaaacactctgtattttaacagtcagtcaagcccaggaactagtgatatgaaagatctcgtgggcaatattgaacagaatgaacactcggtcatctag

SEQ ID NO: 134887 - DNA, 873 bp, Homo sapiens
atgtgccaaaggaacagagaagatcaaaaggccacctgggagttctgggcaagagtcacgtccttccaaatagttcccacgagcagctctgatcctggcccaggttccatagcagtagaagtttatccaccagttactgaagatgggtgggttatttacaaagactaccagtattatttcagcaaagagaaggaaaccatggacaatgcgcgagcgttttgcaagaggaattttggtgatcttgtttctattcaaagtgaaagtgaaaagaagtgtgggtggaaatatgtaaacagaaatgatgcacagtctgcatattttattggtttattgatcagcttggataaaaagtttgcttggatggatggaagcaaagtggattacgtgtcttgggccacaggtgaacccaattttgcaaatgaagatgaaaactgtgtgaccatgtattcaaattcagggttttggaatgacattaactgtggctatccaaacgccttcatttgccagcgacataacagtagtatcaatgctaccacagttatgcctaccatgccctcggtcccatcagggtgcaaggaaggttggaatttctacagcaacaagtgtttcaaaatctttggatttatggaagaagaaagaaaaaattggcaagaggcacgaaaagcttgtataggctttggagggaatctggtctccatacaaaatgaaaaagagcaagaatcgggacagctgctaatccatacggtgactttttatgaattagaaaaagttttggttgtaggcagccacgacccagataggggcgcacagaatggagcccttgggcagggtgcaacttgcacaagtgtcttcagtggcctagataaaacctag

SEQ ID NO: 134888 - DNA, 1041 bp, Homo sapiens
atggcaacaacagaaactggggactatgagatgggggaggaatggaggcacctgccaaatggtatccatcttcctgtgttgaccccattgagtgtcttaggccacgagaatagcccagctgcagcctatgaacaatttcttggttattctgtgtctacttatcctggaaaattcacaatagaagataataatggaatcagaactgagccaaatgacgaattgtggatcggcttaaatgacattaagattcaaatgtactttgagtggagtgatgggacccctgtaacgtttaccaaatggcttcgtggagaaccaagccatgaaaacaacagacaggaggattgtgtggtgatgaaaggcaaggatgggtactgggcagatcggggctgtgagtggcctcttggctacatctgcaagatgaaatcacgaagccaaggtccagaaatagtggaagtcgaaaaaggctgcaggaaaatgggaccatctagttgcaggaaaacaagctcagggctcccactgattctgcgtgatgacccttccttgactaatcctccagcaacgattcaaacagatggctttgttaaatatggcaaaagcagctattcactcatgagacaaaaatttcaatggcatgaagcggagacatactgcaagcttcacaattcccttatagccagcattctggatccctacagtaatgcatttgcgtggctgcagatggaaacatctaatgaacgtgtgtggatcgccctgaacagtaacttgaaatccctgctactgaacccccacaactgcctggcagatgcccggagtcagatcacacagcatggattcctttccatggtcactgttactatattgagtcctcatatacaagaaactggggccaagcttctctggaatgtcttcgaatgggctgactgtgttgttattattggaggtgcatcaaatgaagcaggaaaatggatggatgatacctgcgacagtaaacgaggctacatatgccagacacgatccggaagccagaatatggttaaatga

SEQ ID NO: 134889 - DNA, 5457 bp, Homo sapiens
tcatctgggaatttctcgcagaatcacgcattcaggatcaccgggcttcatgaggtcccctggggagcgggaagcaaagttgttactttgaattcctgtgtttccagccaccctcatgtgacaggatgtctcctcagtagaggctttccctaaattcaggagccctttaaaagggagggcttcctctgtagttcttttcagctgggcagctctgggaactcggattatgtggagaggcagttggggggcctcgttgttttgcgtcttagttccgccctcctgtccatcatgagaaggaaaggataaaccctgggccatgaggctacccctgctcctggtttttgcctctgtcattccgggtgctgttctcctactggacaccaggcaatttttaatctataatgaagatcacaagcgctgcgtggatgcagtgagtcccagtgccgtccaaaccgcagcttgcaaccaggatgccgaatcacagaaattccgatgggtgtccgaatctcagattatgagtgttgcatttaaattatgcctgggagtgccatcaaaaacagactgggttgctatcactctctatgcctgtgactcaaaaagtgaatttcagaaatgggagtgcaaaaatgacacacttttggggatcaaaggagaagatttattttttaactacggcaacagacaagaaaagaatattatgctctacaagggatcgggtttatggagcaggtggaagatctatggaaccacagacaatctgtgctccagaggttatgaagccatgtatacgctactaggcaatgccaatggagcaacctgtgcattcccgttcaagtttgaaaacaagtggtacgcagattgcacgagtgctgggcggtcggatggatggctctggtgcggaaccactactgactatgacacagacaagctatttggatattgtccatgagcaatttgagggcagtgaaagcttatggaataaagacccgctgaccagcgtgatctaccagataaactccaaatccgctttaacgtggcaccaagcgaggaaaagctgccaacaacagaacgctgagctcctgagcatcacagagatacatgagcaaacatacctgacaggattaaccagttccttgacctcaggactctggattggacttaacagtctgagcttcaacagcggttggcagtggagtgaccgcagtcctttccgatatttgaactggttaccaggaagtccatcagctgaacctggaaaaagctgtgtgtcactaaatcctggaaaaaatgctaaatgggaaaatctggaatgtgttcagaaactgggctatatttgcaaaaagggcaacaccactttaaattcttttgttattccctcagaaagtgatgtgcctactcactgtcctagtcagtggtggccgtatgccggtcactgttacaagattcacagagatgagaaaaaaatccagagggatgctctgaccacctgcaggaaggaaggcggtgacctcacaagtatccacaccatcgaggaattggactttattatctcccagctaggatatgagccaaatgacgaattgtggatcggcttaaatgacattaagattcaaatgtactttgagtggagtgatgggacccctgtaacgtttaccaaatggcttcgtggagaaccaagccatgaaaacaacagacaggaggattgtgtggtgatgaaaggcaaggatgggtactgggcagatcggggctgtgagtggcctcttggctacatctgcaagatgaaatcacgaagccaaggtccagaaatagtggaagtcgaaaaaggctgcaggaaaggctggaaaaaacatcacttttactgctatatgattggacatacgctttcaacatttgcagaagcaaaccaaacctgtaataatgagaatgcttatttaacaactattgaagacagatatgaacaagccttcctgactagtttcgttggcttaaggcctgaaaaatatttctggacaggactttcagatatacaaaccaaagggacttttcagtggaccatcgaggaagaggttcggttcacccactggaattcagatatgccagggcgaaagccagggtgtgttgccatgagaaccgggattgcagggggcttatgggatgttttgaaatgtgatgaaaaggcaaaatttgtgtgcaagcactgggcagaaggagtaacccacccaccgaagcccacgacgactcccgaacccaaatgtccggaggattggggcgccagcagtagaacaagcttgtgtttcaagctgtatgcaaaaggaaaacatgagaagaaaacgtggtttgaatctcgagatttttgtcgagctctgggtggagacttagctagcatcaataacaaagaggaacagcaaacaatatggcgattaataacagctagtggaagctaccacaaactgttttggttgggattgacatatggaagcccttcagaaggttttacttggagtgatggttctcctgtttcatatgaaaactgggcttatggagaacctaataattatcaaaatgttgaatactgtggtgagctgaaaggtgaccctactatgtcttggaatgatattaattgtgaacaccttaacaactggatttgccagatacaaaaaggacaaacaccaaaacctgagccaacaccagctcctcaagacaatccaccagttactgaagatgggtgggttatttacaaagactaccagtattatttcagcaaagagaaggaaaccatggacaatgcgcgagcgttttgcaagaggaattttggtgatcttgtttctattcaaagtgaaagtgaaaagaagtttctatggaaatatgtaaacagaaatgatgcacagtctgcatattttattggtttattgatcagcttggataaaaagtttgcttggatggatggaagcaaagtggattacgtgtcttgggccacaggtgaacccaattttgcaaatgaagatgaaaactgtgtgaccatgtattcaaattcagggttttggaatgacattaactgtggctatccaaacgccttcatttgccagcgacataacagtagtatcaatgctaccacagttatgcctaccatgccctcggtcccatcagggtgcaaggaaggttggaatttctacagcaacaagtgtttcaaaatctttggatttatggaagaagaaagaaaaaattggcaagaggcacgaaaagcttgtataggctttggagggaatctggtctccatacaaaatgaaaaagagcaagcatttcttacctatcacatgaaggactccactttcagtgcctggactgggctgaatgatgtcaattcagaacacacgttcctttggacggatggacgaggagtccattacacaaactgggggaaaggttaccctggtggaagaagaagcagtctttcttatgaagatgctgactgtgttgttattattggaggtgcatcaaatgaagcaggaaaatggatggatgatacctgcgacagtaaacgaggctacatatgccagacacgatccgacccttccttgactaatcctccagcaacgattcaaacagatggctttgttaaatatggcaaaagcagctattcactcatgagacaaaaatttcaatggcatgaagcggagacatactgcaagcttcacaattcccttatagccagcattctggatccctacagtaatgcatttgcgtggctgcagatggaaacatctaatgaacgtgtgtggatcgccctgaacagtaacttgactgataatcaatacacttggactgataagtggagggtgaggtacacttaactgggctgctgatgagcccaaattgtaaatcagcatgtgtttatctgggatctttgatgggctactgggaaggacaggcacatttgccaatggaaagttttttacttttctctgttaaaagtccagatggaatccctgcttacttgaacccccacaactgccggggcagattgcccgggagttcaggttcacacagcatggattcctttccatggtcactgttactatattgagtcctcatatacaagaaactggggccaagcttctctggaatgtcttcgaatgggttcctctctggtttccattgaaagtgctgcagaatccagttttctgtcatatcgggttgagccacttaaaagtaaaaccaatttttgggatagggattgttcaggaaatgttggaaggggacgtgggctgtgggataaaataacagtccgggtctcctttgttcaactgggaacacagggagatccctctggtgaacggaatgattgtgtagctttacatgcgtcttctgggttttggagtaatattcactgttcttcctacaaaggatatatttgtaaaagaccaaaaattattgatgctaaacctactcatgaattacttacaacaaaagctgacacaaggaagatggacccttctaaaccgtcttccaacgtggccggagtagtcatcattgtgatcctcctgattttaacgggtgctggccttgccgcctatttcttttataagaaaagacgtgtgcacctacctcaagagggcgcctttgaaaacactctgtattttaacagtcagtcaaagcccaggaactagtgatatgaaagatctcgtgggcaatattgaacagaatgaacactcggtcatctagtacctcaatgcgattctgagatatttgaatttcataaaattgtaactgaaatttaaaatttttagttcaatgtgattgttttctttaaaatgagtactgaattgtactggtctgtcctttttttcctttgcctaattgaagaaataattgcttgttttcctagccgggcaagatattttcataaaagagggataccaatgctgattactaccttttaaaatattttagataaatgcacagcaccacagcaccacatctaagcattagtgatgggtagctgatgtcagcctccatgtggattttaagcactcctagaaaccaatggaagccctccctggccatattttaagggaggcccccccaaatgtgttaccctattaaattgtaacctcagcaagtagaagcccccatttgaaaagtcaggtacaaatatccctcaagtggcataaaaatgtagtcagttttcctcttttacccagtttttatttcccactccaattatttagaactttatttgtacatgtgcagaagaataaggcagctgagaatctttgtttcccccaagagagttttacaggcttgagtgttgcaaatgtgttctttgtcctgttatatgtatatcaggaatacaaggatgtgaaataaaactgtaaatttgcataactggatgtacttagataatgtgaaataaaccattaaagaacaagctctatttttaataaaaaaaaaaaaaaa

SEQ ID NO: 134890 - DNA, 407 bp, Homo sapiens
  misc_feature (1)...(407): n = a,t,c or g
tttcgtcggcggcagaannnnnnnnnnnnnnnnnnnnnnnngccgaggaggaggttccggacgctgcttaggaaccggggactcaggagtgcccgcgccctgagcgctcagctccagaggcgacaacctctcctacattgagcacatctttgagatctcccgccgtcctgacctactcactatggtggttgactacagaacccgtgtgctgaagatctctgaggaggatgagctggacaccaagctaacccgtatccccagtgccaagaagtacaaagacattatccggcagccctctgaggaagagatcatcaaattggctcccccaccgaagaaggcctgagcaagggggaggaagaggaggaaggttggaccttcatcagaccactcccttcccccatcctgcn

SEQ ID NO: 134891 - DNA, 278 bp, Homo sapiens
  misc_feature (1)...(278): n = a,t,c or g
caaggctttttccaaaaaacattcaaattacacatgcagtctcagagactatttagacaaagttcaagttanggagcttttacggatgtgggagaaaagctttaaaannncggggagggctggctgctggaagaaggaagangccagactggttagacagtactcttcactcctagcccagcctagcgtgccctgcccctctggccactgctgcagacacctgccttaacacacacatctggcttctcccttaagaagagagagatacttntagaatt

SEQ ID NO: 134892 - DNA, 447 bp, Homo sapiens
atgtatattaaaactgcactgccatgtctgcccttttttgtggtgtctagcattaacttattgtctaggccagagcgggggtgggaggggaatgccacagtgaagggagtggcagaatcaaattgctacatagtccaaacaaaaaagaaggctttttcaaaaaacattaaattcacatgcagtctcagagactatttagacaaagttcaagttaggagcttttaggatgtgggagtaaaactttaatgggaggggagggctggctgctggaagaaggaagaagccagactggttagacagtactcttaactcctagcccagcctagcgtgccctgcccctctggccactccttatattgctgtgagattgcccctatcttgtgctcttctgtctgcagtgtgcacggccttgttctaacccggaataaaggtgattgattgtattgc

SEQ ID NO: 134893 - DNA, 198 bp, Homo sapiens
aaagaaggctttttcaaaaaacattaaattcacatgcagtctagtagtttctctgtaaggcaaaataatctaaaaagactaacctgcccacccactccttatattgctgtgagattgcccctatcttgtgctcttctgtctgcagtgtgcacggccttgttctaacccggaataaaggtgattgattgtattgcaaaa

SEQ ID NO: 134894 - DNA, 455 bp, Homo sapiens
  misc_feature (1)...(455): n = a,t,c or g
caacacaaaaaaaaaggcgccgcctaaggggaatttttaatannntnnnnnnnnnnnnnnnnnnnnnnnnnnnnnnnnntttgtttggactatgtagcaatttgattctgccactcccttcactgtggcattcccctcccacccccgctttggcctagacaataagttaatgctagaccccacaaaaaagggcagacatggcagtgcagttttaatatacatatatgtagaatatatatgtacccccagttagcacggtcagggtggggaggggcatcttggggtaggcaggaggctggggtcactcactgtactgtagtgacgtggctaggaggtgttcacaagcccagggggccaggatatctagtaaagaagggtttcctaagtaagtccggacgcgtgggcggacgcgtgggtcgnttcgaagattctctgaggttcgcaggatatcagan

SEQ ID NO: 134895 - DNA, 419 bp, Homo sapiens
ttgatttctattcgcatagaaatagcccccacctcctcctaaagtggggaaactcagccccctcccatagccctggacccccatcccgttaagaagaggatctagatgagctagccatataggcaatcagccagagcgtgcgcatttgcacacacacgtgcacagtaagggggttaggctcaggttagtaagtgggtagatggtgggtggcccctgccccctctcctggaggatgggggaagggagtggtatgatgaagttccacccttcctcctgttcctcccccgtgctcaggccttcttcggtgggggagccaatatgatgatctcttccccagagggcagccggataatgtctttgtacttgttggcactggggaagcgggttagcttggtgtccaggtcatcctcctctccccc

SEQ ID NO: 134896 - DNA, 374 bp, Homo sapiens
cttaggaaccggggactcaggagtgtctcggccctgagcgctcagctccagaggcgtcatggctgagtacgggaccctcctgcaagacctgaccaacaacatcacccttgaagatctagaacagctcaagtcggcctgcaaggaagacatccccagcgaaaagagtgaggagatcagctactggcagtgcctggtttagcttcctggagagccacaacaagctggacaaagacaacctcttccactcagttgttcctactcagactgttgcactctaaacctagggaggttgaagaatgagacccttaggttttaacacgaatcctgacaccaccatctatagggtcccaacttggttattgtaggcaaccttc

SEQ ID NO: 134897 - DNA, 2601 bp, Homo sapiens
  misc_feature (1)...(2601): n = a,t,c or g
ggtttttttttttttttttttttgcaatacaattaatcaccgtttattcccgggtttagaacaagggccgtgcacacttgcagacaggaaggagcacaaagataggggcaatctcaccagcaattataaggagtggggtgggcaggttagtcttttttaggattattttgccttacacgagaaactactaagactcttgctgaaaaagaacccctgtctttcttctccccatttccttccataaggaaaggctcctttattctctcttctaactctaatgtaaacataacccccaaatgggaagggacagttcatggcttcattccccccaccccaattcttacaagtaagtatctctctccttccttaaggggaagaagccaggacaggggaaaggggagacttgggggaagggtccttttaaggggcaaaaactgtggggagtccttagaaggtgttgtggtgttaaagggcaggtgtcttgcagcagtgggcccagagggggcagggggcacgctaaggctggggctaggagtttaagagtgactgtctaaaccagtctgggtttcttcctttcttccaggcaagccaagccctcccccanccccattaaagttttaactccccacatccctaaaaagctccctaacttgaaactttgtcctaaatagtctctgaagacttgcatgtgaatttaatgtctttttgaaaaagcccttcttttttgctttggactatggtagcaaatttgattcctgccactccctttacttgtggcatttccccttccacccccgctctggccctagacaataaagttaatgctagacaccacaaaaaagggccagacatggccagtgccagttttaaataatacatatatgtaagaatataatatgtacacacagttagcaccgtccagggtggggaggggccatcttggggtacggcaggaggctggggtcactcactgtactgtagtgatgtggctaggaggtgttcacaagcccagggggcccaggatatctagtaaagaagggtttcctaagtaagtcccttccgggattgaaattggggtgggggatcggttgcaaaggaaaaacactgtagttaacttctttctggcttgggatgttccttcaccaagaaaagagggaaggttgcctacaataaccaatttgggaccctaatagatggtggtgtcaggattcggtgttaaaacctaaagggtctcaattctttcaacctcccttaggttttaaagtgcaaacagtctgaagtaggaacaactgaagtggaaagagggggctcccctctctctgccctcatccccatctcaggctcagtggtacatggttcccagcacagtctctccagagtacaggtgggtgggggcatctaacgctggctgctccatggggtttgatcttagggacccaggaaaggatccctggctcaatacctatgctaggcccatgagagacaaaaagggacctgctggtactcaggaaacagtccagcacaggagtacaaacatggaactctggcttttctttgcccccttccaggtgggggttgagtggtctctttgccttccgtccccactgcttttccctggatccacctacctctcccataccttaccccttattgtcagctcctcaattgtaggaaaaatgcagccccttttctgcttcccacactttaaaagatatggggggagtggaggaaagggaagtaggaggaatgtgctgatttctatttgcatagaaatagcccccacctcctcctaaagtggggaaactcagccccctcccctagcccctgacccccatccccttaagaagaggaactagatgagctagacatatagacaaacagccagcagcgtgcgcacacgcacacacacgcgcacagtaagggggttaggacccaggttagtaagtgggtagatggtgggttgccccttgcccccctctcctggaggatgggggaagccactgcctctgatgaaggtcccaaccttcctcctctaaactcccccttgctgcagcccttccttcggtgggggagcccaatttgatgatctcttcctcaagagggctgccggataatgtctttgtacttcttggcactggggatacgggttagcttggtgtccagctcatcctccctcagagatcttcaancaacacgggttctgtagtcaaccaccatagtgaagtaggtcaggacggcgggagatctcaaagatgtgctcaatgtaggagaggttgtctttgtcccagcttgttgtggcttctcccaggaagctaaaccaggcactgccagtagtgatctcctcactcttttcgctggggatgtccttctttgaaggccgacatgagctgttctagtatcttcaagggtgatgttgttggtcaggtcttgcaggagggtccctgtactcagccatgacgcctctggagatgagcgctcagggcgcgggcaatcctgagtcgtcggttcctaagcagcgtccggaacttcttaaacggctgcaaccgccgccgccgccgcttctgccgcctcctccgccgggaaatctccagaagattccgg

SEQ ID NO: 134898 - DNA, 1473 bp, Homo sapiens
atgagggacttagccagagattcggagagaaacaagtttatagcactaattcttactaaggtggaggaggagctgacgcacctccagaagaaactaaaagggacagaggacgagctggataaatattccgaggacctgaaggacgcgcaggagaagctggagctcacggagaagaaggcctccgacctgtggccagcggtgccgacgtcaggccctcccccagcggtgctgacgtcggcggtccggccgggtgacctcatcgccccgacggcagccggcccggggggcggggagaggcgggggcggcccccgcgcaggcaaaggcttggggggccggggcgcggctgtgcagctctcgccggagccgagcccagccgagcgtccgccgctgcccgtgcgcctctgcgcctccgcgccatggccggcctcaactccctggaggcggtgaaacgcaagatccaggcccctgcagtagcaggcggacgaggcggaagaccgcgcgcagggcctgcagcgggagctggacggcgagcgcgagcggcgcgagaaagctgaaggtgatgtggccgccctcaaccgacgcatccagctcgttgaggaggagttggacagggctcaggaacgactggccacggccctgcagaagactggaggaggcagaaaaagcctgcagatgagagtgagagaggaatgaaggtgatagaaaaccgggccatgaaggatgaggagaagatggagattcaggaagatgcagctcaaagaggccaagcacattgcggaagaggctgacccgcaaataccgaggaggtagctcgtaagctggtcatcctggagggtgagctggagagggcagaggagcgtgcagagatgcgtgcggaggtgtccgaactaaaatgtggtgacctggaagaagaactcaagaatgttactaacaatctgaaatctctggaggctgcatctgaaaagtattctgaaaaggaggacaaatatgaagaagaaattaaacttctgtctgacaaactgaaagagggctgagacccgtgctgaatttgcagagagaacggttgcaaaactggaaaagacaattgatgacctcggaagatgagttatacgctcagaagctcaagtacaaagctatcagcgaggaactggaccacgctctcaacgacatgacctctctctgagaggcagccaggtcgctgccctctgtccttctcacatggtgcctcctacggccctgtggctttctaggagctccggtggcctgccttctggtttgaacgtcagagccttcttctgatgtgtctgtgactctacaaccgaaataaagacgggcagtcctcctcttcatgccccctcattctcattttctccacttgctgcctttgagctgtagctgtgtgcccttaaccatagcctgaaacacaaagtgggtggttagcctctctcactcacaaatgaaaagcttattac

SEQ ID NO: 134899 - DNA, 424 bp, Homo sapiens
ggcccaactgccctgtggccagttccactgggtcttgatctcatgaattccagctcccgggtgtcaggggtagcatccaatgggccagatccacattttcatcctcttcttcctcttcctcactccgacgcaggccagcccctattcggggcaagccctcggaggggtctccggacccggatcctgcactgctgctgttccgcgatcccatcttctggtcacagcattcttaggtcctgtgcgggggctcctcctgtcacctccttgggtttggtgaaagcaaagcgtgctctagaaataccagggtctcctgagacggggtagtagctatctctaggagggtgacccttcctcggggcccagatcccttccctttagcctatgccaactaccaaggcgtcgggaacacaaaccttctcgtgcc

SEQ ID NO: 134900 - DNA, 435 bp, Homo sapiens
cttcgataggattggagaaggtttgtgttcccgacgccttggtagttggcataggctaaagaaaagggatctcagccccgaggaagggtcaccctcctagagatagctactaccccgcttaatgagaccgtggcatatctagagcacgctttgctttcaccaaacccaaggaggtgacaggaggagcccccgcacaggacctaagaatgctgtgaccagaagatgggatcgcggaacagcagcagtgcaggatccgggtccggagacccctccgagggcttgccccgaagaggggctggcctgcgtcggagtgaggaagaggaagaagaggatgaagatgtggatctggcccaggccctcttggactcagaggaagagaatgacagagcttgggatggtcgtcttggggatcgatacaacccacctgtggatgct

SEQ ID NO: 134901 - DNA, 307 bp, Homo sapiens
  misc_feature (1)...(307): n = a,t,c or g
ataagctagtgaagcgctttcttccgagagggatttcagattggtcggtcagagaggttacctggaaatccaacaccgcccaacacccctcccgctccccagtccggggacttcgataggattggagaagagcacgctttgctttcaccaaacccaaggaggtgacaggaggagcccccngcacaggacctaagaatgctgtgaccagaagatgggatcgcggaacagcagcagtgcaggatccgggtccggagacccctccgagggcttgccccgaagaaggggctgggccttgccgtcggaagtg

SEQ ID NO: 134902 - DNA, 631 bp, Homo sapiens
gaagctgaccaaccacaaggcgtgtgtgcgtgacgtcagttggcacccctttgaagagaagattgtcagcagttcgtgggacgggaacctgcgtctgtggcagtaccgccaggctgagtacttccaggatgacatgccagaatctgaggaatgtgccagcgcccctgccccagtgccccaatcctctacacccttttcctcaccccagtagatccaacctccagccccatatagggtgaacctcttgataagctctctgcctcctcctccctttcttcccttgtggggaatgtttggaggaatcactgggcatttgatgggggattaacattaagcctggggctctggaggcttcagctggagccctggggaaggatttctccccatgggggcaggagtgggtcttcctttacgttggttcacacccagtcagctttgggtccctatctctgggcagagtttggcaggactgccatttatctggggtgtggcctctgccagcaagagaagtgtcctggggtgtttttaaatcatgtttgaatgttaggggttgggatcctagagttagatgcctgagggccacatctgaaacagacctgttcagccagggctgccaggtctttcaagttga

SEQ ID NO: 134903 - DNA, 1165 bp, Homo sapiens
  misc_feature (1)...(1165): n = a,t,c or g
agagaacggggcctctgcatcggggaagcttctcccttggagaacagtctcgagtgatatctcacttcttgcccaatgatctgggcttcactgatagctactctcagaaggctttctgtggcatctacagcaaagatggtcaaatattcatgtctgcttgccaagaccagacaatccgactctatgactgccgatatggccgtttccgtaaattcaagagcatcaaggcccgcgacgtaggctggagcgtcttggatgtggccttcacccctgatgggaaccacttcctctactcctagcttggtctgattacattcatatctgcaatatctatggtgagggagatacacacactgccctggatctcaggccagatgagcgtcgctttgctgtcttctccattgctgtctcctcagatggacgagaagtactaggaggggccaatgatggctgcctgtatgtctttgaccgagaacagaaccggcgcacccttcagattgagtcccatgaggatgatgtgaatgcagtggcctttgctgatataagctcccaaatcctgttctctgggggagatgatgccatctgcaaagtgtggggatcgacgcaccatgcgggaggatgaccccaagcctgtgggtgcactggctggacaccagggntggcatcaccttcattgacagcaagggtgatgcccggtatctgatctccaactctaaagaccagaccatcaaactctgggatatcccgacgcttttccagccgggaaggcatggaagcttcacgccaggctgccgcacagcaaaacaaggactatcggtgggcagcaagtgcccaaaaaagcctggcggaagctgaagctccccaggggacagctccttgatgacctaccggggcccacggagtgctgcacaccctcatccgctgccggttctcccccattcatagcactggccagcagttcatctacagtggctgctccactggcaaagtggttggtaaggattgtgtcagaacagggggcctcaggaagggcaggaatgactccttgccattccacctataacgactagtgaccaccttaaaaagcccagtgacagctacaggtaaaatcaaacttagcttggaggcttaaacagagaaatagaaaccattctatttttcagtg

SEQ ID NO: 134904 - DNA, 3333 bp, Homo sapiens
  misc_feature (1)...(3333): n = a,t,c or g
cacttactcctccccagcaagagctaacagccctccttgggtgtgcactttctcctcccctgaggcacctcgcgcattctgccgcctacctatcaatcatcgtgctccgctgtccagatggctggccaagggggcggggccgtcgtgtgacgtttgcagcccgccggccaggaagccgcgagatgcttgacgagcgaagcgcgtgacagaagagcggttggccaacgcagtggcggcagtcggagtaaacaaggcctcgcgccgctgcgggtcctgcgaccgctcctggctggtggggggactcgcgaggggcggaaaccgccggcttaagagggaggtgcttctcggcttcctccccctcatggggtacacacccccggcgccccacgtggggcgttaggcgaggaaggaggggtgttaggccaaattctattttcattggctgtcactgctgccggcctttgtaagggggcgctctgattggtcgataaggtgggggcgtcgagggtctttgagtcctaaggcttctaattggttagatgagataagctagtgaagcgctttcttccgagagggatttcgattggtcggtcagagaggttacctggaaatccaacaccgcccaacacccctcccgctccccagtccggggacttcgataggattggagaaggtttgtgttcccgacgccttggtagttggcataggctaaagaaaagggatctcagccccgaggaagggtcaccctcctagagatagctactaccccgtctcaggagaccctggtatttctagagcacgctttgctttcaccaaacccaaggaggtgacaggaggagcccccgcacaggacctaagaatactgtgaccagaagatggggatcgcgggaacagcagcagtgcaggatcccnggtccggagacccctccgagggcttgccccgaagaggggctggcctgcgtcggagtgaggaagaggaagaagaggatgaagatgtggatctggcccaggtactggcctatctcctagcgcaaaggccaagtgaggttggtgcagggaggaagtgcaccaaatttacaattcattcaggcccttttggactcagaggaagagaatgacagagcttgggatggtcgtcttggggatacatacaacccacctgtggatgctacccctgacacccgggggctggaattcaatgagatcaagaaacaagtggaactggccacagggcagctggggcttaggcgggccgcccagaagcacagctttcctcgaatgttgcaccagagagaacggggcctctgccatcggggaagcttctcccttggagaacagtctcgagtgatatctcacttcttgcccaatgatctgggcttcactgatagctactctcaaaaggatttctgtggcatctacagcaaagaatggtccaatattcatgtctggcttgcacagaacataccatctccgattctatgactgccgatatggccgtttccgtaaattcaagagcatcaaggcccgcgacgtaggctggagcgtcttggatgtggccttcacccctgatgggaaccacttcctctactctagctggccagatgagcgtcgctttgctgtcttctccattgctgtctcctcagatggacgagaagtactaggaggggccaatgatggctgcctgtatgtctttgaccgagaacagaaccggcggcacccttcagattgagtcccatgaggatgatgtgaatgcagaggcctttgctgatataagctcccaaatcctgttctctgggggagaggaggccatctgcaaagcgtgggatcgacgcaccatgcggtaggaagaccccaagcctgtgggtgcactggctggacaccaggatggcatcaccttcattgacagcaaggtgtgccacaaatcaggactgtacaaccaggccgataaggttctagttgcccacgggggcatgaaagcggactggtgagggaagttgacaagctccttattaaccaagggtgatgcccggtatctgatctccaactctaaagaccagaccatcaaactctgggatatccgacgcttttccagccgggaaggcatggaagcttcacgccaggctgccacacagcaaaactgggactatcggtggcagcaagtgcccaaaaaagcctggcggaagctgaagctcccaggggacagctccttgatgacctaccggggccacggagtgctgcacaccctcatccgctgccggttctcccccattcatagcactggccagcagttcatctacagtggctgctccactggcaaagtggttgtgtacgaccttctaaagtggccacattgtgaagaagctgaccaaccacaaggcctgtgtgcgtgacgtcagttggcacccctttgaagagaagattgtcagcagttcgtggggacgggaacctgcgtctgtggcagtaccgccaggcttgagtacttccaggatgacatgccagaatctgaggaatgtgccagcgcccctgccccagtgccccaatcctctacacccttttcctcaccccacccctgcttacggcgcctctaccatgcctggctggcagcagtggtcatctttgggccgcttctgcagttccatgtcaaccctcggactatcttcgccagccacggcaacttcttcaacataaaatttgtgaattcagcctggggctgtgacatgcactttcttagggggctttgtgttgctggtggtgttcctggctacacggcgcgtggcagtaactgccagacacctgagccgactggtagtaggggcagccgtgtggcggggagccggccgggccttcctgctcatcgaggacctgactggctcctgcttcgagccactgccccagggtctgctgctccacgagctgcctgacacgccgcacgtgcctggcagccgcgcaccagtggcgaggctacaccgtctcctcccacaccttcctgctcaccttttgctgcctgctcatggcagaggaagcagctgtgttcgccaagtacctgcgccatgggcttcctgccggcgcccccattgcgccttgtcttcctgctgaacgtgctgctgctgggcctctggaacttcttgctgctctgtaccgtcatctatttccaccagtacactcacaaggtggtgggcgccgcagtgggcacctttgcctggtacctcacctatggcagctggtatcatcagccctggtctccagggagcccaggccatgggctcttcccccgtccccactccagccgcaagcataactgaaagaaataaaaaccatcgggcctgaaaaaaa

SEQ ID NO: 134905 - DNA, 516 bp, Homo sapiens
  misc_feature (1)...(516): n = a,t,c or g
ggttgacatgaagaagcagcagcggctagggcggcggtagctgcaggggtcggggattgcagcgggcctcggggctaagagcgcgacgcggcctagagcggcagacggcgcagtgggccgagaaggaggcgcagcagccgccctggcccgtcatggagatggaaaaggagttcgagcagatcgacaagtccgggagctgggcggccatttaccaggatatccgacatgaagccagtgacttcccatgtagagtggccaagcttcctaagaacaaaaaccgaaataggtacagagacgtcagtccctgtaagtatccacgtggccggtaccagtcttgctcttcctttgctgcaggcctttttagtcaagactcctttcgcctcagggtttagtataataataaatcaatgtagcagaggtttatgacgcgattgtttcctatagtaaaggcattagagacttatagtaatagctcattnttccaccattatagaagggctcaggtttcagtttctg

SEQ ID NO: 134906 - DNA, 3787 bp, Homo sapiens
  misc_feature (1)...(3787): n = a,t,c or g
tttttttttttttcatgttctttagaaaaaaattttattgttgcagctaaaatgcaaacccatcatgaatatggcaagttggaaaactgtacagtctgacagttctgtgaggtcacagaagaccctgganacactccccccaacccacccggtcatgcagccacgtatccacacacacctgaaaaggtattataccaaaacaccttgctttttttgtttttatttttgtaaaaatgggtttattccatggccattgtaaaaaataatgacctgatgagtaaatttttggtttagggcatatcagcagagcagctcgctacctctctaacataatgtgtaacaaggtggcagagccagctgctctccagggatagggaggttaaacccagtacgtccattttgaaaatgctcctatatattacacaccccaaactactagagtgcatatacagggacttaaaaacaacaacgcccacgctcagaatgcttacagcctgggcacctaagccttatccacacctcaccataggctctgcaggggtgacacctccgaatgttcccacccacagaatttctctggtactgggccttctaccacggaggaaagggcaaaatgtgaaaaatgctgggccaggagagtaggctcggggagcttacagcctgcccgtgtttttcatgttaaaaaagcccactttaatgtggaggtcttcagttcccctttggcaggaagagtcgtgagcaccatcaggcccccacagggtttggaagggtggggggcagacgcgcctctctcgggcaagggtgaaccgggtacagagacggcgggcaggctgcctacaaggacagtcacgcaggctgtttcaagcaagtgtggtttccagcaggttgcctctcttcccaaatcaacggtctggctcaagaagagtggttgacttggaaatggcggaggctgaaccccaaaaggtgggggggcggggggtgtccctgcttcccctaaatccatgtcccagagcgtgaaggtgtgaaatatggcttccccataccccttggaattgtctgagttacagcaagacccctgctgtccccaggaacaggctgggccctnccccaggaagtccactagagtgtcatgcccaggaattaggcaaatgccctattccctggaaaactgcacccctattgctgagcggacaatgacttcagcaacagggtttgggccccacagccatgtaatgatcaggtcatgcacaggcaggttggacttggacatggggcacattagtaagcagagatcaaagtttctcatttcaagcacatatttttcatcaggacacaagaagaccttacatgcattctaatacacacgggggagcagtgattgagaactagatctagcagataacagggaggagaataagcgggacaaagtaatctcacatcatgtttcttattaaatacccacgtgttcattatatattatagcattgttctatcttctcacgttaccccacaatatcactaaataacaactgcttacaaccgtcctccttcccagtactggtctgacgcagcaggcccatggcaaagccttccattcccagtactacctgaggatttattattgtactttttgataaagcccttgatgcaaggctgacatcaaaaaattttaatacattattggttcaagaaaatgctagtgcactatggatgcctttggggaaaaaattgtttaaataaatatggagtggagagttgctccctgcagattcaaggggggggggctgtctggcgtgccgcccgcctgggatgctccaggagggagccctgggtgggggcgagccccaagacggggtgtaggccccttccctctgcgccgccagcatggtactctctttcactctcctcaaaaaatggcttgtggatttggtactcaaagtggaaggggcaaaaagtaaaaggatgaggggtgagacacacatccggggaagatggggttttagtgcagaaccaacgtccgtccggggcccggctttttacgcggtccggcggcccttacctaccgcggcatgcctgctagtcgggcgtgggctctgcgggcagaggcggacagtgggtgaaggtggagtggagaagggtcaggctatgtgttgctgttgaccaggaacctgtagcagaggtaagcgccgcccgtgaggcccgtagccccgcacatgttgaccaggaagggcttccagtaactcagtgcatggtcctcgtccttctcgggcagtgacggctcccctttggctggggaggcagcctgggcacctcgaagacttccccccacgacccgacttaaaaatacagtgtcttggctcatgctttcgatgccgtagggtgcggcatttaaggggcttcctttttcttccttgatggggcagtctttatcctcctgggtctcttccttcacccactggtgatttgggaagaactccctgcatttcccattgtgtggctccaggattcgtttgggtggccggggaggtggggggatatgctcggcgtgggggctccaggtcctcgtgggaaagctccttccactgatcctgcacggaagagtcccccatgaatgaaatttggccaccttcggatcaacagccccaggtaaggaaaaaacgcagctggtcggctgtctggatcagccccccatcccgaaacttccctcatttcctaacagcactttcttgatatcaacggaagaagggtctttcctcttgtccattcaggcaagagggcaggtattcaggccaggacagaaggttccagacctggccgatgcctggcactgcagtgcaaccacaacggggcccgtgctccgggctgagtgacccttgactcttcgacttttgaaaagaaagttcaagaatgaaggctgttgatccaggacttcaaagtcaagccatgtggtatagtggaaatgtaagatctctcgagtttcttgggttgtaaggttttccaattctagctgatcgcgctgtataatatgacttgatatcttcagagatcaatgttaatttcaaatttgtgtcttcaaagatcatctctttttcttctttttgtggccagtattgtgcgcattttaacgaacctttctccatcactctgttgagcatgacgacacccctgcttttctgctcccacaccgatctcccaaaagtgaccgcatgtgttagcaaaagggccctgggtaagaatgtaactcctttgggcttcttccatttttatcaaactagcgttgatatagtcattatcttcttgacgtagtttaatccgactatggtcaaagggactgacgtctctgtacctatttcggtttttgttcttaggaagcttggccactctacatggggaagtcactggcttcatgttcgataatcctggtaaatgggccgcccagctcccggacttgtcgatctgctcgaactccttttccatctccatgacgggccagggcggctgctgcgcctccttctcggcccacttgcgccgtctgccgctctaaggccgcgtcgcgctcttagccccgaggcccgctgcaatccccgacccctgcagctaccgccgccctagccgctgctgcttcttcatgtcaaccggcagccggaactacgcatcacgcctgccaggggctccgcccctgaagcagaaggaccaatcagcgatcgagaatttcgacaagcacttccgcggggaggagccgggggcggtgctaggggaagtggccccagcaccgcgagatatctaa

SEQ ID NO: 134907 - DNA, 452 bp, Homo sapiens
tttattggcagagtagctgaggttttattttggaccaaaaaaaaaaagcaattgaattgttttgtagctggaggcatgggcaaggggggtcccaggtagtaaactccccaggtgggctgagggctagggctgagctcaggtgggtctcctgttcccagtgctaccctgcatagcggcctccaccagcccctgcatgttgccaagctccgcctccagcttcagcttctcctgggccagagtctccagctgccgcctaaggttgttgatgtagctctcgaacatgttgtccatgttgcttcgagccgtcttctgctgctgcaggaggctccacttggtctccagcatcttgttctgctgctccaggaaccgtaccttgtctatgaaggaggcaaacttgttgttgagggtcttgatctgctctttctcctgggtgcgcacggcctggaatgttg

SEQ ID NO: 134908 - DNA, 442 bp, Homo sapiens
  misc_feature (1)...(442): n = a,t,c or g
ggtggggccagcggcatgggaggcatcacccgcaagtacggtcaaccagaagcctgntgagcccccttgtcctggaggtggacccccaacatccaggccgtgcgcacccaggagaaggagcagatcaaagaccctcaacaacaagtttgcctccttcatagacaaggtacggttcctggagcagcagaacaagatgctggagaccaagtggagcctcctgcagcagcagaagacggctcgaagcaacatggacaacatgttcgagagctacatcaacaaccttaggcggcagctggagactttgggccaggagaagctgaagctggaggcggagtttactacctggggaccccccttgcccatgcctccagctacaaaacaattcaattgctttttttttttggtccaaaataaaacctcagctagctctgccaatgtcaaa

SEQ ID NO: 134909 - DNA, 488 bp, Homo sapiens; identical to SEQ ID NO: 123513
  misc_feature (1)...(488): n = a,t,c or g

SEQ ID NO: 134910 - DNA, 1980 bp, Homo sapiens
  misc_feature (1)...(1980): n = a,t,c or g
aaattgccggccgcgtcgactttttttttttttttttccgacattggcagagcttagcttgaggtttttaattttggaccaaaaaaaaaaaaaagcatttgaatttgttttgtagcttggaggcagtgggcaaaggggggttccccaggtaataaactcccccgcaggtggggctgagggctaagggctgaaccctcaaggtgggtctccctgttccccagtgcctaccctgcaatagcggccctccttccccaggcctctggggcagccgcaggagagggtagggctgggagggggctgccgcaagctgtttcacttggggcaggacgttcagaggacttcagacaccaggcttcccaatcacgttgtctcgaatcttctttcaaaaccaacgggccttggaaaggagcctgggtgcgggcttgaaggagctgggagccctgcggccagagccaaaagcttgggagccccaggcttgttagcttgaggcccggggctttgttgaggccccccataaggccgaagcttaagaccaccttgcaatagccccgctgggtggtcttcgttaatgaaatactcatgttctgcatccccagacttccagcccggctcttcctcgcccttccagcaagctttcctggtaaggtggcgaatctcgaatgtcccagggccaagcttgaacgttcaatcaagctccctggtaactcaacgcaagtgccggcgcaccatgtccctggctctggcccggctgcagggcggccctcccagctcggacaaccttggcgttggcattccttaatgggccagctttttccacgctgcttcggcatcctgccaatgggcggcctcccagggaaagcccttcttgcctttgaggcccttcaaatcttcaagcctggagcccggctgatgttccgggttcatctcaagagatctcaagtctttgtgctgccgcaggtcatcccagtgcttcccagccaaggttctgcagctccttcatacttgatcagagtacatgctctcagcctcagcccggatgcggttggcaatatcctcgtactgtgccttgacctcagcaatgatgctgtccatgtccagggagcggctgttgtccatggacagcaccacagatgtgtccgagatctgggactgcagctcccggatctcctcttcatacagtctgcctgatggaagttgatctcgtcggtcatgcccttccaggtcgagactccagctctagcttgtkcmatgtaagcttcatccacatccttcttgatgaggacaaattgattctccatctctgtacgcttattgatcatcatcctcatacttgttcttgaagtcctccaccagcccctgcatgttgcccaagctccggtctccagcttcagcttctcctggcccagaagtctccagctgccgcctaaggttgtktgatgtagctctcgaacatgtktgtgccatgttgcttcgaactcgtcttctgctgctgcaggaggctccacttggtctccagcatcttgttctgctgctccaggaaccctacctcgtcctatgaatggaggcaaacttgttgttgagggtcttgatctgctccttctcctgggtgcgcacggcctggatgttggggtccacctccagggacaagggggctcagcaggctctggttgattgaccgtgactgcagtgatccctcccatctccgctggccccaccatagccgccagcccaggccaccgcgaaaagttgctgctgcccactcgggagaagctcgaggagctgatgcgggaaccgggccgactcgtgtaggagcgcgtgctgaaggcccgggggcaagaagttggacaccttgtaggacttctgggtcaccctgatggacatggtagatggcaggagtggaggcatggcgggccgaaccaggcggagatcctagaaggagcggacaagctgggncgcttggctcaacncaaaaggcggtca

SEQ ID NO: 134911 - DNA, 2206 bp, Homo sapiens
gtggcaccccttacccagagctgcccatgaacgagcagttctacaatgccatcaaacggggttaccgcatggcccagcctgcccatgcctccgacgagatctccaccctgaatgaagtcaacacctcctcaaccatctcctgtgacagccccctggagccccaggacgaaccagagccagagccccagcttgagctccaggtggagccggagccagagctggaacagttgccggattcggggtgccctgcgcctcgggcggaagcagaggatagcttcctgtagggggctggcccctaccctgccctgcctgaagctccccccctgccagcacccagcatctcctggcctggcctgaccgggcttcctgtcagccaggctgcccttatcagctgtccccttctggaagctttctgctcctgacgtgttgtgccccaaaccctggggctggcttaggaggcaagaaaactgcaggggccgtgaccagccctctgcctccagggaggccaactgactctgagccagggttcccccagggaactcagttttcccatatgtaagatgggaaagttaggcttgatgacccagaatctaggattctctccctggctgacaggtggggagaccgaatccctccctgggaagattcttggagttactgaggtggtaaattaacttttttctgttcagccagctacccctcaaggaatcatagctctctcctcgcacttttatccacccaggagctagggaagagaccctagcctccctggctgctggctgagctagggcctagccttgagcagtgttgcctcatccagaagaaagccagtctcctccctatgatgccagtccctgcgttccctggcccgagctggtctggggccattaggcagcctaattaatgctggaggctgagccaagtacaggacacccccagcctgcagcccttgcccagggcacttggagcacacgcagccatagcaagtgcctgtgtccctgtccttcaggcccatcagtcctggggctttttctttatcaccctcagtcttaatccatccaccagagtctagaaggccagacgggccccgcatctgtgatgagaatgtaaatgtgccagtgtggagtggccacgtgtgtgtgccagtatatggccctggctctgcattggacctgctatgaggctttggaggaatccctcaccctctctgggcctcagtttccccttcaaaaaatgaataagtcggacttattaactctgagtgccttgccagcactaacattctagagtattccaggtggttgcacatttgtccagatgaagcaaggccatataccctaaacttccatcctgggggtcagctgggctcctgggagattccagatcacacatcacactctggggactcaggaaccatgccccttccccaggcccccagcaagtctcaagaacacagctgcacaggccttgacttagagtgacagccggtgtcctggaaagcccccagcagctgccccagggacatgggaagaccacgggacctctttcactacccacgatgacctccgggggtatcctgggcaaaagggacaaagagggcaaatgagatcacctcctgcagcccaccactccagcacctgtgccgaggtctgcgtcgaagacagaatggacagtgaggacagttatgtcttgtaaaagacaagaagcttcagatggtaccccaagaaggatgtgagaggtgggcgctttggaggtttgcccctcacccaccagctgccccatccctgaggcagcgctccatgggggtatggttttgtcactgcccagacctagcagtgacatctcattgtccccagcccagtgggcattggaggtgccaggggagtcagggttgtagccaagacgcccccgcacggggagggttgggaagggggtgcaggaagctcaacccctctgggcaccaaccctgcattgcaggttggcaccttacttccctgggatccccagagttggtccaaggagggagagtgggttctcaatacggtaccaaagatataatcacctaggtttacaaatatttttaggactcacgttaactcacatttatacagcagaaatgctattttgtatgctgttaagtttttctatctgtgtacttttttttaagggaaagattttaatattaaacctggtgcttctcactcac

SEQ ID NO: 134912 - DNA, 6390 bp, Homo sapiens; identical to SEQ ID NO: 129613

SEQ ID NO: 134913 - DNA, 1014 bp, Homo sapiens
atgtacatgagcaaggacgagtcggtggactatgtgcccatgctggacatgaaaggagacgtcagatatgcagacatagagtcctccaactacatggccccttacgataagtacgttccctctggtggcaccccttacccagagctgcccatgaacgagcagttctacaatgccatcaaacggggttaccgcatggcccagcctgcccatgcctccgacgagatgcacaccttcaccctctctctgccccgcctgaagccctctgaggctggccgctactccttcctggccagaaacccaggaggctggagagctctgacgtttgagctcacccttcgataccccccagaggtaagcgtcatatggacattcatcaacggctctggcacccttttgtgtgctgcctctgggtacccccagcccaacgtgacatggctgcagtgcagtggccacactgatagcaacagcagctgccccgccggcaatagccccagccgtttcccagttatcctgagtcgtgcctttcatacaggtattggtgtgaaccagacgaccctgatcgtcataaaccggaacgcagggcgaatcgtgagcacagcccgccagcaatgcggtcagggaatcccagtgatagagcccagtgtccccgagctggtcgtgaagccaggagcaacggtgaccttgcgatgtgtgggcaatggcagcgtggaatgggatggccccccatcacctcactggaccctgtactctgatggctccagcagcatcctcagcaccaacaacgctaccttccaaaacacggggacctatcgctgcactgagcctggagaccccctgggaggcagcgccgccatccacctctatgtcaaaggtgaggagtctgagcctcctcccaagaggcctgacccggcaggccccactacaatgggccctaaaattaacaatcgtaacaattcagctctgcatttactgagtgctggctatgagcaaggacctgaaagggggatcgtctag

SEQ ID NO: 134914 - DNA, 867 bp, Homo sapiens
gagcgcacgttccgaattgccgggtcgacgatgtcctagctggcagactttggcctggccatagaggtggagggggagcatcaggcatggtttgggtttgcagggactcctggatatctctccccagaagtgctgcggaaggacccgtacgggaagcctgtggacctgtgggcttgtggggtcatcctgtacatcctgctggttgggtaccccccgttctgggatgaggaccagcaccgcctgtaccagcagatcaaagccggcgcctatgatttcccatcgccggaatgggacactgtcaccccggaagccaaggatctgatcaataagatgctgaccattaacccatccaaacgcatcacagctgccgaagcccttaagcacccctggatctcgcaccgctccaccgtggcatcctgcatgcacagacaggagaccgtggactgcctgaagaagttcaatgccaggaggaaactgaagggagccattctcaccacgatgctggccaccaggaacttctccggagggaagagtgggggaaacaagaagagcgatggtgtgaaggaatcctcagagagcaccaacaccaccatcgaggatgaagacaccaaagtgcggaaacaggaaattataaaagtgacagagcagctgattgaagccataagcaatggagattttgagtcctacacgaagatgtgcgaccctggcatgacagccttcgaacctgaggccctggggaacctggttgagggcctggacttccatcgattctattttgaaaacctgtggtcccggaacagcaagaacgtgcacaccacgtgtatgcggccgctctgaggatcagacttcgtcgggtcttcgaagaat

SEQ ID NO: 134915 - DNA, 990 bp, Homo sapiens
atgggcaggctgggccatgcggtaaccccgtttgatggcattgtagaactgctcgttcatgggcagctctggggggttgaaggttctctggtcctctttccaggggtcatcctgtacatcctgctggttgggtaccccccgttctgggatgaggaccagcaccgcctgtaccagcagatcaaagccggcgcctatgatgggtttttgggtgctgactgggggcctccaaagcacagcacagtcaatggggagtggggagaagctgggaagagcgggagaggggaattgggagaagtgcaggggctgcagctatctttagagcacagtggcgagactcctcaaagggagtattacagtgaggcggatgccagtcactgtatccagcagatcctggaggctgtgctgcactgccaccagatgggggtggtgcaccgggacctgaagcccacatgctttgtgccaggatgggtgagctgcagttatactgtcatgactggctacggtaagactcggaccaaggacaagtaccgcgtggtctacaccgaccaccaacgcctggagctggagaaggagtttcattacagccgttacatcacaatccggcggaaatcagagctggctgccaatctggggctcactgaacggcaggagcagtgcgaggactctggtctccaggctgccaggcagagtacagagctcagtagaaggaaaacagagaggtgtccacgtgagctgccgcccacgctgctggggaacagttccgaagaggagagccagctggagactaacgtgacgtactgggaggaggagcaggagtttgaggtggtgagcacactgcgtctgcagcacgtggatcggccactgtcggtgcgctgcacgctgcgcaacgctgtgggccaggacacgcaggaggtcatcgtggtgccacactgtgagtccccagcctcagtggcccctgacgatcccaatccctaccttaatcctgcctaa

SEQ ID NO: 134916 - DNA, 5602 bp, Homo sapiens
ggcccctcagccctgctgcccagcacgagcctgtgctcgccctgcccaacgcagacagccagacccagggcggcccctctggcggctctgctcctcccgaaggatgcttggggagtgaggcgaagctgggcgctcctctcccctacagcagcccccttcctccatccctctgttctcctgagccttcaggagcctgcaccagtcctgcctgtccttctactcagctgttacccactctgggaccagcagtctttctgataactgggagagggcagtaaggaggacttcctggagggggtgactgtccagagcctggaactgtgcccacaccagaagccatcagcagcaaggacaccatgcggcttccgggtgcgatgccagctctggccctcaaaggcgagctgctgttgctgtctctcctgttacttctggaaccacagatctctcagggcctggtcgtcacacccccggggccagagcttgtcctcaatgtctccagcaccttcgttctgacctgctcgggttcagctccggtggtgtgggaacggatgtcccaggagcccccacaggaaatggccaaggcccaggatggcaccttctccagcgtgctcacactgaccaacctcactgggctagacacgggagaatacttttgcacccacaatgactcccgtggactggagaccgatgagcggaaacggctctacatctttgtgccagatcccaccgtgggcttcctccctaatgatgccgaggaactattcatctttctcacggaaataactgagatcaccattccatgccgagtaacagacccacagctggtggtgacactgcacgagaagaaaggggacgttgcactgcctgtcccctatgatcaccaacgtggcttttctggtatctttgaggacagaagctacatctgcaaaaccaccattggggacagggaggtggattctgatgcctactatgtctacagactccaggtgtcatccatcaacgtctctgtgaacgcagtgcagactgtggtccgccagggtgagaacatcaccctcatgtgcattgtgatcgggaatgaggtggtcaacttcgagtggacatacccccgcaaagaaagtgggcggctggtggagccggtgactgacttcctcttggatatgccttaccacatccgctccatcctgcacatccccagtgccgagttagaagactcggggacctacacctgcaatgtgacggagagtgtgaatgaccatcaggatgaaaaggccatcaacatcaccgtggttgagagcggctacgtgcggctcctgggagaggtgggcacactacaatttgctgagctgcatcggagccggacactgcaggtagtgttcgaggcctacccaccgcccactgtcctgtggttcaaagacaaccgcaccctgggcgactccagcgctggcgaaatcgccctgtccacgcgcaacgtgtcggagacccggtatgtgtcagagctgacactggttcgcgtgaaggtggcagaggctggccactacaccatgcgggccttccatgaggatgctgaggtccagctctccttccagctacagatcaatgtccctgtccgagtgctggagctaagtgagagccaccctgacagtggggaacagacagtccgctgtcgtggccggggcatgccccagccgaacatcatctggtctgcctgcagagacctcaaaaggtgtccacgtgagctgccgcccacgctgctggggaacagttccgaagaggagagccagctggagactaacgtgacgtactgggaggaggagcaggagtttgaggtggtgagcacactgcgtctgcagcacgtggatcggccactgtcggtgcgctgcacgctgcgcaacgctgtgggccaggacacgcaggaggtcatcgtggtgccacactccttgccctttaaggtggtggtgatctcagccatcctggccctggtggtgctcaccatcatctcccttatcatcctcatcatgctttggcagaagaagccacgttacgagatccgatggaaggtgattgagtctgtgagctctgacggccatgagtacatctacgtggaccccatgcagctgccctatgactccacgtgggagctgccgcgggaccagcttgtgctgggacgcaccctcggctctggggcctttgggcaggtggtggaggccacggctcatggcctgagccattctcaggccacgatgaaagtggccgtcaagatgcttaaatccacagcccgcagcagtgagaagcaagcccttatgtcggagctgaagatcatgagtcaccttgggccccacctgaacgtggtcaacctgttgggggcctgcaccaaaggaggacccatctatatcatcactgagtactgccgctacggagacctggtggactacctgcaccgcaacaaacacaccttcctgcagcaccactccgacaagcgccgcccgcccagcgcggagctctacagcaatgctctgcccgttgggctccccctgcccagccatgtgtccttgaccggggagagcgacggtggctacatggacatgagcaaggacgagtcggtggactatgtgcccatgctggacatgaaaggagacgtcaaatatgcagacatcgagtcctccaactacatggccccttacgataactacgttccctctgcccctgagaggacctgccgagcaactttgatcaacgagtctccagtgctaagctacatggacctcgtgggcttcagctaccaggtggccaatggcatggagtttctggcctccaagaactgcgtccacagagacctggcggctaggaacgtgctcatctgtgaaggcaagctggtcaagatctgtgactttggcctggctcgagacatcatgcgggactcgaattacatctccaaaggcagcacctttttgcctttaaagtggatggctccggagagcatcttcaacagcctctacaccaccctgagcgacgtgtggtccttcgggatcctgctctgggagatcttcaccttgggtggcaccccttacccagagctgcccatgaacgagcagttctacaatgccatcaaacggggttaccgcatggcccagcctgcccatgcctccgacgagatctatgagatcatgcagaagtgctgggaagagaagtttgagattcggccccccttctcccagctggtgctgcttctcgagagactgttgggcgaaggttacaaaaagaagtaccagcaggtggatgaggagtttctgaggagtgaccaccccagccatccttcggtcccaggcccgcttgcctgggttccatggcctccgatctcccctggacaccagctccgtcctctatactgccgtgcagcccaatgagggtgacaacgactatatcatccccctgcctgaccccaaacctgaggttgctgacgagggcccactggagggttcccccagcctagccagctccaccctgaatgaagtcaacacctcctcaaccatctcctgtgacagccccctggagccccaggacgaaccagagccagagccccagcttgagctccaggtggagccggagccggagctggaacagttgccggattcggggtgccctgcgcctcgggcggaagcagaggatagcttcctgtagggggctggcccctaccctgccctgcctgaagctcccccgctgccagcacccagcatctcctggcctggcctggccgggcttcctgtcagccaggctgcccttatcagctgtccccttctggaagctttctgctcctgacgtgttgtgccccaaaccctggggctggcttaggaggcaagaaaactgcaggggccgtgaccagccctctgcctccagggaggccaactgactctgagccagggttcccccagggaactcagttttcccatatgtaagatgggaaagttaggcttgatgacccagaatctaggattctctccctggctgacaggtggggagaccgaatccctccctgggaagattcttggagttactgaggtggtaaattaacttttttctgttcagccagctacccctcaaggaatcatagctctctcctcgcactttttatccacccaggagctagggaagagaccctagcctccctggctgctggctgagctagggcctagccttgagcagtgttgcctcatccagaagaaagccagtctcctccctatgatgccagtccctgcgttccctggcccgagctggtctggggccattaggcagcctaattaatgctggaggctgagccaagtacaggacacccccagcctgcagcccttgcccagggcacttggagcacacgcagccatagcaagtgcctgtgtccctgtccttcaggcccatcagtcctggggctttttctttatcaccctcagtcttaatccatccaccagagtctagaaggccagacgggccccgcatctgtgatgagaatgtaaatgtgccagtgtggagtggccacgtgtgtgtgccagtatatggccctggctctgcattggacctgctatgaggctttggaggaatccctcaccctctctgggcctcagtttccccttcaaaaaatgaataagtcggacttattaactctgagtgccttgccagcactaacattctagagtattccaggtggttgcacatttgtccagatgaagcaaggccatataccctaaacttccatcctgggggtcagctgggctcctgggagattccagatcacacatcacactctggggactcaggaaccatgccccttccccaggcccccagcaagtctcaagaacacagctgcacaggccttgacttagagtgacagccggtgtcctggaaagccccaagcagctgccccagggacatgggaagaccacgggacctctttcactacccacgatgacctccgggggtatcctgggcaaaagggacaaagagggcaaatgagatcacctcctgcagcccaccactccagcacctgtgccgaggtctgcgtcgaagacagaatggacagtgaggacagttatgtcttgtaaaagacaagaagcttcagatgggtaccccaagaaggatgtgagaggtgggcgctttggaggtttgcccctcacccaccagctgccccatccctgaggcagcgctccatgggggtatggttttgtcactgcccagacctagcagtgacatctcattgtccccagcccagtgggcattggaggtgccaggggagtcagggttgtagccaagacgcccccgcacggggagggttgggaagggggtgcaggaagctcaacccctctgggcaccaaccctgcattgcaggttggcaccttacttccctgggatccccagagttggtccaaggagggagagtgggttctcaatacggtaccaaagatataatcacctaggtttacaaatatttttaggactcacgttaactcacatttatacagcagaaatgctattttgtatgctgttaagtttttctatctgtgtacttttttttaagggaaagattttaatattaaacctggtgcttctcactcac

SEQ ID NO: 134917 - DNA, 1017 bp, Homo sapiens
atggggaatgggagtgggggtggtggcgatgcgcaggcgggacggaaagcagagctgagcatccagcacaggaagaccccagaggagctttggctgctgtcagggctggaaggttccttggagggtgcacttcctgatcctcaagcatcttccttcaaaattgtaatcttcccaaagacgtgcaaagaggacagatgtgggctcaaaacccgaaagtccgactacatgacagcattcagaggagggacaccactacctgatcttcgaccttcactgtatccagcagatcctggaggctgtgctgcactgccaccagagggggtggtgcaccgggacctgaaggccaggggagaagaaaaaccagactctaggccgtgcagttctcctttcttttacctgaaggagattgcagagtctaggactgcaccagctgcacagccttgctccttcagcagggacttcatggatctccctgctgatcctcatggtatcagtggctgggtttgcagggactccggatatctctccccagaagtgctgcggaaggacccgtacgggaagcctgggacctgtgggcttgtgggggttgaaggttctctggtcctcttccaggggtcatcctgtacatcctgctggttggttcccatcgccgaatgggacactgtcaccccggaagccaaggatctgatcaataagatgcgaccattaacccatccaaacgcatcacagctgccgaagcccttaagcaccctggatctcgccctctcccctacttcctccagcaccgctccacgtggcatcctgcatgcacagacaggagaccgtggactgcctgaagaagtcaatgccaggaggaaactgaagggcgcaccacggcccgccggctcggatgctgcgagggagttcagcgccccccggggacgtccagtgtctggtccgggactggctgccggacggctgggccgggatctctcggccgcagcggggcgctctggggagttcccaactgaatcttag

SEQ ID NO: 134918 - DNA, 1908 bp, Homo sapiens
atggccaaagttgtgaagttggtaatgatcatggcctatttccaggaaaagctttctgcagctttgcttattactgagaatgggcgatggcgtgcagataaaacccaatctcctccaaccatcgcgcaaaacgccgacccaacttcatccagatctaagctccgggagattccatcaggcttggaagacatgacaagcgtctccagcatgaaaatcccccaggggcatcccaccagcttatctggtcacacttgggatgtgagggcctggatgattgtccatcagggcctcacccggctcttttcacactggcgccagatgtttgggaagttttcaggaaattgtggaaaaccagacctcaggctggtcaccttccagcaagaccaaggtcaagttatcaatcttgattatagatgccctggaccggggtgtctggagcctccaccgccgcagagagatgtctggagacaaagcctctacggggaaggattgctggcaagcaggttgctgcaaggtaatacccaggacttcctgaaggggggatatcgaggctcccttttggacagctcagggcccgccatggagcgcgcggcgggtgcgctcggagatgccttctcgggccgggttctcgaaagcagagccccgggggcccgttgggaccgtggcatgccgggcggtggtccgcgcgcggagatcccggcgccgcggggggaccgtgccggggctccccggcccgcgcccgagtcgccgccgtgcccaaggggcgagtgcctgcctgccaccccccgcccggaggagcggcgcacccttagggtccgccccgcacgtgccagctcggcgcccgcggcgccgggacagccccgggactctgccagacctctttatactgagattgggttgccacctgggggtaaagaggctgatcggtctttgcagagagaaatccaggttggagacgtcagcgggtccagccaagtgggagacaagttcaggtttctgctccatgggatccaggagcctgcagtcaccgatgagcctggaggaccacaaggtggccagggcccttggagagctgtgctgcggaatcgtaaagctaccatccggagctggccgtcccagagggaaggcttggtcatctcttcccctccacctgccctggtcccgcagtttgtcatcccgcagtttgtcagcatcgatgtgggactgggagaggaaggatattgccagttatggttgaatgtcattgtcaggggacccctgggttacccaaagaaatatacttctggcctgctggttggtcagagaatgcaggacacattggggtatcgcgaggtgtccaatggcagcgggttgggactgccacttctgggcgcgtcggagcggctgcacagggggtcagctggctgtcctgtggcctgctccggtgcctctggtccccatcttaccaggagcagcgccatggccatgcagggaggggccggagagggagccacaagaggcacaggtgttaggtctgccccagccacaacacctcagcacgtggtgtgtggcttcaaccaggtcaccgtgggcacactgggaggggagggcttctgtgcggccacgcttaataaacagtctgcctgggaaactgagcatccaaagtgccctctgaaggagcgggatgctgctgcccgtggtggctccgtcacacgcattctggaaggacgtttctgcgaggtggtgggcggtatcatcctggtttttcagggagaagtcaagtcactggcccaggtcctcaagctggccagtgtggcccggtctgaccccgaggttctgcccgggtttctgtccctccagcctggcatcgtgaactcaggggaaacagatggggaatctgttgttgtaacaaagattctaaggatttga

SEQ ID NO: 134919 - DNA, 9450 bp, Homo sapiens
gaggcggccaaggacctggccgacatcgcggccttcttccgatccgggtttcgaaaaaacgatgaaatgaaagctatggatgttttaccaattttgaaggaaaaagttgcatacctttcaggtgggagagataaacgtggaggtcccattttaacgtttccggcccgcagcaatcatgacagaatacgacaggaggatctcaggagactcatttcctatctagcctgtattcccagcgaggaggtctgcaagcgtggcttcacggtgatcgtggacatgcgtgggtccaagtgggactccatcaagccccttctgaagatcctgcaggagtccttcccctgctgcatccatgtggccctgatcatcaagccagacaacttctggcagaaacagaggactaattttggcagttctaaatttgaatttgagacaaatatggtctctttagaaggccttaccaaagtagttgatccttctcagctaactcctgagtttgatggctgcctggaatacaaccacgaagaatggattgaaatcagagttgcttttgaagactacattagcaatgccacccacatgctgtctcggctggaggaacttcaggacatcctagctaagaaggagctgcctcaggatttagagggggctcggaatatgatcgaggaacattctcagctgaagaagaaggtgattaaggcccccatcgaggacctggatttggagggacagaagctgcttcagaggatacagagcagtgaaagctttcccaaaaagaactcaggctcaggcaatgcggacctgcagaacctcttgcccaaggtgtccaccatgctggaccggctgcactcgacacggcagcatctgcaccagatgtggcatgtgaggaagctgaagctggaccagtgcttccagctgaggctgtttgaacaggatgctgagaagatgtttgactggatcacacacaacaaaggcctgtttctaaacagctacacagagattgggaccagccaccctcatgccatggagcttcagacgcagcacaatcactttgccatgaactgtatgaacgtgtatgtaaatataaaccgcatcatgtcggtggccaatcgtctggtggagtctggccactatgcctcgcagcagatcaggcagatcgcgagtcagctggagcaggagtggaaggcgtttgcggcagccctggatgagcggagcaccttgctggacatgtcctccattttccaccagaaggccgaaaagtatatgagcaacgtggattcatggtgtaaagcttgcggtgaggtagaccttccctcagagctgcaggacctagaagatgccattcatcaccaccagggaatatatgaacatatcactcttgcttattctgaggtcagccaagatgggaagtcgctccttgacaagctccagcggcccttgactcccggcagctccgattccctgacagcctctgccaactactccaaggccgtgcaccatgtcctggatgtcatccacgaggtgctgcaccaccagcggcacgtgagaacaatctggcaacaccgcaaggtccggctgcatcagaggctgcagctgtgtgttttccagcaggaagttcagcaggtgctagactggatcgagaaccacggagaagcatttctgagcaaacatacaggtgtggggaaatctcttcatcgggccagagcattgcagaaacgtcatgaagattttgaagaagtggcacagaacacatacaccaatgcggataaattactggaagcagcagaacagctggctcagactggggaatgtgaccccgaagagatttatcaggctgcccatcagctggaagaccggattcaagatttcgttcggcgtgttgagcagcgaaagatcctactggacatgtcagtgtcctttcacacccatgtgaaagagctgtggacgtggctggaggagctgcagaaggagctgctggacgacgtgtatgccgagtcggtggaggccgtgcaggacctcatcaagcgctttggccagcagcagcagaccaccctgcaggtgactgtcaacgtgatcaaggaaggggaggacctcatccagcagctcagggactctgccatctccagtaacaagaccccccacaacagctccatcaaccacattgagacggtgctgcagcagctggacgaggcgcagtcgcagatggaggagctcttccaggagcgcaagatcaagctggagctcttcctgcacgtgcgcatcttcgagagggacgccatcgacattatctcagacctcgagtcttggaatgatgagctttctcagcaaatgaatgacttcgacacagaagatctcacgattgcagagcagcgcctccagcaccatgcagacaaagccttgaccatgaacaacttgacttttgacgtcatccaccaagggcaagatcttctgcagtatgtcaatgaggtccaggcctctggtgtggagctgctgtgtgatagagatgtagacatggcaactcgggtccaggacctgctggagtttcttcatgaaaaacagcaggaattggatttagccgcagagcagcatcggaaacacctggagcagtgcgtgcagctgcgccacctgcaggcagaagtgaaacaggtgctgggttggatccgcaacggagagtccatgttaaatgccggacttatcacagccagctcgttacaagaggcagagcagctccagcgagagcacgagcagttccagcatgccattgagaaaacacatcagagcgcgctgcaggtgcagcagaaggcagaagccatgctacaggccaaccactacgacatggacatgatccgggactgcgccgagaaggtggcgtctcactggcaacagctcatgctcaagatggaagatcgcctcaagctcgtcaacgcctctgtcgctttctacaaaacctcagagcaggtctgcagcgtcctcgagagcctggaacaggagtacaagagagaagaagactggtgtggcggggcggataagctgggcccaaactctgagacggaccacgtgacgcccatgatcagcaagcacctggagcagaaggaggcattcctgaaggcttgcacccttgctcggaggaatgcagacgtcttcctgaaatacctgcacaggaacagcgtgaacatgccaggaatggtgacgcacatcaaagctcctgaacagcaagtgaaaaatatcttgaatgaactcttccaacgggagaacagggtattgcattactggaccatgaggaagagacggctggaccagtgtcagcagtacgtggtctttgagaggagtgccaagcaggctttggaatggatccatgacaatggcgagttctacctttccacacacacctccacgggctccagtatacagcacacccaggagctcctgaaagagcacgaggagttccagataactgcaaagcaaaccaaagagagagtgaagctattgatacagctggctgatggcttttgtgaaaaagggcatgcccatgcggcagagataaaaaaatgtgttactgctgtggataagaggtacagagatttctctctgcggatggagaagtacaggacctctttggaaaaagccctggggatttcttcagattccaacaaatcgagtaaaagtctccagctagatatcattccagccagtatccctggctcagaggtgaaacttcgagatgctgctcatgaacttaatgaagagaagcggaaatctgcccgcaggaaagagttcataatggctgagctcattcaaactgaaaaggcttatgtaagagacctccgggaatgtatggatacgtacctgtgggaaatgaccagtggcgtggaagagattccacctggcattgtaaacaaagaactcatcatcttcggaaacatgcaagaaatctacgaatttcataataacatattcctaaaggagctggaaaaatatgaacagttgccagaggatgttggacattgttttgttacttgggcagacaagtttcagatgtatgtcacatattgcaaaaataagcctgattctactcagctgatattggaacatgcagggtcctattttgacgagatacagcagcgacatggattagccaattccatttcttcctaccttattaaaccagttcagcgaataacgaaatatcagctccttttaaaagagctgctgacgtgctgtgaggaaggaaagggagagattaaagatggcctggaggtgatgctcagcgtgccgaagcgagccaatgacgccatgcacctcagcatgctggaagggtttgatgaaaacattgagtctcagggagaactcatcctacaggaatccttccaagtgtgggacccaaaaaccttaattcgaaagggtcgagaacggcatctcttcctttttgaaatgtccttagtatttagtaaagaagtgaaagattccagtgggagaagcaagtacctttataaaagcaaattgtttacctcagagttgggtgtcacagaacatgttgaaggagacccttgcaaatttgcactgtgggtggggagaacaccaacttcagataataaaattgtccttaaggcttccagcatagagaacaagcaggactggataaagcatatccgcgaagtcatccaggagcggacgatccacctgaagggagccctgaaggagcccattcacatccctaagaccgctcccgccacaagacagaagggaaggagggatggagaggatctggacagccaaggagacggcagcagccagcctgatacgatttccatcgcctcacggacgtctcagaacacgctggacagcgataagctctctggtggctgtgagctgacagtggtgatccatgacttcaccgcttgcaacagcaacgagctgaccatccgacggggccagaccgtggaagttctggagcggccgcatgacaagcctgactggtgtctggtgcggaccactgaccgctccccagcggcagaaggcctggtcccctgtggttcactgtgcatcgcccactccagaagtagcatggaaatggagggcatcttcaaccacaaagactcgctctccgtctccagcaatgacgccagtccacccgcatccgtggcttccctccagccccacatgatcggggcccagagctcgccgggccccaagcggccgggcaacaccctgcgcaagtggctcaccagccccgtgcggcggctcagcagcggcaaggccgacgggcacgtgaagaagctggcgcacaagcacaagaagagccgcgaggtccgcaagagcgccgacgccggctcgcagaaggactccgacgacagtgcggccaccccgcaggacgagacggtcgaggagagaggccggaacgagggcctgagcagcggtactctctccaaatcctcctcctcggggatgcagagctgtggagaagaggaaggcgaggagggggccgacgccgtgcccctgccgccacccatggccatccagcagcacagcctcctccagccagactcacaggatgacaaggcctcttctcggttattagtccgccccaccagctccgaaacaccgagtgcagccgagctcgtcagtgcaattgaggaactcgtgaaaagcaagatggcactggaggatcgccccagctcactccttgttgaccagggagatagtagcagcccttccttcaacccttcggataattcccttctctcttcctcctcgcccattgatgagatggaagaaaggaaatccagctctttaaagagaagacactacgttttgcaagaactagtggagacagagcgtgactatgtgcgggaccttggctatgtggttgagggctacatggcacttatgaaagaagatggtgttcctgatgacatgaaaggaaaagacaaaattgtgttcggcaacatccatcagatttacgactggcacagagacttttttttaggagagttagagaagtgccttgaagatccagaaaaactaggatccctttttgttaaacacgagagaaggttgcacatgtacatagcttattgtcaaaataaaccaaagtctgagcacattgtctcagaatacattgataccttttttgaggacttaaagcagcgtcttggccacaggttacagctcacagatctgttgatcaaaccagtgcagagaatcatgaagtatcagctgttactgaaggacttcctcaagtattccaaaaaggccagcctggatacatcagaattagagagagctgtggaagtcatgtgcatagtacccaggcggtgcaacgacatgatgaacgtggggcggctgcaaggattcgacgggaaaatcgttgcccagggtaaactgctcttgcaggacacattcttggtcacagaccaagatgcaggacttctgcctcgctgcagagagaggcgcatcttcctctttgagcagatcgtcatattcagcgaaccacttgataaaaagaagggcttctccatgccgggattcctgtttaagaacagtatcaaggtgagttgcctttgcctggaggaaaatgtggaaaatgatccctgtaaatttgctctgacatcgaggacgggtgacgtggtagagaccttcattttgcattcatctagtccaagtgtccggcaaacttggatccatgaaatcaaccaaattttagaaaaccagcgcaattttttaaatgccttgacatcgccaatcgagtaccagaggaaccacagcgggggcggcggcggcggcggcagcgggggcagcggcgggggtgggggcagcggcggcggcggggcccccagtggcggcagcggccacagtggcggccccagcagctgcggcggcgcccccagcacgagcaggagccggccctcccggatcccccagcctgtccgacaccacccccccgtgctggtctcctctgcagcctcgagccaggcagaggcagacaagatgtcaggtacgtccacccccgggccctccctgcctccccctggcgcggcccccgaggccggccccagcgcgcccagcaggcggccccccggcgcggacgccgaggggtccgagcgagaagcggagccgatccccaagatgaaggtgctggagagccccaggaaaggcgccgcgaacgcctcggggtcgagcccagacgcccccgccaaggacgcgcgcgctagcctgggcaccctgccgcttgggaagccccgggccggggccgcttcgccgctgaactcgccgctctccagcgcggtcccttctctcggcaaggagcccttcccccccagcagccccctgcagaaggggggctccttctggagctccatccccgcctcccccgccagccgacccggctccttcaccttcccgggggacagcgactccctccagcggcagacaccccgccacgcggcccctggcaaggatactgaccgcatgagcaacgtgctcctcggccagcgagcagtccgtgcagtccacccagagcaacgggagtgaaagcagcagcagtagcaacatctccaccatgttggtgacacacgattacacggcagtgaaggaggatgagatcaacgtctaccaaggagaggtcgttcaaattctggccagcaaccagcagaacatgtttctggtgttccgagccgccactgaccagtgccccgcagctgagggctggattccaggctttgtcctgggccacaccagtgcagtcatcgtggagaacccggacgggactctcaagaagtcaacatcttggcacacagcactccgtttaaggaaaaaatctgagaaaaaagataaagacggcaaaagggaaggcaagttagagaacggttatcggaagtcacgggaaggactcagcaacaaggtatctgtgaagcttctcaatcccaactacatttatgacgttcccccagaattcgtcattccattgagtgaggtcacgtgtgagacaggggagaccgttgttcttagatgtcgagtctgtggccgccccaaagcctcaattacctggaagggccctgaacacaacaccttgaacaacgatggtcactacagcatctcctacagtgacctgggagaggccacgctgaagattgtgggcgtgaccacggaagatgacggcatctacacgtgcatcgctgtcaatgacatgggttcagcctcatcatcggccagcctgagggtcctaggtccagggatggatgggatcatggtgacctggaaagacaactttgactccttctacagtgaagtggctgagcttggcaggggcagattctctgtcgttaagaaatgtgatcagaaaggaaccaagcgagcagtggccactaagtttgtgaacaagaagttgatgaagcgcgaccaggtcacccatgagcttggcatcctgcagagcctccagcaccccctgcttgtcggcctcctcgacacctttgagacccccaccagctacatcctggtcttagaaatggctgaccagggtcgcctcctggactgcgtggtgcgatggggaagcctcactgaagggaagatcagggcgcacctgggggaggttctggaagctgtccggtacctgcacaactgcaggatagcacacctggacctaaagcctgagaatatcctggtggatgagagtttagccaagccaaccatcaaactggctgactttggagatgctgttcagctcaacacgacctactacatccaccagttactggggaaccctgaattcgcagcccctgaaatcatcctcgggaaccctgtctccctgacctcggatacgtggagtgttggagtgctcacatacgtacttcttagtggcgtgtcccccttcctggatgacagtgtggaagagacctgcctgaacatttgccgcttagactttagcttcccagatgactactttaaaggagtgagccagaaggccaaggagttcgtgtgcttcctcctgcaggaggaccccgccaagcgtccctcggctgcgctggccctccaggagcagtggctgcaggccggcaacggcagaagcacgggcgtcctcgacacgtccagactgacttccttcattgagcggcgcaaacaccagaatgatgttcgacctatccgtagcattaaaaactttctgcagagcaggcttctgcctagagtttgacctatccagaagttctttctcattctctttcacctgccaatcagctgttaatctgaattttcaagagaaaacaagcaaacataactgatcagctgccggtatgttcatcgtgtgaaattgcattccaagtgagctgtgctcagcagtgcttggacacagagctgcaagctgcgctggggtggaggaccgtcacttacactctgccaaggacggaggtcgcattgctgtatcacagtattttttacggatttctgaaaaaaaaaaaa

SEQ ID NO: 134920 - DNA, 1209 bp, Homo sapiens
atgagtcaaaaatgccgcaaagataatccacggcatacaagcagcaacaaccagcgaagagcaaaaagctcaaagcgtacagaaacaaacaaagaagaagaagagaaacagcaaaaaaggacacaggagcgggcagcaaagacagaccagagcgacacgaaaggaccacgaagaaaagaaaaacaaacagaccagcacggaagaaagagaagacaacacgacagcgaggaagaacgacgaagaggaacaaacgacgcgaaggcacgaagacgaaaggagaaccacagcagaagcacacgacggcgcaccggggcagaggcaagagagcaaaggggcagagcgcgagccaccgaagaaaggaaacgcaagggggacagaaacgaaacaaagcgagagcaaggagcagaagcaaaagagaaacgagagaaaaaaaaaagaacaaagacagcagcgcaaagaaagaacagacgagaagaccgcaagaaaaacaagaaagcaagacaagaggacattgtgtttgacctggggtctcacattaagtgtggaatgagtttagagaagactgaccaggaccacgaagagactccccaaagatatcatccaccacatctccactcgcatgagccgtgtggcaggtgcccggtggccacgcgcagctgctgtgagggacagtgcgtggcgatagccttcttacccaagaagctccacgggaaacaagctcaggcaggtgctgttcttcttgcaggtccaggcatggatgggatcatggtgacctggaaagacaactttgactccttctacagtgaagtggctgagcttggcaggtatgatgcacaacccagaacgccttccgaaagagcagagcgtggggaagacatacccaagagatgtgcgaaggactataaccgctgtatactcattaagctccaggtgtatgccacgctgcctgctggcagctgggacttcctcaagtattccaaaaaggccagcctggatacatcagaattagaggggaaaatcgttgcccagggtaaactgctcttgcaggacacattcttggtcacagaccaagatgcaggacttctgcctcgctgcagagagaggcgcatcttcctctttgagcagatcgtcatattcagcgaaccacttgataaaaagaagggcttctccatgccgggattcctgtttaagaacagtatcaagacatga

SEQ ID NO: 134921 - DNA, 777 bp, Homo sapiens
  misc_feature (1)...(777): n = a,t,c or g
agctctagttagtctagtgctttttttcctcgttacttttactgccaatgttgtagtctttctgacaattacaaagactaaaaaattgccctttaatgaacagcccatacgatcttttctctctcttaaaactgtaggacttaaagcagcgtcttggccacaggttacagctcacagatctgttgatcaaaccagtgcagagaatcatgaagtatcagctgttactgaaggacttcctcaagtattccaaaaaggccagcctggatacatcagaattagagagagctgtggaagtcatgtgcatagtacccaggcggtgcaacgacatgatgaacgtggggcggctgcaaggattcgacgtaatgcggctcttgttttttaagagagctcctctgccttcatctctttcttttgtcttggattatttctctccacatagagaaagctgatccttttcacttggttttctggcttctctcactttacctcaatctgattgatattttatttcctttttttttttttttttttttttggtgcgtttggtttgcttttttgggacttgcctgtgctcaaagcccagtgtctcatggcagaaacaagcaggaccggggctttgtctcctgggccccagtactggtaagagctgagtttcctttccctcagcactttaagaccatggttagctatggatgtagtaggacctcggaggtcccactctctcanctctgggacttgatacttcctcattangtttaagatatgtttgcatgagat

SEQ ID NO: 134922 - DNA, 1590 bp, Homo sapiens
atgagtatttcattctctcgggtgaaacacagctgtctatgcttgtctgttgttgccgcggcttcggtcatctggttcgtcgtgcgtgccgagctaggatcgtctcgatgtgctgtggtggagtacccagatatggccgggaccaagggcccctacggcccgggacaaaaccaggagcgtaaacgccccaaccccccgcaagggcacaaatcgccccacaggaccccgaaacccgaactcaataaccgaacaaccgtgcacccaggattagcttacaactcgctctccgtctccagcaatgacgccagtccacccgcatccgtggcttccctccagccccacatgatcggggcccagagctcgccgggccccaagcgggcgggcaacaccctgcgcaagtggctcaccagccccgtgcggcggctcagcagcggcaaggccgacgggcacgtgaagaagctggcgcacaagcacaagaagagccgcgaggtccgcaagagcgccgacgccggctcgcagaaggactccgacgacagtgcggccaccccgcaggacgagacggtcgaggagctaaaatcctttgggggagacagcgtggagaatttgcaatgcaagacagatgttcaccggaactctcctgctgttgagcagggcatccgtgggtggccctgtctcatcggaaacgccctggctgtcaatcggcagcagacccacatgtgtgcatgtttggctgacgttatgtggcatgagggctgccagtcacagcagaggcttggtgaccttgtgggttttgtgaccctggctgtccaaggaggcccgcacttcacagccccagctcttcttcccactctgggcctggggcgcttgtccttagattcgtcgtctcgccgctctgcttcatcctgctttcttcctcagccttctgcagctttttcctacacatcagtcacatgtggtaagtttctcaagactgtgagcaaagtcccggtgtgccgccgtggcctggccgtgaacaggaaagaggctgagggccgctcctccgagagccccaccagctctgccactttccagtcgccggctttgtcctggatgctggtctcccagaggctgctgctgccccacatgatcggggcccagagctcgccgggccccaagcggccgggcaacaccctgcgcaagtggctcaccagccccgtgcggcggctcagcagcggcaaggccgacgggcacgtgaagaagctggcgcacaagcacaagaagagccgcgaggtccgcaagagcgccgacgccggctcgcagaaggactccgacgacagtgcggccaccccgcaggacgagacggtcgaggaggataccgtcgcgcagcccaggggccggcgagagggggccggacgccagagtggcagcagagcggcggggcccggcggacgccgagcgtcggccatccgcggcgggcacgcgcggacagatgtcgggaagcgaaacggaaccaggacgagaaaggagctcatgccgctccacgggaagcgcaaggacgcagcggaacatgacgaaccaacatcagccagtcgccccgcgggcgagcgcccg

SEQ ID NO: 134923 - DNA, 9041 bp, Homo sapiens
gaggcggccaaggacctggccgacatcgcggccttcttccgatccgggtttcgaaaaaacgatgaaatgaaagctatggatgttttaccaattttgaagggaaaaagttgcatacctttcaggtgggcagagataaacgtggaggtcccattttaacgtttccggcccgcagcaatcatgacagaatacgacaggaggatctcaggagactcatttcctatctagcctgtattcccagcgaggaggtctgcaagcgtggcttcacggtgatcgtggacatgcgtgggtccaagtgggactccatcaagccccttctgaagatcctgcaggagtccttcccctgctgcatccatgtggccctgatcatcaagccagacaacttctggcagaaacagaggactaattttggcagttctaaatttgaatttgagacaaatatggtctctttagaaggccttaccaaagtagttgatccttctcagctaactcctgagtttgatggctgcctggaatacaaccacgaagaatggattgaaatcagagttgcttttgaagactacattagcaatgccacccacatgctgtctcggctggaggaacttcaggacatcctagctaagaaggagctgcctcaggatttagagggggctcggaatatgatcgaggaacattctcagctgaagaagaaggtgattaaggcccccatcgaggacctggatttggagggacagaagctgcttcagaggatacagagcagtgaaagctttcccaaaaagaactcaggctcaggcaatgcggacctgcagaacctcttgcccaaggtgtccaccatgctggaccggctgcactcgacacggcagcatctgcaccagatgtggcatgtgaggaagctgaagctggaccagtgcttccagctgaggctgtttgaacaggatgctgagaagatgtttgactggatcacacacaacaaaggcctgtttctaaacagctacacagagattgggaccagccaccctcatgccatggagcttcagacgcagcacaatcactttgccatgaactgtatgaacgtgtatgtaaatataaaccgcatcatgtcggtggccaatcgtctggtggagtctggccactatgcctcgcagcagatcaggcagatcgcgagtcagctggagcaggagtggaaggcgtttgcggcagccctggatgagcggagcaccttgctggacatgtcctccattttccaccagaaggccgaaaagtatatgagcaacgtggattcatggtgtaaagcttgcggtgaggtagaccttccctcagagctgcaggacctagaagatgccattcatcaccaccagggaatatatgaacatatcactcttgcttattctgaggtcagccaaagatgggaagtcgctccttgacaagctccagcgacccttgactcccggcagctccgattccctgacagcctctgccaactactccaaggccgtgcaccatgtccctggatgtcatccacgaggtgctgcaccaccagcggcagctggagaacatctggcaacaccgcaagtcccggcctgcatcagaggctgcagctgtgtgttttccagcaggacgttcagcaggtgctagactggatcgagaaccacggagaagcatttctgagcaaacatacaggtgtggggaaatctcttcatcgggccagagcattgcagaaacgtcatgaagattttgaagaagtggcacagaacacatacaccaatgcggataaattactggaagcagcagaacagctggctcagactggggaatgtgaccccgaagagatttatcaggctgcccatcagctggaagaccggattcaagatttcgttcggcgtgttgagcagcgaaagatcctactggacatgtcagtgtcctttcacacccatgtgaaagagctgtggacgtggctggaggagctgcagaaggagctgctggacgacgtgtatgccgagtcggtggaggccgtgcaggacctcatcaagcgctttggccagcagcagcagaccaccctgcaggtgactgtcaacgtgatcaaggaaggggaggacctcatccagcagctcagggactctgccatctccagtaacaagaccccccacaacagctccatcaaccacattgagacggtgctgcagcagctggacgaggcgcagtcgcagatggaggagctcttccaggagcgcaagatcaagctggagctcttcctgcacgtgcgcatcttcgagagggacgccatcgacattatctcagacctcgagtcttggaatgatgagctttctcagcaaatgaatgacttcgacacagaagatctcacgattgcagagcagcgcctccagcaccatgcagacaaagccttgaccatgaacaacttgacttttgacgtcatccaccaagggcaagatcttctgcagtatgtcaatgaggtccaggcctctggtgtggagctgctgtgtgatagagatgtagacatggcaactcgggtccaggacctgctggagtttcttcatgaaaaacagcaggaattggatttagccgcagagcagcatcggaaacacctggagcagtgcgtgcagctgcgccacctgcaggcagaagtgaaacaggtgctgggttggatccgcaacggagagtccatgttaaatgccggacttatcacagccagctcgttacaagaggcagagcagctccagcgagagcacgagcagttccagcatgccattgagaaaacacatcagagcgcgctgcaggtgcagcagaaggcagaagccatgctacaggccaaccactacgacatggacatgatccgggactgcgccgagaaggtggcgtctcactggcaacagctcatgctcaagatggaagatcgcctcaagctcgtcaacgcctctgtcgctttctacaaaacctcagagcaggtctgcagcgtcctcgagagcctggaacaggagtacaagagagaagaagactggtgtggcggggcggataagctgggcccaaactctgagacggaccacgtgacgcccatgatcagcaagcacctggagcagaaggaggcattcctgaaggcttgcacccttgctcggaggaatgcagacgtcttcctgaaatacctgcacaggaacaagcgtgaacatgccaggaatggtgacgcacatcaaagctcctgaacagcaagtgaaaaatatcttgaatgaactcttccaacgggagaacagggtattgcattactggaccatgaggaagagacggctggaccagtgtcagcagtacgtggtctttgagaggagtgccaagcaggctttggaatggatccatgacaatggcgagttctacctttccacacacacctccacgggctccagtatacagcacacccaggagctcctgaaagagcacgaggagttccagataactgcaaagcaaaccaaagagagagtgaagctattgatacagctggctgatggcttttgtgaaaaagggcatgcccatgcggcagagataaaaaaatgtgttactgctgtggataagaggtacagagatttctctctgcggatggagaagtacaggacctctttggaaaaagccctggggatttcttcagattccaacaaatcgagtaaaagtctccagctagatatcattccagccagtatccctggctcagaggtgaaacttcgagatgctgctcatgaacttaatgaagagaagcggaaatctgcccgcaggaaagagttcataatggctgagctcattcaaactgaaaaggcttatgtaagagacctccgggaatgtatggatacgtacctgtgggaaatgaccagtggcgtggaagagattccacctggcattgtaaacaaagaactcatcatcttcggaaacatgcaagaaatctacgaatttcataataacatattcctaaaggagctggaaaaatatgaacagttgccagaggatgttggacattgttttgttacttgggcagacaagtttcagatgtatgtcacatattgcaaaaataagcctgattctactcagctgatattggaacatgcagggtcctattttgacgagatacagcagcgacatggattagccaattccatttcttcctaccttattaaaccagttcgagcgaatagcgagtactcgcctcttttaaaaagagctcctgacgtgctgtgaggaaggaaagggagagattaaaagatggcctggaggtgatgctcagcgtgcagaagcgagccaaatgatgccatgcacctcagcatgctgaaagggttggatgaaaacattgaggtctcagggagaactcatcctaacagaaatccttccaaagtgtgggacccaaaaaaccttaattcggaaggggtcgggaccggcatctcttccctttttgaaatgtccttagtatttagtaaagaagtgaaagattccagtgggagaagcaagtacctttataaaagcaaatttgtttacctcaagagttggggtgtcacagaaccatgttgaaggagaccctttgcaaattttgcacttgtggctgggagaacaccaaccttcaagataaataaaattgtccttaaggcttccagcatagagaacaagcaggactggataaagcatatccgcgaagtcatccaggagcggacgatccacctgaagggagccctgaaggagcccattcacatccctaagaccgctcccgccacaagacagaagggaaggagggatggagaggatctggacagccaaggagacggcagcagccagcctgatacgatttccatcgcctcacggacgttctccagaaccccctggacaacgataagctctctggtggctgtaagctgaccaagtggtgatccatgacttcaccgcttgtaacagcaacgtagctgtaccatccgacggggccagaccgtggaagttctggagcggccgcatgacaagcctgactggtgtctggtgcggaccactgaccgctccccagcggcagaaggcctggtcccctgtggttcactgtgcatcgcccactccagaagtagcatggaaatggagggcatcttcaaccacaaagactcgctctccgtctccagcaatgacgccagtccacccgcatccgtggcttccctccagccccacatgatcggggcccagagctcgccgggccccaagcggcccgggcaacacccctgcgcaaagtggctcaccagccccgtgcggcggctcagcagcggcaaggccgacgggcacgtgaaaggaagctgggcgcacaagcacaagaagagccgcgaggtccgcaagagcgccgacgccggctcgcagaaggactccgacgacagtgcggccaccccgcagatcgagacggtcgaggagagaggccggaacgagggcctgagcagcggtactctctccaaatcctcctcctcggggatgcagagctgtggagaagaggaaggcgaggagggggccgacgccgtgcccctgccgccacccatggccatccagcagcacagcctcctccagccagactcacaggatgacaaggcctcttctcggttattagtccgccccaccagctccgaaacaccgagtgcagccgagctcgtcagtgcaattgaggaactcgtgaaaagcaagatggcactggaggatcgccccagctcactccttgttgaccagggagatagtagcagcccttccttcaacccttcggataattcccttctctcttcctcctcgcccattgatgagatggaagcaaaggaaatccagctctttaaagagaagcacactacgttttgcaagaactagtggagacagagcgtgactatgtgcgggaccttggctatgtggttgagggctacatggcacttatgaaagaagatggtgttcctgatgacatgaaaggaaaagacaaaattgtgttcggcaacatccatcagatttacgactggcacagagacttttttttaggagagttagagaagtgccttgaagatccagaaaaactaggatccctttttgttaaacacgagagaaggttgcacatgtacatagcttattgtcaaaataaaccaaagtctgagcacatttgtctcagaaatacattgatcccttttttaaggacttaaagcaggcttcttggccacaggttacagctcacagatctggtgttcaaaccagtgcagagaatcatgaagtatcagctgttactgaaggacttcctcaagtattccaaaaaggccagcctggatacatcagaattagagagagctgtggaagtcatgtgcatagtacccaggcggtgcaacgacatgatgaacgtggggcggctgcaaggattcgacgggaaaatcgttgcccagggtaaactgctcttgcaggacacattcttggtcacagaccaagatgcaggacttctgcctcgctgcagagagaggcgcatcttcctctttgagcagatcgtcatattcagcgaaccgcttgataaaaggaagggcttctccatgccgggattcctgtttaagagcagtatcaaggtgagttgcctttgcctggaggaaaatgtggaaaatgatccctgtaaatttgctctgacatcgaggacgggtgacgtggtagagaccttcattatgcattcatctagtccgagtgtccggcaaacttggatccatgaaatcaaccaaattttagaaaaccagcgcaattttttaaatgccttgacatcgccaatcgagtaccagaggaaccacagcgggggcggcggcggcggcggcagcggggcagcggcgggggtgggggcagcggcggcggcggggcccccagtggcggcagcggccacagtggcggccccagcagctgcggcggcgcccccagcacgagcaggagccggccctcccggatcccccagcctgtccgacaccacccccccgtgctggtctcctctgcagcctcgagccaggcagaggcagacaagatgtcagagtgaaagcagcagcagtagcaacatctccaccatgttggtgacacacgattacacggcagtgaaggaggatgagatccaacgtcctaccaaggagaggtcgttcaaattctggccagcaaccagcagaacatgtttctggtgttccgagccgccactgaccagtgccccgcagctgagggctggattccagagctttgttctgggccacaccagagcagccatcggggagaacccggacgggactctcaagaaggcaacatcttggcacacagcactccgtttaaggaaaaaatctgagaaaaaagataaagactgcaaaagggaaagcaagttatagaacgggtatcggaagtcacgggaaggactcagcaacaaggtatctgtgaagcttctcaatcccaactacatttatgacgttcccccagaattcgtcattccattgagtgaggtcacgtgtgagacaggggagaccgttgttcttagatgtcgagtctgtggccgccccaaagcctcaattacctggaagggccctgaacacaacaccttgaacaacgatggtcactacagcatctcctacagtgacctgggagaggccacgctgaagattgtgggcgtgaccacggaagatgacggcatctacacgtgcatcgctgtcaatgacatgggttcagcctcatcatcggccagcctgagggtcctaggtccagggatggatgggatcatggtgacctggaaagacaactttgactccttctacagtgaagtggctgagcttggcaggggcaagattctctgttcgtttaagaaatgtgattcagaaaggaaccaagcgagcagtggccactaagtttgtgaacaagaagttgattgaagcgccgaccaggtcacccatgagcttggcatcctgcagagccttcccagcaccccctgcttgttcggcctccttcgacacctttttgagacccccaccagcttacatcctgggtcttaggaaatggctgaccaggggttcgcctcctgggactgcgttggtgcgattggggaagcctcactgaagggaagatcagggcgcacctgggggaggttctggaagctgtccggtacctgcacaactgcaggatagcacacctggacctaaagcctgagaatatcctggtggatgagagtttagccaagccaaccatcaaacttggctgacttttggagatgcttgttcagctcaacacggcctactacatccaccaagttacttgggggaacccttgaaattcgcagcccctgaaatcatccttcgggaaccctgtctccctgacctcggatacgtggagtgttggagtgctcacatacgtacttccttagtggcgtgtcccccttccctggatgacagtgtggaagagacctgcctgaacatttgccgcttaaactttagcttcccagatgactactttaaaggagtgagccagaaggccaaggagttcgtgtgccttcctccctgcaaggaggaatcccgccaagcgtccctcggctgcgctggccctcccaggaagcagtgggctgcaggccggcaacggcagaaggcacgggccgtccctcgaacacgtcccagaactgaacttcccttccattgaagcgggcgcaaacacccagaatgatgttcgaccctatcccgtagccatttaaaaacttatctgcagcagcaggcttcctgccctagagtttgaccctatcccagaagttcctttctcattctctttcacctgcccaatcagctgttaatctgaattttcaagagaaaacaagcaaacataactgatcagctgccggtatgttcatcagtgtgaaattgcattccaagtgagctgtgctcagcagtgcttggacacagagctgcaacgtgcgctggggtggaggaccgtcacttacactctgcccaaggcagaggttcgcattgctgtatcacagtattttattcaggtttctgcaaaaaaaaaaaaaaaaaacgaaggcg

SEQ ID NO: 134924 - DNA, 2827 bp, Homo sapiens
cccacgcgtccgctccaagatggctgcctccatagtgcggcgcgggatgctcctggcgcggcaagtggttcttcctcagctctctcctgcaggtaaaagatacctgctttcttcagcctatgtagacagccacaaatgggaagcaagagaaaaagaacattactgtcttgctgatcgtgcatcttgaatggataaaacatttgagagaaagttgcctgttagttctttaacaatatcacggcttatagacagcattttcctctcgggaagagatagatcatgcagagtattacctttacaagtttcgacacagccccaactgctggtacctgatgaaactggactatccacacctggattaggcagtgtctaaaatatgatgcacaagacaaagccctatatacccttgtaaataaggttcaatatggaatttttccagataactttacattcaatttactgatggattctttcataaagaaagaaaattacaaagatgctttatctgtggtttttgaggtcatgatgcaagaagcctttgaagtgccttccacccaacttctctccctctatgttttatttcattgcctggcaaagaagacagacttcagttgggaagaggagaggaactttggtgcatcccttttgcttccaggcctaaaacaaaagaactcagtgggtttcagttcccagttgtatggctatgcacttcttgggaaggtggagttgcagcaagggctacgggctgtgtaccacaacatgcctctgatatggaaaccaggctaccttgacagagcccttcaagtgatggagaaagtggctgcctccccagaagacataaagctgtgtagagaagcgctcgcatgtgctggatgcagtgctgaaggctctgacttcagctgatggggcttcaagaggagcagtcccaaaatgatgaagacaaccaggggtcagaaaaactggtggagcagttagacatcgaggaaacagagcagtccaagcttcctcaatacctggaacgatttaaggccttacattctaagcttcaagctctgggcaaaattgagtcagaaggtcttttaagtctgaccacccagcttgtcaaggaaaaactctccacctgtgaagcagaggacatcgccacctatgagcagaatctgcagcagtggcatctagaccttgtacagttgatccagagagaacagcaacagagggagcaagcgaagcaggagtaccaggctcagaaagcagcaaaggcatctgcctaaatagggtcccccagggccccacctgttttcacaagaacttcactcaaccccgtgccagggacttcagcagtggcctggacaacagcctcagcttcctctacccatcttcttttcttaaagcaggctatgtgccctacatggcaaggcaccatgactgcccatcgagatgccaagaagggctatggaactatgcaggtggctagtggtcagacaaaagaaaaccagctgaataccttaaggaggactcttgaggctcataatggagttcctggggcacagggattagttatgagcattaaagttcctaagacccagtgacagtactgggagaaaccaaggcttgaagagtcaggttgaagcacaggcttttttttttttgttgtttttggtttttttgagacagagtctcattctgtcactccaggctggagtgcagtggcgcaatcttggctcactgcaacctccgactcccaggttcaagcaattctcctgcctcggcctcctttagtaggtggggattacaggtgcataccaccacacctttctaatttttgcatttttagtagagatgggggtttcaccatgttggtcaggctggtctcaacctcctggacctcaagtgatctggcccgcctcagcctcccaaagtgctggggatgatagggcgtgacagcgcatcacccgggccaagcacagggtttttgaatgggtctccctcttccccagcccaggtacatgaggccaaggtgaactgtgcatcctgaagaccttgtgtcccctgagtctcctttctgagtgcaagctgcactggtgagctggctggtggggatactcagacattcccacattctccttttctgccacatctcggccctttctggacctgcactggggagaaattcaggaacaggagtgaactcaaggccatgaactcactggatttccatttttaggcacccatagggatgtttttaggatgtaagtttctgaggagaaagctacgctctagcatgaagcttttttggattggcttctccatcgtgttggggtaacattttttttccaattttttttttcccccccaaaacatcgtcctcagcctcatttatccaagtaggtaaaatgagcccttttgtgtaccaccacagagggcaccatgtgccatgccacacacaacttgtgaacacacatttcctgttaaagaagttagaaaatgagagatgggttggggcttgaagtgccatccagaggtatgaatgttgtaaaaactgtcaggaagatggtaaaattcctttctgaagtgtctcttctgtgaaagggttcagagcagattttgcttactatgtagtgttgcccttaagtacagtggtgtaattttattcaagaattgtgctcttctatcaaaagcctctggaaataaatgttccgggatcatgttagtgtactctttatctttggggaaagggaggagggagagggactcattattgttactatgattttgaggagtgtactttaaaccctcccccattaaactatgggatttattgtaataatga

SEQ ID NO: 134925 - DNA, 3509 bp, Homo sapiens
tttttttttttttttgaggtgaaaattaagaatgtatattatggaatttaaaaatctaaaagcacaggacacattttcagaagaggaattttacttttacccacttatggtaagcatctgcaatattagaaatataattaggttaaataaatcaaataaggaatccagaaagaaactgttccttgagttaagcccaagtacacactgggcaatttcgaggaaaggagaactctacacattaacaaaagaacacacaaggctcaaatgcaagtttatatgggtgaggtgtttttaaaggatttaaaaagcatgctccatcaggcataataggctttttctcatttatgtaacagatggcatttctggtctgcttgtgtacaagcaaagggttaggaacctggattaaacttattttatggatttcaggaaatgtgggtattttagaaatgtactccatagaatttacttccactgctccctaccactgattccttccaaataagccaaagtaacagaaggcccttatccccttgaaaatgtttttaaacactagcactttaaattgaaacactggtagaaacgtagccaatgtcaggtacaatgccctatacttagtcttatttaaaataaggaattgaatgcacaacagaaaatttatcattttctttatcattggaggggagggaaagaaagcaagcagaggtggggattatagttacactatttaagagctgaatacaaagacaatgagtctttcatagtctcaacaactcccacaatgaataactgtgggaataactcatttataattcacattggataaaaaaaatccggtcccctccggtgttttccatttaaatccaaaccttatcttcagaatacaaagatgaatactacaagataaactaactgcaataggtttttcctaagtaggaagcccaaacacccaaagggaatcccctctttcccaatgtccttcctgataagggcaaggattttgccaggattgggaagttcttaacactttaaataaggcatttctcttgggcccaagtaagaaactacagttgttgtggggtattcaccctaccaattaccctatgtattacatattaaattaaacctccagcattaaatatgccttgtataattacgcctgttaaatgatggatagccagtgatggatgcccggtgggaaaaagccctgtctttagcctcaagaaaagtaagggagacaaatgtagcaaggcagaaagcaaacacagatttgggcaatttttgactaggaaagagaattttaagcatagaaatataaaaagaaaagtacctacccttaatttccccttacgtggaaataatatggaaaaacacttaatttagatatactggacaacaagagaactaaggtactccaacttctactgcagccattacaaaaaaaaccatcccttcacccacagtgtaagatttaagggcaaccctgccccaaggatggcatggttatatcaaaacacagcaagattgctggctgccctgcccaagtacttccaatccctaccccaggtcctactgaaatacgggtggtccccaattagttttattgaaataaatctttaaagaaaaagataaagcatttaaaaagacaagtcaaaatgcatcaggaaccacatatccaacacaaactttatcctcaaatgagttatgtttgcgctcgcactaataacttttatttcactcagagcagtaatcttccatacataagtatattccctgccaataattcaaagagaaaaatcccaaaatgattagtacagtaaaatataagaattaacaggccctttaaatttgttttaaatattttgaagatttaaaaagtgtttaaagtttcgtaattcctagtaggaaaacattatctggaatgaatacccctaaggccaaaccactgtaaaaagccttccagctgcatttgggggagagggggtaagggattaatccttccaaagcacccccagctctccttgaatgaagaaggtccagaggtaacactggtttgtattattgcgacatcccataagggtgatctaggtggcttttcccttcagcaaggggtttatttatcagaaggacattacgcttgacctccaaatttgggctgacaatttactgatgagattcataacccttggggttgctctgggtattttgaacatattttgctggggttctgagccacatcctgggaaagccaccataacttctggatcctgcatggctgcaagaacctctggatcactaagaatttcattgagtcccaggcattccaacccattcccaggcatgcccccctcccattccaggcatttcctccggggaaaattaccaggcatttccccccagaaagccacctggaaaaagagccatactgagctccctgactgtcgtctggcttcttccctccctctgggctctctcatgctcttctcgagccttcttaactcggttctattctttctttgatctctcgctcttcacgttttcgctcatactctatgacgatgttctgcaattttctgtgccctaggttgaacttctttcagcattgcactagcatcttcatcataatccaatttacaggcaagggcaagatcatgggctgcttcttcccagtggcctaaaaagtctgtgtgctttcccccgccacttgtaaggttgagctgaatcaggatttatatcaatggctctgtcacagtctcggatggcagcaatttggcttctgtaatttgaccgaaagacactggcccctccttgggcatacaaaaatgggccaagccgaggattcagcttgatggcatctgtgaataagtcaatggctttctggagttcaccatcatttagggcttcaatagcagccacttttttatcatttgcctgatccatcatcttcctccggtatctccgcgatttcatctaccatttcttgaggagcatcagtgtctggttcaatcacaccttctttaatcaatttcctaagatcactttcctcacttgatggttcagtctgcctataagtcttcctccaccttcttactatcaggtttttcttccttggtatattcttctgatttagctttctgagtagcaggtggtactttaccacccatgctctccacccactccctgcaggaagcgcatttcctcggtgtgcagaacgctcggatcctgcttacacattttcacaaaggcccgaagctcgttcactttgcgggggtccatggtagggaggtggtgggcgaaactgggggggctacggcccggttccaggaacaggcgctgtgctcggcgtgaccgcgcagaaggccctcccattccaggcattcctccgggaaaattaccaggcattcccccaggaaagccacctgtaaaagagccatactgagctcttgactgtcgtgtggaatcttcctccctctgggctctctctctctctctctcccctcctgcctccggtc

SEQ ID NO: 134926 - DNA, 452 bp, Homo sapiens
  misc_feature (1)...(452): n = a,t,c or g
natcccgggtcgacgatttcgtggcggggcagcccgcggccaccggctcgccgtctgccgacaaggacggaatggagcccaacgtcgtggctcggatctcgcagtgggcagacgaccacctgcgcctagtccggacatcaaaatttacaagctcttcggatattccagtagaatttataagaagaaatgttaaactacgtggacgattacgccgaataactgagaatggtttagaaattgaacatatacctattactttacctattatagcttcattgagaaaagagccacgtggtgctttgctggttaagttggctggagtagaactcgctgaaactgggaaggcatggttacaaaaagagctaaaaccttcccaattactatggttccaacttcttggaaaggagaattcagcactcttttgctatcttctggtgaataagggtggatat

SEQ ID NO: 134927 - DNA, 423 bp, Homo sapiens
  misc_feature (1)...(423): n = a,t,c or g
ccgacgatttcgttggcggggcagcccgcggccaccggctcgccgtctgccgacaaggacggaatggagcccaacgtcggggctcggatctcgcagtgggcagacgaccacctgcgcctagtccgnnnnnnnnnnnnnnnnnnnnnnnnnnnnnnnnnnnnnnnnnnnnnnnnnnnnnnnnnnnnnnnnnnnnnnnnnnnnnnnnnnnnnnnnnnnnnnnnnnnnnnnnnnnnnnnnnnnnnnnnnnnnaacatcaccactggaatggccatagctggaataagctactttttgagaagcattcgacttgcatcaaaatttacaagctctttggatattccagtagaatttataagaagaaatgttaaactacgtggacgattacgcccgataactgagaatggtttagaaattgaacatata

SEQ ID NO: 134928 - DNA, 561 bp, Homo sapiens; identical to SEQ ID NO: 62565

SEQ ID NO: 134929 - DNA, 1675 bp, Homo sapiens
gcagctacgggagagagtaggaaaagcaaggtattcccaagaagcaggcaacagtacggaacaagatgttgctgtggtaagtgcccagcttccagttaaacaaacaaaacaaaacaaaacaaaaacaatgatggttggactcaacccaagcccaggaagtaaatgttttattcgtctccccttttcgggacagagggggatttcaattgctgccctaataactaatctctcaccattttcttctgtccgtgatcaaaacggaaaagctgtgagactccccaagtgtaacggacgctgcactccccttgctgggaaacgcggacctgctctcctggcggcgtctggcggtcagagagagggtcccgggaccccgcgtgagggtgaagcatcctgcagcgaggctggaccttccaccgggcgaaacgccacccaccaccaccgcaagggacccgagagttacattatttcgcggacacacacacccaccctcatccttctgaattatgggaccctgaagagcggccgtggccagttccccgcacggggccttaggggatccccacgcacagcactcacagtcctaaacaggcgtgtgccggctgtggctgccgagaaaggaacttgggccacctgctcactcgctcatcggactggcggccagaaaagcccccctagaagagcacttctccccactagccagcagaagccccagacgagcggggaagagcagggcgccgccgccacaacctgctttctcattcaaatcctcacgctcacacaggagcccccctccctctcggccccgcagcttccgaggaaatcaggaactggagttgcggagagcggactggagcgcctgctgcctcctctggcccgggcgggatgggtgtacggaaccctagggctgcacgtggaaccccaaggctgcacctggaacccttggcttacactctcctgcggggctccccgcttggcaagggccagaagcactgggaatgaagtacttttactcccccgcaagtttcaaaagtttcgaaacccaggaaagaaacacctttatactgattcatatgtatatgacttaatctacaaagtagatcagaagaggaatttcctaaatccatcatgggagactgaggagagaggagtagtaatggccaactccccgcacacacgacactcgcgatgtcgccctctcgagctcattcccccgcagttttctgtcgctccccggccccggcgggatccacgccagaggcctcacgttgttctcagggtcgctctgtgccgccccgcgcccaccacccgcccagactgcgtggccccagtacccggactaggcgcaggtggtcgtctgcccactgcgagatccgagccacgacgttgggctccattccgtccttgtcggcagacggcgagccggtggccgcgggctgccccgccatgttcccggcctcctgcgagcggccctgagctcctccggctggcggcagggggcgccgctcacctcgggaaggcggcggggtccccttccccgcggaccggggtggccccgcgacctgcagtcgccagtgggcgggccccagatatcagacgtcttaacagtgccccaaccgcttttatgcagggtgattccacgatgcaggagatctctgagcagcactgtgggggctga

SEQ ID NO: 134930 - DNA, 415 bp, Homo sapiens
  misc_feature (1)...(415): n = a,t,c or g
cggctgcctatgtcgtcatagaaactgatgcacaacatggaatcaaggggtgtggaattaccttcactctgggaaaaggcactgaagttgattggtccagaaaagggcgtggtgcacctggcgacagcggccgtcctaaacgcggtgtgggacttgtgggccaagcaggagggaaagcctgtctggaagttacttgtggacatgaaatactgcagaaaggtcaaattggtaaaaaagaaagagagaagcaaatgctggcacaaggataccctgcttacacgacatcgtgcgcctggctggggtactcagatgacacgttgaagcagctctgtgcccaggcgctgaaggatggctggaccaggtttaaagtaaaagtgggtgctgatctccaggatgacatgcgaagatngccaat

SEQ ID NO: 134931 - DNA, 564 bp, Homo sapiens
atggattttattcaatgggttataagccattactatcatatttatttggatgttcaaattgtcccagattcagccaatgggaacttcttcaaggtgacatctttcaaggcactggtcccattaggaattggcattgccacaggagaacagtgccacaatagagtgatatttaagcaactcctacaggcgaaggccctgcagttcctccagattgacagttgcagactgggcagtgtcaatgagaacctctcagtattgctgatggccaaaaagtttgaaattcctgtttgcccccatgctggtggagttggcctctgtgaactggtgcagcacctgattatatttgactacatatcagtttctgcaagccttgaaaatagggtgtgtgagtatgttgaccacctgcatgagcatttcaagtatcccgtgatgatccagcgggcttcctacatgcctcccaaggatcccggctactcaacagaaatgaaggaggaatctgtaaagaaacaccagtatccagatggtgaagtttggaagaaactccttcctgctcaagaaaattaa

SEQ ID NO: 134932 - DNA, 1692 bp, Homo sapiens
atggagaaaggcagcggcttcataaagtactcaacttacaaacaagggacaattagagttgcagaagaagcagaaacagctcacagctctgtcttaattggtccagaaaagggcgtggtgcacctggcgacagcggccgtcctaaacgcggtgtgggacttgtgggccaagcaggagggaaaggttttggcagtaggtagggaactgcaggaggaggagaaagaggagacaggatggcggaaggcgcaggcagcagtagaggggggtgtggggacctggtggctgacagccagcattagagctgccaacgcgtttactgtcaggaaaaaatggggactttacacatatgtcttacaaatcctttcttttttacttcaagcctgtctggaagttacttgtggacatgatttgataatgggctgcattaaaagtaaagaaaacaaaagtccagccattaaatacagacctgaaaatactccagagcctgtcagtacaagtgtgagccattatggagcagaacccactacagtgtcaccatgtccgtcatcttcagcaaagggaacagcagttaatttcagcagtctttccatgacaccatttggaggatcctcaggggtaacgccttttggaggtgcatcttcctcattttcagtggtgccaagttcatatcctgctggtttaacaggtggtgttactatatttgtggccttatatgattatgaagctagaactacagaagacctttcatttaagaagggtgaaagatttcaaataattaacaatacaccaatggttctcaacctgggacagaatcacccaggggatatttggcagtatctggagacatttttggttgtcacagttggggtgctgccgctgtcttctagtgcctcaactcctgtatttgatcgagtcaccaatggagtaactccaactatcaaggatctcactggctgctgtgttgagaacagactactgacttctaatagcagcgacttctttaccttgataaaccacagcaactcctccaaaacacccttccagaacacacgtttggttgtcagcagagggaattcatctgaaaaacaatttgccatacggtttcaagatgggaagacagatcatgccatccaactttcttcagggaagaaaactgccctgggacgtgaggccctggagcatccagaaagcctagactcccgcaaagtgggccagagatcacggtggagctcccaggctgcaagtcccatcagtggcccgattcaggctgagacagcacttctgtgccccggtgaccagtggacacaggaattccacacatctcctttgctaactgttcctcatctccctgacatctacacactggactgttgccgaaaagacttctccatttacattcattcctttggtgatatcacccagtcttatatctttaaataccacctgcaaattgatgattaccagctctgtgcccaggcgctgaaggatggctggaccaggccacctcctttccacactgctcatctgcacttctcccttctgactctcgcctgtgcagagacggtcacttctgcagaaactccagatgcccttgccaagtccaggtttaaagtaaaggtgggtgctgatctccaggatgacatgcgaagatgccaaatcatccgagacatgattggaccggaaaagactttg

SEQ ID NO: 134933 - DNA, 651 bp, Homo sapiens
atggtgatggagatggagatggtgatggtgatggtgatggagatggtgatggtgatggtgatggagatggtgatggtgatggagatggtgatggtgatggtgatggagatggtgatggtgatggtgatggagatggtgatggtgatggagatggtgatggtgatggtgatggagatggtgatggtgatggtgatggtgatggtgatggtgatggagatggagatggtgatggtgatggagatggtgatggtgatggagatggagatggtgatggtgatggagatggtgatggtgatggtgatggtgtggagatgcgacggttatggtgatggagatgatcttcctctgatggcgctgcctccatgccatgccctctgccagttctatgtggtgaacagtgagctgtcctgccagctgtaccagagatcgggagacatgggcctcggtgtgcctttcaacatcgccagctacgccctgctcacgtacatgattgcgcacatcacgggcctgaagcttcagcgagaacccagacctttcccaaagctcaggattcttcgaaaagttgagaaaattgatgacttcaaagctgaagactttcagattgaagggtacaatccgcatccaactattaaaatggaaatggctgtttag

SEQ ID NO: 134934 - DNA, 433 bp, Homo sapiens
gctggggtactcagatgacacgttgaagcatctctgtgcccaggcgctgaaggatggctggaccaggtttaaagtaaaggtgggtgctgatctccaggatgacatgcgaagatgccaaatcatccgagacatgattggaccggaaaagactttgatgatggatgccaaccagcgctgggatgtgcctgaggcggtggagtggatgtccaagctggccaagttcaagccattgtggattgaggagccaacctcccctgatgacattctggggcacgccaccatttccaagtgccacaatagagtgatatttaagcaactcctacaggcgaaggccctgcagttcctccagattgacagttgcagactgggcagtgtcaatgagaacctctcagtattgctgatggccaaaaagtttgaaattcctgtttgcccc

SEQ ID NO: 134935 - DNA, 593 bp, Homo sapiens
ttcgagagtgctggaattcctttgatgatggatgccaaccagcgctgggatgtgcctgaggcggtggagtggatgtccaagctggccaagttcaagccattgtggattgaggagccaacctcccctgatgacattctggggcacgccaccatttccaaggcactggtcccattaggaattggcattgccacaggagaacagggtgtgtgagtatgttgaccacctgcatgagcatttcaagtatcccgtgatgatccagcgggcttcctacatgcctcccaaggatcccggctactcaacagaaatgaaggaggaatctgtaaagaaacaccagtatccagatggtgaagtttggaagaaactccttcctgctcaagaaaattaagtgctcagccccaacaacttttttctttctgaagtgaaagggcttaaaatttcttggaaatagttgtacaaaaatggatttaaaaaatcctaccgatcaagatgagttcagctagaagtcataccaccctcaggaatcagctaagtaattattacttgattcttttagcaaatcaatgcacgttatcctacttaatccttaaataagt

SEQ ID NO: 134936 - DNA, 3422 bp, Homo sapiens
atggattttattcaatgggttataagccattactatcatatttatttggatgttcaaattgtcccagattcagccaatgggaacttcttcaaggtgacatctttcaagtgcatggatgggagactaagccgggttaggaaaagacaaaatccagtatcacgggacaaaggcaaagatttgataatgggctgcattaaaagtaaagaaaacaaaagtccagccattaaatacagacctgaaaatactccagagcctgtcagtacaagtgtgagccattatggagcagaacccactacagtgtcaccatgtccgtcatcttcagcaaagggaacagcagttaatttcagcagtctttccatgacaccatttggaggatcctcaggggtaacgccttttggaggtgcatcttcctcattttcagtggtgccaagttcatatcctgctggtttaacagaacatgctgatggtttatgccacaagttgacaactgtgtgtccaactgtgaaacctcagactcaaggtctagcaaaagatgcttgggaaatccctcgagaatctttgcgactagaggttaaactaggacaaggatgtttcggcgaagtgtggatgggtacaatgatgccagaagctttccttcaagaagctcagataatgaaaaaattaagacatgataaacttgttccactatatgctgttgtttctgaagaaccaatttacattgtcactgaatttatgtcaaaaggaagcttattagatttccttaaggaaggagatggaaagtatttgaagcttccacagctggttgatatggctgctcaggaagatgaaagtagttcaggtatgaggagggaacaaagtaaagctgtctgtactgacctgactcctccctctggtaatggcagagtttttaagattggtattatttcgtccttcaatgtgagtgatcaacaaggactttcccctctagctagtaaaacctcaaatgcttcccagccctctgtgacctctgatgtctgtcagttcacatcaatctggttgctctttgtctggctttacagttttactccatgtatgttcattctagaattcagcaaaaagtcagagacttctatggatagcattaattttgacaaagtgtccttcctgctgaactttgccctacaacttcttgctgcctcagcttccataaattctgatctctatctcttcatcttgttctttgctcaagattccctgtcccagatctacaatttagaatgtgccccaggcaaaaagccaggatggtattttggcaaaatggggagaaaagatgctgaaagattacttttgaatcctggaaatcaacgaggtattttcttagtaagagagagtgaaacaactaaaggtgcttattccctttctattcgtgattgggatgagataaggggtgacaatgtgaaacactacaaaattaggaaacttgacaatggtggatactatatcacaaccagagcacaatttgatactctgcagaaattggtgaaacactacacaggtgcctcaactcctgtatttgatcgagtcaccaatggagtaactccaactatcaaggatctcactggctgctgtgttgagaacagactactgacttctaatagcagcgacttctttaccttgataaaccacagcaactcctccaaaacacccttccagaacacacgtttggttgtcagcagagggaattcatctgaaaaacaatttgccatacggtttcaagatgggaagacagatcatgccatccaactttcttcagggaagaaaactgccctgggacgtgaggccctggagcatccagaaagcctagactcccgcaaagtgggccagagatcacggtggagctcccaggctgcaagtcccatcagtggcccgattcaggctgagacagcacttctgtgccccggtgaccagtggacacaggaattccacacaaaaggtgggttaaaaatgaggtctatggctcatcaaaggcccctgggcttggagctgcagaaaagtggatccctctcctcagacaaaactccccacgctgtcccacgccaatcagccacagcagctgctatgtattcgtctctagatgggtccgtgggccggagggcttttccgctagctacagtgaatctgcttcaccacgaatgggtttccccattcaaaaccacctccacccctgtgtcaaggctgcgctccatttatctgagcggtcaagtagactacaacaagagtaacagtaggcgaaggtggaaggcaaaggtgggaagaggtcagggctctgagtgctgggctgtggagtctgaggttcactctacagcgctggcactggtcccattaggaattggcattgccacaggagaacagtgccacaatagagtgatatttaagcaactcctacaggcgaaggccctgcagttcctccagattgacagttgcagactgggcagtgtcaatgagaacctctcagtattgctgatggccaaaaagtttgaaaaaatacaaactaccatcagagattactacaaacacctctacgcaaataaactagaaaatctagaagaaatggataaattccttgacacatacactctcccaagactaaaccaggaagaagttgaatctctgaatagaccaataacaggagctgaaattgtggcaataatcaatagcttaccaaccaaaaagagtccaggaccagatggattcacagccgaattctaccagagacgggtccaagagacccagagaggtctggaacttctccaagtcacacagcaagttgtggaagcgggatcaccactcaaaactcccagccccgggcttcccgttctccctcagcgccaaccccgtcgcgttcagggtacagaggaagccagcgagcgctgtgctctagggtttccactggcgggaacccaacaaaatcattttgctgctattgcctattatgcattctaccatttccagcaaaatatgatggatgccaaccagcgctgggatgtgcctgaggcggtggagtggatgtccaagctggccaagttcaagccattgtggattgaggagccaacctcccctgatgacattctggggcacgccaccatttccaagggtgtgtgagtatgttgaccacctgcatgagcatttcaagtatcccgtgatgatccagcgggcttcctacatgcctcccaaggatcccggctactcaacagaaatgaaggaggaatctgtaaagaaacaccagtatccagatggtgaagtttggaagaaactctttcctgctcaagaaaattaagtgctcagccccaacaacttttttctttctgaagtgaaagggcttaaaatttcttggaaatagttttacaaaaatggatttaaaaaatcctaccgaatcagatgag

SEQ ID NO: 134937 - DNA, 1539 bp, Homo sapiens
tttttttttacttaaggagagttctttaatctattttaggaaggaactgagcagataagtggcagtacaaaatgaacaaagcgtggacgaatgcagaacacttctttattatagcaacatataaaacaactataactttaaagttcataaccacactctacatcatgatcgatggggttactcagctccctcagatttgagggaatagcttgtgaaattcttaaaatattctaaaaatattccaaaaatagcttgtgaaattcaccaacccttctttataagtacgtgggattgaaatgcacatacatgtttttggctaagagcacatacatttcattctcctcactttgttcatgacctcagcattgtcagataccctcagtgagttaactcaaagccttttattatggaaagaactggcacagttacatttgccagtggcaaccatccttaaaaattaataactgataggtcacggacagatttttgacctagttcctttttcttttagagcaaaaagaacttttacctcggcatccagcccaacccctaaagactgacaatatccttcgagctcctttgaaagcaccctagacagccatttccattttaatagttggatgcggattgtacccttcaatctgaaagtcttcagctttgaagtcatcaattttctcaacttttcgaagaatcctgagctttgggaaaggtctgggtttcctcgctgaagctgaattttcagtggctcgatgtgattcaggtaaatatgtgcatctccccaagtgtggatagagacacctagctttagagcgcgtgatgtgcgcgatcattgacgtgagcagggcgtagctggcgatgttgaaaggcacaccgaggcccatgtctcccgatccccgggtacggttggaaggacagctccactgttcaccacatagaactggcagagggcatggcatggaggcagcgccatcagaggaaagatctcttggatttcaagccgcaaatgatgattcttctgtcgtcagggttggttttgatggtgtcaatcactctttgcagttggtcaactccctgtcctgaataatctgattccatatctctgtattctgccccaaaatgcctccactggaagccataaactgggcccaagtccccttcttctctggtggagaatcccaggctgtccaaaaagtctcgggatccattggcatcccagattttcactcccttggaagacagctctttagcatttgtggatcccttgataaaccacagcaactcctccaaaacacccttccagaacacacgtttggttgtcagcagagggaattcatctctcaggctgtagcgcgcctgcatgccgaataccgacagggtgccggtgcccgtgcggtcgtccttcctgacgccgcagcggaggatgtgttggatctgccccaggtactgcagctccccgtgcggcggacgcggctcggcgtcccgctcctgtgcggcggggggcaagggccggcgcggcagctccgagccggccacaggcat

SEQ ID NO: 134938 - DNA, 1764 bp, Homo sapiens
tttaatcagtgaaatatttttcccttcgttgcataccagatacccccggtgttgcacgactatttttattctgctaatttatgacaagtgttaaacagaacaaggaattattccaacaagttatgcaacatgttgcttattttcaaattacagtttaatgtctaggtgccagcccttgatatagctatttttgtaagaacatcctcctggactttgggttagttaaatctaaacttatttaaggattaagtaggataacgtgcattgatttgcttaaagaatcaagtaataattacttagctgattccctgagggtggtatgacctcctagctgaaactcaccttggatcggtaggattttttaaaacccatttttgtaaaactatttcccaagaaattttaagccctttcacttcagaaagaaaaaagttgttggggctgaagcacttaattttcttgagcaggaaggagtttcttccaaacttcaccatctggatactggtgtttctttacagattcctccttcaatttctgttgagtagccgggatccttgggaggcatgtaggaagcccgctggatcatcacgggatacttgaaatgctcatgcaggtggtcaacatactcacacaccctattttcaaggcttgcagaaactgatatgtagtcaaatataatcaggtgctgcaccagttcacagaggccaactccaccagcatgggggcaaacaggaatttcaaactttttggccatcagcaatactgagaggttctcattgacactgcccagtctgcaactgtcaatctggaggaactgcagggccttcgcctgtaggagttgcttaaatatcactctattgtggcactgttctcctgtggcaatgccaattcctaatgggaccagtgccttggaaatggtggcgtgccccagaatgtcatcaggggaggttggctcctcaatccacaatggcttgaacttggccagcttggacatccactccaccgcctcaggcacatcccagcgctggttggcatccatcatcaaagtcttttccggtccaatcatgtctcggatgatttggcatcttcgcatgtcatcctggagatcagcacccacctttactttaaacctggtccagccatccttcagcgcctgggcacagagctgcttcaacgtgtcatctgagtaccccagccaggcgcacgatgtcgtgtaagcagggtatccttgtgccagcatttgcttctctctttcttttttaccaatttgacctttctgcagtatttctagggcatcctcctcagtcaggacatcagtgatgtacctgaaatctatgcaggataccagcatcctgggatccatgtccacaagtaacttccagacaggctttccctcctgcttggcccacaagtcccacaccgcgtttaggacggccgctgtcgccaggtgcaccacgcccttttctggaccaatccatctgagctgcccatcacttgtgagctgcctatagaagcctctgaagtcaccaacaatgtccttgaggtccttgttgagcacatggtgggcgagggcattcacagcacagacaacaacttcagtgccttttcccagagtgaaggtaattccacaccccttgattccatcttctgcatcagtttctatgacgacataggcagccgagtagtcagggtccgtgtgcatggcgtccgcgccgtggcccccaagcgacgtggggaagcgcacgtcccggaccgagagccgggaga

SEQ ID NO: 134939 - DNA, 2945 bp, Homo sapiens
  misc_feature (1)...(2945): n = a,t,c or g
tattggtggcccaggggtaggcagccttctttcctctgcagttcactgctccagaaccatctccagcctcatagctcaccgtggacagccctgcggtgtggcgctgatgtacagagtgatgccaggcgttcatctccccactgagctcctgctgagtgtttgcctggggccaggtcctccttccgggaagtcattttagctggaaagaacagggtgggggcgggtggcaagggatcagagcatgagcgtttgagggcttcgtcaggggcagtgaggagcctctaaaggactctacatttaggaatgacagagtcaaacaatttaacaaagccctaaaggtccctgccaggaaagaatgagccccatgtatcaccataagcaacttcttagaaacataacccacccctgtcatcccagcactttgggaggccaaggagggaggattgcttgaggccaggagctcgagatcaacctggtcaacatggtaagaccccattttctacaaaaataaaaataaattagccgggcatggtggcacatacctggagtcccggctgctcaggaggctgaggcaggaggatcacataagccggggagactgaggctgcagtgagctatgatggcatcactgcactccagcctgggcaacagagtgagcccttgtctctaaaaaaagaataataaattttaaaaaacaaaatataacccaccttataattgattcaggcctcttcccctcctgtcacgttgccaggatcccaggacgctggtatcctgcatagatttcaggtacatcactgatgtcctgactgaggaggatgccctaggtgagtttggaagctttctgggatacacgatgtgcacacacagtagtggcatgctttgtttcctaaaagagtgagtgatgctttttatttcttccagaaatactgcagaaaggtcaaattggtaaaaaagaaagaggtgggttgtaagaaaattttcttcattgtttttgctaacattgtccacttttgagtgcccctgtccttttggggtacacattgtcttcccaaatgccctgtgctgagcagctaggccctcaaactcaacattcaagtctgcatggtgaagcctgctgggtatgacctctgactgtagagatggctacatcctctgctgaaaggaagtttggctttacgattacactgtaaggagagccctgggggagcagggcagtccgtgagagtatcctgatcacctgggtttgacatcctagtaattcgcggctgggtgtgtgtgtgctgcgccggatcaggagaacagctggactctccaggggaaacagctggactctccaggggaaacagcttaactacaggcacttccaattccgaagggccctggaaagcgcaaaatgttgacggcgctgtgttttcacagagaagcaaatgctggcacaaggataccctgcttacacgacatcgtgcgcctggctggggtactcagatgacacgttgaagcatctctgtgcccaggcgctgaaggatggctggaccaggtttaaagtaaaggtgggtgctgatctccaggatgacatgcgaagatgccaaatcatccgagacatgaatggaccggaaaagactttgatgatggatgccaaccagcgctgggatgtgcctgaggcggtggagtggatgtccaagctggccaagttcaagccattgtggattgaggagccaacctccccttgattgacatttttggggcacgccaccattttccaaggcactggtcccatttagggaattgggcatttgcaccagggagaacagttgccacaatagagtgatatttaagcaactcctacaggcgaaggccctgcagttcctccagattgacagttgcagactgggcagtgtcaatgaagaacctctcagtattgctgatggccaaaaagtttgaaattcctgtttgcccccatgctggtggagttggcctctgtgaactggtgcagcacctgattatatttgactacatatcagttttctgcaaagccttgaaaatagggtgtgtgagtatgttgaacacctgcatgagcattttcagtatcccgtgatgatccagcgggcttcctacatgccttcccaaggatcccggctactcaacagaaatgaaggaggaatctgtaaagaaacaccagtattcagatggtgaagtttggaagatactccttcctgctcaagaaaattaagtgcttagccccaacaactttttttctttctgaagtgaaagggcgtaaaatttcttggaaatagttttacaaaaatggatttaaaaaaatcctaccgatcgacatgagttcagctagaagtcataccaccctcaggaatcagctaaagcaaaaagaacttttacctcggcatccagcccaaccccttaaagactgacaatatccttcgagctcctttgaaagcaccctaaacagccattttccatttttaatagttggatgcgggattgtaccccttcaatctggaaaagtcttcagctttgaaagtcaatcnaattttctcaacttttcggaagaatcctgagctttgggaaaggtctgggttcatcgctgaagctaaaaacaaaataaggccattattttgccataattgtacggaccttgttgtaattgctcctcatgtcccatgaaacaagtacacaggatgtgattcaacaaagttctattttacaggagtatgatcctgtcgataccttgccgtaggttatgtaacatgattggagcgcaaccagctgttctcttgaccacagatcgagagtgaggggtattttgtgacattacacagcatcaggagcctggtgcctcatcaggtgtaagttcttataaccactcttggcaaatttattaaagacaggaacacagtcaatctgtaactcaaaaaaaaaaaaaaaaa

SEQ ID NO: 134940 - DNA, 2535 bp, Homo sapiens
aagccgctggcagccgcggatctcaccgccgctcaggagatctgttggtaatctgaggatttttattctacgtcgtcttgacagatggaaaacctgaagtaacttcgggctaaccttgtgtttttggaaaattagtagacttggtggtgaagaaactgggaggagtaggatattagctaactttgcatagccacatatagagcgtcgcagctgcattccaccaaagaggaaccaaaaggcctgtggtgttcccagggtacatattcatgccagaagtgaagtgccttggtgaattcgtttcctgaaagtttatcgcatacttgtactgggttaggtttttagaacttcagccataaaaatgggcagaattttccttgatcatatcggtggtacccgtctgttttcttgtgcaaactcgtgatacgatcctgaccaaccgctcagaactcatctccactcgtttcacaggcgccactggcagagcatttctttttaacaaggtagttaacctgcagtacagcgaagttcaagatcgggtcatgctcactggccgccacatggttcgagatgtgagctggcaaaaactgcaattagcaaacttgggatggatctatggagtttggccactgaagacagccagcgattttaagggaagggccggcgttgatccggggaacgttgttttagtttcggaggaggagttgagggctttggaggagcatggtaccacctgataactcttgaagatacagagagaaatccatcttttccccaggtctcctttcactgaaaacaaaaatctacttacatacactgtgcaccttagcatcagagtcggattaatgaacttgcggaacaagaggttgtggagaatctaagatgggaacctttctttctttctttctttttttttaaattttgtattttccatccaacagcacgtgtgtaggagagaatattatgcaggatgcccgttaattttttaccctatgttttacatcttgagggcaggcaggagtctgtctggcaggctatgtgggtggaggctatggtaagggggaaaaaaatctgggcctgttagagtgaaaaaagtgtgttttatgtccaattgtgaaaaggaaaatgttaggaagtatgggtttttaaaccttgggccttcattttaaaacttttttttttaaaccccagttatttcacttggatttgccaagcttcccgagaaagagatcccgaatctgtgcccagcgctaaaggctctttgttagcatgggcttgtgctggccggtgtgccatattcttgttggagatgaaccgtagcaccagagcccattcttccttgtcagtcttggcccaaagatgtcaccattcctagttatttgtcaccacgtcaattggtgttgattggaaactttttctgagatgggacagaactgctgggttgtctttttccatgtaacttaagcatagtaatataaataaagtaatagttgggatgcttttgggtcctgtgttgcttttaaaaacaccttataaaagagggagagtatttggataaggccaatttttccataggtagtaaaagttttttttcattctcttgaaactagaattgaccatgcatataatattctttgtttaaatgaaagcatactgttgaaacccgcagtgttgcatttagaaaacagttgaacagaatgtcaatgtgcattcatgcaaaaaaacatttaatctgcatctgttttagaaaagggggaaatgaagcaacttgtctaaaaatactgctttacaaagcatttcagcctttccccctcagttttgcattgattttttgacaagtctgtagagcctaatagtttccatcaaaggcctagatctcttatttagcatttttttcagctcttctctcagaagttcagctgttgaaacgaaaactgtactttgtaccctcacatacaaagggatcaaatttgacctggtgttattttagccccaaatttatgacattacacaatattacaaatgtaaatgtttctttacccaaactacttctagatattctagtattggccttcctggtgggaattaaaatgcccggtaaaattggcctaattatttggaatggaatgaatgggatgggatgttttgccatgcctcaatttcctaggtccctttgtcctagaaagggaaatttgcctccagttgaattagtgaaatatttctgtcggttgatattaaaagtgacttctgagtacagttaagttcctcccaatttgccactggggctgttgggttaggaaggcatagggtaactgattaagtagggtatggatactggcatttgaaataagtgggacacaaactatcctttctccaccctgggactcaatctgagaacaacagcattcatttccattcatttccatactggcttttgattatatgcagattcctagtagcatgccttacctacagcactatgtgcatttgctgtcacaataaagtatattttgtcttgcaaaaaaaaaaaaaaaaaaa

SEQ ID NO: 134941 - DNA, 467 bp, Homo sapiens; identical to SEQ ID NO: 122699
  misc_feature (1)...(467): n = a,t,c or g

SEQ ID NO: 134942 - DNA, 348 bp, Homo sapiens
agccagtaccaagaactagcagtagccctggattcaagctccgcaataatcagtcaactcagtgaaaacatcaattcactggagaggctgctggaagaggtggcgaagctgttagaacaggagaggtggcaagaggagcaggagaggctgctggagagggagaggctgctggacaaggtggaggagctgctggaacaggagaggctttgggagcaggatgagagactgtggcagcaggagactctgtgggagctggagaggatgtgggtgctggagaggatgctggagctgggttgggaagccctctatgagcagagggcggagtcacacagcggcttcaaggagctg

SEQ ID NO: 134943 - DNA, 5130 bp, Homo sapiens; identical to SEQ ID NO: 116418

SEQ ID NO: 134944 - DNA, 1139 bp, Homo sapiens; identical to SEQ ID NO: 122759

SEQ ID NO: 134945 - DNA, 1302 bp, Homo sapiens
atgaagcttccagaggaaatatcaggcagcaacatttgctgttcagcaatatttgctgttctgcagcctccgatgctgatacccaggcaaacagggtctggagtggacctccagcaaactccaacagacctgcagctgagggacctgactgttagaaggaaaactaacaaacagaaaggacatccacaccaaaaccccatctgtatgtcaccatcatcaaagaccaaagcaccacaccacacctattctaaaattgaccacatagttggaagtaaagcactcctcagcaaatgtaaaagaacaggaattataacaaactgtctctcagaccacagtgcaatcaaactagaactcaggattaagaaactcactcaaaaccactcaactacatggaaactgaacaacctgctcctgaatgactactgggcacataacaaaatgaaggcagaaatgaagatgttctttgaaaccaacgagaacaaagacacaacataccagaatctctgggacacattcaaagcagtgtgtagagggaaatttatagcactaaatgtccacaagagaaagcaggaaagatctaaaactgacaccctaacatcacaattaaaacaactagagaagcaagagcaaacacattcaaaagctaggagaaggcaagaaataactaagatcagagcagaactgaaggagatagaaacacaaagaacccttcaaaaaatcaatgaatccaggagctttttttttgaaaagatcaacaaaattgatagactgctagcaagactaacaaagaagaaaagagagaagaatcaaatagatgcaataaaagatgataaaggggatatcaccacagatcccacagaaatacaaactaccatcagagaatactataaacacctctacacaaataaactagcaaatctagaagaaatggataaattcctcgacacatacaccctcccaagactaaaccaggaagaagttgaatctcttagtagaccaataacaggctctgaaattgaggcaataattaatagcttaccaccaccaacaacagcaagaggcccaggaccagacggattcacagctaaattctaccagatgtatgaaaatgaactggtgccattcctactgaaacgattccaaaatattgaaaaagagggactcctccctaactcattctatgaggccagaatcatcatgttagcaaaacctggcagagatacaacaaaaaaagaaaacttcaggctaatatccttgatgaagatcggtgcaaaaatcctcaagaaaatactagcaaagtga

SEQ ID NO: 134946 - DNA, 1122 bp, Homo sapiens; identical to SEQ ID NO: 121596

SEQ ID NO: 134947 - DNA, 858 bp, Homo sapiens
atgcatcactacacaattgcatcactgtgtggacatcatagagtggacttacatgaacctaggtggtacagcctactacacaccgggctatatggctacgaacctataccacatgctactgttctgaatactgcaagccattgtaacacaatacctccgctgctgatacccaggcaaacacggtctggagtagacctccagcaaactccaacagacctgcagctgagggtcctgactgttagaaggaaaactaacaaacagaaaggatatccacaccaaaaccccatctgtacgtcaccatcatcaaagaccaaagagaagtccttaaaggacctgatggagctgaaaaccatggcacaagaactacatggtgaatgcacaagcctcagtagccaatttgatcaactggaagaaatggtatcagtgatggaggatcaaatgaatgaaatgaagcaagaagagaagtttacagaaaaaagaataaaaagaaaccaacaaagcctccaagaaatatgggactatgtgaaaagaccaaatctacgtctgactggtgttcctgaaagtgacggggagaatggaaccaagttggaaaacactctgcaggatattatccaggagaacttccccaatctagcaaggctggccaacattcaaattcaagaaatacaaagaacaccacaaagatactcctcaagaagagcaaccccaagacacataattctcagattcaccaaagttgaaatgaaggaaaaaatgttaagggcagccagagagaaaggtcgggttacccacaaagggaagcctgtcagactaacagctgatctgtcggcagaaactctacaagccagaagacagtag

SEQ ID NO: 134948 - DNA, 2001 bp, Homo sapiens
atggcagcaagccttttgttccctgatctggggttcttggcctcacggattccaaggaatggaaccttgggccatgcggtgagtgttatagctctattagaagccatggatcacagaagagaaccgtggaacccagcaactagtgttcagctcaattgggacgaacccaaggacttagctgcgcaggaacaatggaccctcagctgcaggtctgttggagtttgctggaggtccactccagaccctgtttgcctgggtatcagcagtggaggctgcaaaacagcggatattggtgagcagcaaatgttgctgcctgatcgttcctctggaatttttgtctcagaggagtacccggccatttggaaatgcagaaatcacccgtcttctgtgtcactcatgctgggagctctagactggagatgttcctattcggccatcttggtaaaccgaatccagcagcatatcaaaaagcttatccgcgatgatcaagtgggcttcatccctgggatgcaaggctggttcaccatatgcaaatcaataaacgtaatccggcatataaacagaaccaaagacaaaaaccacatgattatctcaatagatgcagaaaaagcctttgacaaaattcaacaacgcttcatgctaaaaactctcaataaattagtgttggaagttctggccagggcaatctggcaggagaaggaaataaggggtattcaattaggaaaagaggaagtcaaattgtccctgtttgcagatgacatgattgtatatctagaaaaccccatcgtctcagcccaaaatcgccttaagctgataggcaaattcagcaaagtctcaggatacaaaatcaatgtgcaaaaatcacaagcattcttatacaccaataacagacaaacagagagtgaaatcatgagtgaactcccattcactattgctttaaagaggatgaaatacctaggaatccaacttacaagggatgtgaaggacctcttcaaggaaaactacgaaccactgctcaatgaaataaaagaggatacaaacaaatggaagaacattccatgctcatgggtagaaagaatcaatatcatgaaaaaggccatactgcccaaggtaatttatagattcaatgccatccccatcaagttaccaatgactttcttcacggaattggaaaaaactactttaaagttcatatggaatcaaaaaagagcccacatcaccaagtcaatcctaagccaaaagaacaaagctggaggcatcacactacctgacttcaaactacactacaaggctgcagtaaccaaaacagcatggtactggtaccaaaacagagatatagaccaacggaacagaacagagcccacagaaataatgctgcatatctacaaccatctgatctttgacaaacctgacaaaaacaagaaatggggaaatgattccctatttaataaatggtgctgggaaaactggctagccatatgtagaaagctgaaacgggatcccttccttacaccttatacaaaaattaattcaagatggattgaagacttaaatattagacctgaaaccataaaaaccctagaagaaaacctaggcaataccattcaggacatagccatgggcaaggacttcatgtctaaaacaccaaaagcaatggcaacaaaagccaaaattgacaaatgggatctaattaaactaaagaacttctgcacagcaaaagaaactaccatcagagtgaacaggcaacctacagaatgggagaaaatttttgcaatctactcatctgacaaagggataatatccagaatctacaatgaactcaaacaaatttacaagaaaaaaaaacaaccctatcaaaaagtgggcaaaggatataaacagacacttctcaaaagaagacatttatgcagccaaaagactcatgaaaaaatgctcatcatcactggctatcagagaaatgcaaatcaaaaccacaatgagataccatcttacaccagttag

SEQ ID NO: 134949 - DNA, 669 bp, Homo sapiens; identical to SEQ ID NO: 125949

SEQ ID NO: 134950 - DNA, 1167 bp, Homo sapiens; identical to SEQ ID NO: 121614

SEQ ID NO: 134951 - DNA, 1299 bp, Homo sapiens; identical to SEQ ID NO: 116573

SEQ ID NO: 134952 - DNA, 1260 bp, Homo sapiens; identical to SEQ ID NO: 116570

SEQ ID NO: 134953 - DNA, 771 bp, Homo sapiens
atgcatcacggatgggtaccagatcttcatattcatgcagaagacactctcctgcctttctatcttggggaaaaggacgatgtcacttatgcaataaagcccacttgctggccggggcttgacattattccttcctgtctggctctgcaccgtattgaggctgagttaatgggcaaatttgatgaaggtaaactgcccaccgatccacacctgatgctccgactggccattgaaactgttgctcatgactatgatgtcatagttattgacagcgcgcctaacctgggtatcggcacgattaatgtcgtatgtgctgctgatgtgctgattgttcccacgcctgctgagttgtttgactacacctccgcactgcagtttttcgatatgcttcgtgatctgctcaagaacgttgatcttaaagggttcgagcctgatcctctgctgctgatacccaggcaaacagggtctggagtggacctccagcaaactccaacagacctgcagctgagggtcctgactgttagaaggaaaactaacaaacagaaaggacatccacaccgaaaccccatctgtatgtcaccatcatcaaagaccaaagtgccgcaagccaaaggcaacaatgtggtgatcacaagctacatgacaaacagaggcttcttcgaggataaaaaggcaacatttgcgccaagcttcttaatgaacatcaaaggcaataaaacatccgttgtcaaaaacagcatcctggagcaaggacagctgacagtcaactaa

SEQ ID NO: 134954 - DNA, 373 bp, Homo sapiens
cttaaaagcatcaataacgaatctcatttaaacttcacaaatggaagtcaaaaaataccacctctattatacagatgtgaaaagagaggcccaaagacctcaagcaacttgccctaaatcatatgctaatcaatccctaatcaattcttagcagatggagaggcaggattcaaatccagaattcttaaccagtacccaacagtccatctacaatcttaacaattaccctctactgccccttgggccccctgtccccaggaccctggcccgccgagactcacatccccaggtgagtggtaaccaccagaagtggctgtgtcagggctactgccattgattttctttttcctgttagctcctgctggaatgccag

SEQ ID NO: 134955 - DNA, 1251 bp, Homo sapiens; identical to SEQ ID NO: 115058

SEQ ID NO: 134956 - DNA, 661 bp, Homo sapiens
atggcagcaagccttttgttccctgatctggggttcttggcctcacggattccaaggaatggaaccttgggccatgcggtgagtgttatagctctattagaagccatggatcacagaagagaaccgtggaacccagcaactagtgttcagctcaattgggacgaacccaaggacttagctgcgcaggaacaatggaccctcagctgcaggtctgttggagtttgctggaggtccactccagaccctgtttgcctgggtatcagcagtggaggctgcaaaacagcggatattggtgagcagcaaatgttgctgcctgatcgttcctctggaatttttgtctcagaggagtacccggccatttggaaatgcagaaatcacccgtcttctgtgtcactcatgctgggagctctagactggagatgttcctattcggccatcttggtaaaccgaatccagcagcatatcaaaaagcttatccgcgatgatcaagtgggcttcatccctgggatgcaaggctggttcaccatatgcaaatcaataaacgtaatccggcatataaacagaaccaaagacaaaaaccacatgattatctcaatagatgcagaaaaagcctttgacaaaattcaacaacgcttcatgctaaaaactctcaataaattag

SEQ ID NO: 134957 - DNA, 2317 bp, Homo sapiens; identical to SEQ ID NO: 120362

SEQ ID NO: 134958 - DNA, 1140 bp, Homo sapiens
tcactctgatggtagtttctcttttgctgtgcagaagctctttagtttaattagatcccatttgtcaattttggcttttgttgccattgcttttggtgttttagacatgaagtccttgcccatgcctatgtcctgaatggtattgcctaggttttcttctagggtttttatggtttttgatctaacatttaagtctttaatccatcttgaattaatttttgtataaggtgtaaggaagggatccagtttcagctttctacatatggctagccagttttcccagcaccatttattaaatagggaatcctttccccatttcttgtttttctcaggtttgtcaaagatcagacagttgtagatacatggcattatttctgagggctctgttctgttccattggtctatatctctgttttggtaccagtaccatgctgttttcgttactgtggccttgtagtatagtttgaagtcaggtagcatgatgcctccagctttgttcttttggcttatgattgacttggcaatgcgggctcttttttggttccatatgaactttaaagtagttttttccaattctgtgaagaaagtcattggtagcttgatggggatagcattgaatctataaattaccttgggcagtatggccattttcatgatattgattcttcctacccataagcatggaatgttcttgcatttgtttgtatcttcttttattttgttgagcagtggtttgtagttctccttgaagaggtccttcacatcccttgtaagttggattcttaggtattttattcctttggtctttgatgatggtgacgtacagatggagttttggtatgagttgtcctttttgttgatgttgctgctgttcctttgtgcttgttggttttccttctaacagtcaggaccctcagctgcaggtctgttggagtttgctggaggtccactccagaccctgtttgcctgggttatcagcagcggaggctgcagaacagcagatattggtgaactgcaaatgctgctgcctgatcgttcctctggaagttttgtctcagaggagtacccggccattttgatctcagactgctgtgccagcactgagcaaggctccatgggcgtaggactctctgagccaag

SEQ ID NO: 134959 - DNA, 2277 bp, Homo sapiens
aataccacagactgggtaatttataaagaacagtgcatttggctcacagctctggagactggggagtccaagagcactgcaccagcatttggcaagggttatcccatggcagaatacatcatatggggcagattgacacctcacatggctggctactcctctgagacaaaacttccagaggaacgatcaggcagcaacatctgctgttcaccaatatccgctgttctgcagcctctgctgctgatacccaggcaaacagggtctggagtggacctccagcaaactccaacagacctgcagctgagggtcctgactgttagaaggaaaactaacaaacagaaaggacatccacaccaaaaccccatctgtacgtcaccatcatcaaagaccaaaggatcaaattcacacataacaatattaaccttaaatgtaaatgggctaaatgctccaattaaaagacacagactggcaaattggataaagagtcaagacccatcagtgtgctgtattcaggagacccatctcacgtgcagagacacacacaggatcaaaataaagggatggagggagatctaccaagcaaatggaaaacaaaaaaaggcaggggttgcaatcctagtctctgataaaacggactttaaaccaacaaagatcaaaagagacaaagaaggccattacatgatggtaaagggatcaattcaacaagaagagctaactaccctaaatatatatgcacccaatacaggagcacccagattcataaagcaagtccttagagacctacaaagagacttagactcccacacattaataatgggagactttaacaccccactgtcaacattagacagatcaacgagacagaaagttaacaaggatatccaggatttgaactcagctctgcaccaagtggacctaatagacatctacagaactctccaccccaaatcaacagaatatacattcttctcagcactacaccacatttattccaaaattgaccacatagttggaagtaaagcactcctcagcaaatataaaacaacagaaattataacaaactgtctctcagaccacagtgcaatcaaactcgaactcaggattaagaaactcactcaaaaccgctcaactacatggaaactgaacaacctgctcctgaatgactactgggtacataacaaaatgaaggcagaaataaatacattatttgaaaccaacgagaacaaagacacaacataccagaatctctgggacacattcaaagcagtgtgtagagggaaattcatagcactaaatgcccacaagagaaagcaggaaagatctaaaattgacaccctaacatcacaattaaaagaactagagaagcaagaacaaacacattcaaaagctagcagaaggcaagaaataactaagatcagagcaaaactgaaggaaatagagacacaaaaaatccttcaaaaaatcaatgaatccaggagctggttttttgaaaagatcaacaaaattgatagaccactagcaagaccaataaagaagaaaagagagaagaatcaaatagatgcaataaaaaatgataaaggggatatcaccactgatcccacagaaatacaaactaccatcagagaatactataaacacctctatgcaaataaactagaaaatctagaagaaatggataaattcctcaacacatacaccctcccaagactaaaccaggaagaagttgaatctctgaataaaccaataacaggctctgaaattgaggcaataattaatagcttaccaaccaaaaaaaagtacaggaccagacggattcacagccgaattctatcagaggtacaaggaggagctgtgttggaagttctggccagggcaatcaggcaggagaaagaaataaagtgtattcaattaggaaaagaggaagtcaaattgtccctgtttgcagacgacatgattgtatatctagaaaaccccactgtttcagcccaaaatctccttaagctgataagcaacttcagcaaagtctcacgatacaaaatcaatgtgcaaaaatcacaagcattcttatacactaataacagacaaacagagagccaaatcatgagtgaactcccattcacaattgcttcaaagagaataaaatacctaggaatccaacttacaagggatgtgaaggatctcttcaaggagaactacaaaccactgctcaacgaaataaaagaggacacaaatggaagagcattccatgcccacggattggaagaatcaatatcatga

SEQ ID NO: 134960 - DNA, 1660 bp, Homo sapiens
atggctgggtactcctctgaggcaaaacttccagaggaacaatcagccagcaacatttgctgttcaccaatatctgctgttctgcaggctccgccgctgatacccagggaaacagggtctggagtggacctccagcaaactccaacagacctgcagctgagggatatagaagacttagatcactatgagatgaaagaagagcctactagtgagaagaagttggaagatgaaggaactgaaaaagaaaattgggcaatattagagaaaattaggaagactgaaaggcaaggccatttaaatttaaaagaatattggcagaggaagagccctggcattccagaaggagctaacaggaaaaagaaaatcaatggcagtagccctgacacagccacttctggtggttaccactcacctggggattcagcaacaggtatctacggggagggccgtgcatcctctactaccctggaggatctggagagccagtaccaagaactagcagtggccctggattcaagctccgcaataatcagtcaactcactgaaaacatcaattcactggctcgtgtttctggaggaggttcagcagcccctctctccagggccctctcctccctgtgctttgggcacgttcgcacatcgaaggaggagaagaagcatgagatacatcgagtacagaagcttgggtttaccaaaaccagatgggtaagatggggctggcatgacctgggaggaggactggcatcagagggctgtgggggtgacttagaatgccccagggaggagaggctgctggaagaggtggcgaagctgttagaacaggagaggtggcaagaggagcaggagaggctgctggagagggagaggctgctggacaaggtggaggagctgctggaacaggagaggctttgggagcaggatgagagactgtggcagcaggagactctgtgggagctggagaggatgtgggtgctggagaggatgctggagctgggttgggaagccctctatgagcagagggcggagtcacacagcggcttcaaggagctgaacaatgagaacaagagcgcaatgcagttggaggaacaagtaaaggagctgaagaagccgggtgaagctgaagagccaagaggctccaagtctgcggcagcagcaagaccagtacctgtgtaccgctctaggagccctgatcccacaggagcttgggtgtgcggacaagcagtgtggactccccaggagcacccaggcttgggtggagaagctgttggtacaggagaggctgcaggaggagcaggagatgctgcatgccattctttttgggctgccgagaacagggagataaacatcaccatcatctaagagcggggtcaaggaattgaaaaaaaaaaacaaaacatttaagggggttaatatcctacacaattcatttactccatttgaatgttagagcccccagcaggccatctaaggtagagcagctacaagatgagaccaccacctaaggaaggagctagagagtgtgggaagacagctcaggctgaggtggaaacaatcagatgttgagtctctgacagagcaggagagagctacgtgacagagagagctacgtgacagagagagcacgtgacagagatagcatcatgaccttgcatatatgatt

SEQ ID NO: 134961 - DNA, 5120 bp, Homo sapiens
atggggctcatgctagggacctgccggtcagggtgcagcatgagactggtgagtgtgaagcttcaggggagcactgggggaagagagtctccaagggcagagctggcttctgatttgatgaccacagcccatccccagttcacagtgctgtgtccacaagatggtgctgagaccactcaaggaaatgctcctgggtcccaggtagccagtcatccagccccaagacctttctcaaaatgggcagatgaatgtgctactaacaggtcaggagcccagatcaaagagctggtttgggaggtggataatgaaggttgtgaagtctgtgctccctctgagaagcctgaggaaaatgcaggtggctccctcaatcaacagacatccaaaatggacttcagtgctgaaagggagctggggccctgtgctatgtgcgtcaaagacattatgactcagcaccgagaaagaaagggcagggttaaaagatatgcagaaaagagggaaagcactgtaaattccagggtgtgtggaaggtcaataaagtgtcaacagaggcagagaggacaatcctcagattgtcccagtctaggcctagttaaggagtcactgtttgatatttcagaaaacatccttggaccaaacataccaaagaccaagtacaccaggacgtatctgctgtcccttgctgtcatccatcacctgatgccatccaggttgatatttctattactggttgagcattccaaatttcaaagtccaaaattccaaatgctccaggatgcaaaactgagcaccaacatgattctcaaaggaaatactcattggagcatttcagattttcagatttgggatgcacaactggtcctatattgcgacctagttggactttcgtttaaaaaaaagtctaaattatgcagaagggagacgtcaaagaaaaaggagagactgaagaacaagaaggctgaaagtaatgaaaatagaattgctagacagtgtcctggagggacaagagggaatggggtagagagagcacaggccgggtatgatgaaaacagagaagtgaccgttgatttggcaatgtggaaggcattagtgtcctcagctagagcagttttagtggcatgcccatttttcagtgaagaattttactttgagattccaagaactttccagtatttgtctttctatgtttatgataagaatgttttacaaagagatctccgtatagcgctgcggccggactcacgggtccggaagcaccatggacccccggggaaacgcgccggcggcgaaggagccgagccccatcttgatgtggaagaaatggaggactcagaaccaaggatttccaagtgatttcttccaaagcacaggaatctcactctgttaaagctggtctgttctaactgagatgacagtcatgtccctttccagggacctcaaggacgactttcacagtgacacggtactctccatcttaaatgagcagcgcattcggggcattttatgcggatgtccactatcattgtggaagatacccaaatttaaagcccatagcaatgttctggcagcttcaagcctgtattttaaaaatatcttttggagccatacaatctgaattttcagccaacgtcctggagcttgacgatcctaaaagctgaagtgtttactgaaatacttaattatatctacagttccacgagtcgttgtcaagagacaggaaacagtcactgatctcgcagctgcaggaaaaaagctgggaatatcgttcttggaagaccttactgatcgcaacttctcaaattccccgggtccctatgtattctgtattactgaaaagggagtggttaaagaagaaaaaaatgaaaaaaggcatgaagaaccagccatcactaatgggccaaggatcacaaatgcattttccatcatcgaaacagaaaatagtaataacatgttttccccgctggacttgagggcaagtttcaaaaaggtctccgactccatgagaacagctagcctttgcctggagaggacggacgtctgccacgaggcagagcctgtccgcacacttgccgagcactcatacgctgtttcttccgtagctgaagcttacagaagtcagcctgtacgtgaacatgatggcagttcacctggtaacacagggaaagaaaattgtgaagcccttgcagcgaaaccgaaaacatgccggaagccaaagacattctccataccacaggattcggattcagccacagaaaatataccaccccctccagtatccaacttagaggttaatcaagaaagaagtccacaaccagctgctgttctcactcgttcaaaatctccaaacaatgaaggagatgtccatttttccagggaagatgaaaatcaatcttctgatgttcccgggccgccagccgcagaggttccacctctggtgtacaattgtagctgctgttccaaagcctttgacagcagcactctgctcagtgcccacatgcagcttcacaagccaacccaggagcctttagtgtgcaagtattgcaacaaacaattcaccaccctgaacaggttggatcggcatgaacagatctgcatgaggtcaagccacatgcccattcctggaggaaaccaacgctttttagaaaactatcctaccattggacaaaatggaggttcattcacaggtccagaacctttattatctgaaaataggattggtgaattttccagtaccggaagtactttgccagacacggaccacatggttaaatttgttaatgggcaaatgctctacagttgcgttgtgtgcaaacgtagttatgtgaccttatctagcctccgaagacatgcaaatgttcactcctggagaagaacatatccttgccattactgcaacaaagtatttgcattggctgagtacaggacaaggcatgaaatttggcatacgggagaaagacgatatcagtgcattttctgtcttgaaactttcatgacctactatatactcaaaaatcatcagaagtctttccatgccatcgatcatagactttccatcagtaaaaaaacagcaaatggaggcttgaagcctagtgtctatccgtataaactttataggctactgcctatgaaatgcaagagagccccttataagagctaccgaaattcttcctatgaaaatgcacgagaaaacagtcaaatgaatgagtctgcacctggtacctatgttgttcagaatccacacagctctgaattaccaacgctgaatttccaagatactgtaaacaccctgaccaacagtccagccatcccattggaaacatctgcatgtcaggacatacccacttctgccaatgtacaaaatgcagagggtaccaaatggggagaggaggcattgaaaatggatcttgacaataacttttattcaactgaggtgtcagtttcttccactgaaaatgctgtcagttctgacctccgggcaggggatgtacctgttttatctttgagtaatagcagtgagaatgccgcctctgtgatcagctacagtggctctgcaccctcggtcattgtacacagcagccagttttcatcggtgatcatgcacagcaatgccattgctgccatgaccagcagcaaccacagagccttttcagacccaagctgtcagtcagtccctgaaagatgacagtaagcccgagccagataaagtgggtaggtttgcaagcagacccaaaagcattaaggagaaaaagaaaactacatcacataccaggggagaaataccggaggagtcaaactatgttgctgatcctggaggatcactgagcaaaaccacaaatattgctgaagaaaccagcaaaattgaaacctacattgcaaaacctgctctgccgggaacctccacaaatagtaatgttgcacccctttgccaaataacagtgaaaattggaaacgaagccattgtgaaaaggcacattctaggatctaaattgttttataaaagagggagaagacccaagtatcagatgcaggaggagcctttgccacaggggaatgacccagaacccagtggagacagcccactcgggctttgccaatccgagtgcatggagatgagtgaagtgttcgatgacgcaagtgaccaggattccactgacaaaccgtggcgcccttactacaactacaaacccaaaaagaaatccagacagttgaaaaaaatgaggaaagtcaactggaggaaggagcacggaaacaggagcccgagccataaatgtaaatacccagcagaactggattgcgccgtggggaaggctcctcaggataaaccctttgaggaagaagaaactaaagagatgcccaagctgcagtgtgaactctgtgatggagacaaagcagtgggggctggaaaccaaggaaggccccaccgacatcttacttctcggccatatgcctgcgagctctgcgccaagcagttccagagcccttccacactcaaaatgcacatgagatgtcacaccggggagaagccataccagtgcaagacctgcggacggtgcttttcggtgcaaggaaacttacagaaacatgaacgcatccacctgggcttgaaggagttcgtctgtcagtattgcaacaaggcattcaccttgaatgagaccctcaaaatccatgaaagaatccatactggagaaaagcgttaccactgtcagttctgctttcagagatttttgtatctctccaccaaaaggaatccacgagcagaggcatattcgggagcataatgggaaggggcttatgcctgctttccagtgccccaaaaatttgcaaaaacaagctgcagccctttggaatgcacccaaaaggaaccactttttttcaaaagcccaagtcagcaggggaaattagggtgacgtgtgccacgaaaactcaaatcccttggagaatcaacatttcattggttcagaagacaatgaccaaaaggataacatacaaaccggtgtggaaaatgttgtcctttgagtggcaagaattagaaaaatcttcaaaaatatagttggtggtttttttagttatgatttaagtttagtttcattttgtccatgtgacagtcatgaaggagtgaaatt

SEQ ID NO: 134962 - DNA, 257 bp, Homo sapiens
agcgttatctaactcctggagggtggactctgtcctggcttgtttggtgtcctcagatatctttcacacagtagagcaaaatcaccagccctgcactgatgtcactttatgtagaaaaaggccttagctggacctgtgttgccgtctatgcaaatgcatgcaaatactccaggcaatctgattctgaagctaaagagctttcatccccttgccttgcccttccaacaaaccctaggcccttgagaagctgatacttc

SEQ ID NO: 134963 - DNA, 693 bp, Homo sapiens
atgaagcggaagagacaggcagcacctctcttctctcaccagaaccttgtgtccaaggaggtccttcaggagacctgggatgagtggtgcttccccaaaacagactcatggacattaaacatcatcagaatggcacaagagggcaaagaagaaaacagcctcataccactcctggtgaaccccatgaacatctacgaagaacagaagattatgttcttgtacagcttgagcctgccagtggagacactgggcccggcatccaggatggacccagaatctgagagagccctgcaggcccctcacagcccctccaagacagatgggaaagaattagctgggaccatggatggagaagggacgctcttccagactgaaagccctcagtctggcagcattctaacagaggagactgaggtcaagggccctgcatactcacatctgacggagtttgcaccacccccaactcccatggtggatcacctggttgcatccaacccttttgaagatgacttcggagcccccaaagtgggggttgcagcccctccattccttggcagtcctgtgcccttcggaggcttccgtgtgcaggggggcatggcgggccagcccagtgctcctcctgccttgcaaacggacgacccgtactccaaagctcactccgtgacacccaaaagcactcctcgtgtcacgtga

SEQ ID NO: 134964 - DNA, 3270 bp, Homo sapiens
ggcacgaggcaagagctggttcaggtggcagccacagcagcctcagggacctcagcaactatggcctcctgcccagactctgataatagctgggtgcttgctggctccgagagcctgccagtggagacactgggcccggcatccaggatggacccagaatctgagagagccctgcaggcccctcacagcccctccaagacagatgggaaagaattagctgggaccatggatggagaagggacgctcttccagactgaaagccctcagtctggcagcattctaacagaggagactgaggtcaagggcaccctggaaggtgatgtttgtggtgtggagcctcctggcccaggagacacagtagtccagggagacctgcaggagaccaccgtggtgacaggcctggggaccagacacacaaggacctggaaggccagagccctccacagagcctgccttcaacccccaaagcagcttggatcagggaggagggcccgctgctccagcagttgacgatgacacccgacgtggacatggaggggtctgcggagacggcggggccggggaggccggcccacctcagcccatggtgcccctggctgtggagaaccaggctgggggtgagggtgcaggcggggagctgggcatctccctcaacatgtgcctccttggggccctggttctgcttggcctgggggtcctcctcttctcaggtggcctctcagagtctgagactgggcccatggaggaagtggagcggcaggtcctcccagaccccgaggtgctggaagctgtgggggacaggcaggatgggctaagggaacagctgcaggccccagtgcctcctgacagtgtccccagcctgcaaaacatgggtcttctgctggacaagctggccaaggagaaccaggacatccggctgctgcaggcccagctgcaggcccaaaaggaagagcttcagagcctgatgcaccagcccaaagggctagaggaggagaatgcccagctccggggggctctgcagcagggcgaagccttccagcgggctctggagtcagagctgcagcagctgcgggcccggctccaggggctggaggccgactgtgtccggggcccagatggggtgtgcctcagtgggggtagaggcccacagggtgacaaggccatcagggagcaaggccccagggagcaggagccagaactcagcttcctgaagcagaaggaacagctggaggctgaggcacaggcattaaggcaagagttagagaggcagcgacggctgctggggtctgtacagcaggatctggagaggagcttgcaggatgccagccgcggggacccagctcatgctggcttggctgagctgggccacagattggcccagaaactgcagggcctggagaactggggccaggaccctggggtctctgccaatgcctcaaaggcctggcaccagaagtcccacttccagaattctagggagtggagtggaaaggaaaagtggtgggatgggcagagagaccggaaggctgagcactggaaacataagaaggaagaatctggccgggaaaggaagaagaactggggaggtcaggaggacagggagccagcaggaaggtggaaggagggcaggccaagggtggaggagtcggggagcaagaaggagggcaagcgacagggcccgaaggaacccccaaggaaaagtggtagcttccactcctctggagaaaagcagaagcaacctcggtggagggaagggactaaggacagccatgaccccctgccatcctgggcagagctgttgaggcccaagtaccgggcaccccagggctgctcaggtgtggacgagtgtgcccggcaggagggcctgactttctttggcacagagcttagccccagtgcgggcaacaggagcttggcctctctgcttaagaacatacttggcacggctgccctgggctgggcagctgaccaaggagctacccctctcacctgctttctttggtgaggatggcatcttccgtcatgaccgcctccgcttacgggatcttgtggatgccctggaggacagcttggaggaggtggctgtgcaacagacaggtgatgatgatgaagtagatgcctttgaggacttcatcttcagccacttctttggagacaaagcactgaagaagaggtcagggaagaaggacaagcactcacagagcccaagagctgcagggcccagggaggggcacagccatagccaccaccaccaccaccggggctgacaccctgccccacagggaatggccttggcctggcccagcccaagatcccagcgttatctaactcctggagggtggactctgtcctggcttgtttggtgtcctcagatatctttcacacagtagagcaaaatcaccagccctgcactgatgtcactttatgtagaaaaaggccttagctggacctgtgttgccgtctatgcaaatgcatgcaaatactccaggccctgggatgtgggcttgtgttttgtcactgtgaagggggaaatgggaaaggagcctgttttggggtggggtcttgggaaaggcaatctgatttctgaagctaaagagctttcatcctcttgagtgtatgtccccatagtgggccccttgacccacatggttgaccggtgccttgggatttgactagagttgctggctcgaggcccagcacgaggacttaccctggggttttgttaggtttgggaagcagctgtccctagggggtgaagtcccccccctttttttttttttaccccctgcttctccccacgggcttcacctcccctatgtgaacttgtagactcaagatccccaataaaggtgctgttgcaagctaatgatgcctaggtggttttcttaagcaccaggggacaaccccacacccccctgccctgaatggatgggtcccatccccaggcactgggtactttgccccctttgttctgtaatcccccttttggcctttgccttggccctttccaacaaaccctaaggcccttgagaagctgatacttctccttttgctcacagctgccttggccccacccctgggagcatgtagcaaattgagtgtgggttttggagttctgagcctcaggctcaaatccaggccaagtgatcttgggcaagttaatctctgggaactttggggttttcttaatcctcaaaaaaggcgatggaagggctggggaagtgattaaataaaagcaacgcaagaaaaatgaaaaaaaaaaaaaaaaaa

SEQ ID NO: 134965 - DNA, 386 bp, Homo sapiens
tttcgtggagggccctgtcccctgtccctttaaggaggaggtcctgacgccggcctagagtgcggcgtattccccacccgccgtgccctcaccccatagccaagtccgccgttctgacccccggctgcaaggcgccaccatggtgaagatcgtgacagttaagacccaggcgtaccaggaccagaagccgggcacgagcgggctgcggaagcgggtgatggtgttccagagcagcgccaactacgcggagaacttgatccagagtatcatctccaccgtggagccggcgcagcggcaggaggccacgctggtggtgggcggagacggccggttctacatgaaggaggccatacagctcatcgctcgcatcgctgcctgcaacggga

SEQ ID NO: 134966 - DNA, 531 bp, Homo sapiens
atggtgaagatcgtgacagttaagacccaggcgtaccaggaccagaagccgggcacgagcgggctgcggaagcgggtgaaggtgttccagagcagcgccaactacgcggagaacttcatccagagtatcatctccaccgtggagccggcgcagcggcaggaggccacgctggtggtgggcggggacggccggttctacatgaaggaggccatccagctcatcgctcgcatcgctgccgccaacgggcaagctgaactcactgccttaactcgagacctcgctctcgcaaaaggactacgcgtcaatatttatactgactgtaaatatgccttccatatcttgcaccaccatgctgttatatgggcagaaagaaatttcctcactatgcaagggtcctccatcattaatgcctctttaacaaaaactcttctcaaagccgctttacttccaaaggaagctggagtcattcactgcaaaggccatcaaaaggcatcagatcccatcgctcaagacaatgcttatgctgataag

SEQ ID NO: 134967 - DNA, 222 bp, Homo sapiens
atgtcgcaaaacaaggcagaaatctgtagccaagtacgtctcactcagaggaaagaactgattgggacagaaggcactaaaaattgcatttttgcattttgttgctttgtttggtctgatcacctgcttgggcagaacacaccactgggtcttagatttggtgggggcagggagaggcagtttcatgtgtcttcacagaacagtctgcagacctgcagcttg

SEQ ID NO: 134968 - DNA, 951 bp, Homo sapiens
atggccgctaatgtgctgtgtggccttgtcgtgtcatctacgccagtgtctgccataatcggtcgcttggttatcggacagaatggaatcctctccacccctgctgtatcctgcatcattagaaaaatcaaagccattggtgggatcattctgacagccagtcacaacccagggggccccaatggagattttggaatcaaattcaatatttctaatggaggtgagtttgctgtcattttgaggacaggtcctgctccagaagcaataactgataaaattttccaaatcagcaagacaattgaagaatatgcagtttgccctgacctgaaagtagaccttggtgttctgggaaagcagcagtttgacttggaaaataagttcaaacccttcacaggcatgtttactttcctcctctttctgcccactcctatttccaagttgagcgattttcctttcaacgttttagtagagggtcttcagctttggaaagatttccctgcggatactcccagttctgtggcccctggaatggcttcaaaaatttcctcctccctgatcgtatttcaactgcttttcctgcctccacttggcaacagcttggaagttaaaagctcaggggaggaagaaggaggtggctggagccatggggcagtggagggcttccaaagagatgccgcagtgtgtgtgccccagggagtgcgggagaggagtcctgagaggcgggcagcagcacccagccaggcttccccgccttccagcgttgatgtggtctccccttccctctacaaactgattactccttcaaaagcttcagcagagtggtccctaatgggttccgacgtggcaggaatggggctcacacagcacagagataagggcccagcagcagggccaaaacgcttccagtgctacagcccagatgctccaccacaaaagaaagcaacgaactga

SEQ ID NO: 134969 - DNA, 1244 bp, Homo sapiens
agaattttgatacaaagaggaatgaactaacaagacaaggatttatggatttgaatctaatggaagctaatgatcgagaaggagatccttgtgacctttgggtaactctacactctatgggctacaataaagctctggagttgacagagctgcttgctgtcccccctccaggttctgaccacatccgtgagaaagatggactgtgggctgtccttgcctggctctccatcctagccacccgcaagcagagtgtggaggacattctcaaagatcattggcaaaagtattggccggaatttcttcaccaggtgagccacagcccagctggggtacaaggccttggtgtgatctgcagtcagcccgtgggcctcaacttcgtgacttcttccaggtatgattacgaggaggtggaagctgagggcgcaaacaaaatgatgaaggacttggaggccctgatgtttgatcgctcctttgtggggaagcagttctcagcaaatgacaaagtttacactgtggagaaggccgataactttgaatacagcgacccagtggatggaagcatttcaagaaatcaggtagaaacagaccggtgtgtaatggtttatgcccttgttctgtgcactgtccagtaccctcattctgggattcttaacctggactccagagggatttttgcactctctggaatgatatgcaagatgatgtgtccattgtacatgcagaaaggagccccagaatctaagaaagagggagaactgtgggaacttagatgtcaactcctctcttttctgtcagcagattatagcagagtgacagcattgctaatgaatggcaccattaaacaccagatggggattggtgacgaacagcaggtgaagagcagcatctttttgggcttgcgcctcattttcacagatggttctcgaatcgtcttccgactgagcggcactgggagtgccggggccaccattcggctgtacatcgatagctatgagaaggacgttgccaacattaaccaggacccccacctaacgcccagccctgtgccctgcaggaatgggggtggaagggaaaggaaggaaggcactgtgactgacagccctggggccacatggaatctgagaggagtttcgccccaggaacagagtgctgattatagaagagaaatgaggaagattgtgggatatccaaaaacactgacaaaacaatattataatgaacaaaaagctataagaaactattga

SEQ ID NO: 134970 - DNA, 2620 bp, Homo sapiens
tttcgtctgtcccctgtccctttaaggaggagggccatacgccggcctagagtgcggcgtagcccccacccgccgtgccctcaccccagagcagctgcagcctcagccggccgcccctccgccagccaagtccgccgctctgacccccggcagcaagtcgccaccatggtgaagatcgtgacagttaagacccaggcgtaccaggaccagaagccgggcacgagcgggctgcggaagcgggtgaaggtgttccagagcagcgccaactacgcggagaacttcatccagagtatcatctccaccgtggagccggcgcagcggcaggaggccacgctggtggtgggcggggacggccggttctacatgaaggaggccatccagctcatcgctcgcatcgctgccgccaacgggatcggtcgcttggttatcggacagaatggaatcctctccacccctggctgtatcctgcatcattagaaaaatcaaagccattggtgggatcattctgacagccagtcacaagccagggggccccaatggagattttggaatcaaattcaatatttctaatggaggtcctgctccagaagcaataacttgataaaattttccaaatcacgcaagacaattgaagaatatgcaagtttgcccctgaccttgaaagtagaccttggtgttctgggaaagcagcagtttgacttggaaaataagttcaaacccttcacagtggaaatttgttggattcggtagaagcttatgctacaatgctgagaagcatcgtttgatttcagtgcactgaaagaactactttctgggccaaaccgactgaagatctgtattgatgctatgcatggagttgtgggaccgtatgtaaagaagatcctctgtgaagaactcggtgcccctgcggaactcggcaggttaactgcgttccctctggaaggacttttggaggccacccaccccttgacccccaacctcaccctatggcagctgaccttgggtggagaccatgaagtcaggagagcatgattttgggggctgcctttgatggagatggggatcgaaacatgattctgggcaagcatgggttctttgtgaacccttcagactctgtggctgtcattgctgccaacatcttcagcattccgtatttccagcagactgggggtccgcggctttgcacggagcatgcccacggagtggtgctctggaccgggtggctagtgctacaaagatttcttttgtatgagaccccaactgggctggaagttttttgggaatttgatggacgcgagcaaactgttccctttgtggggaagaaagccttcgggacgggttctgaccacatccgtgagaaagatggactgtgggctgtccttgcctggctctccatcctagccacccgcaagcagagtgtggaggacattctcaaagatcattgggcaaaagcatggccggaatttcttcaccagggtattgattacggagggaggtgggaagcttgaggggcgcaaacaaaatgatgaaggacttggaggccctgatgtttgatcgctcctttgtggggaagcagttctcagcaaatgacaaagtttacactgtggagaaggccgataactttgaatacagcgacccagtggatggaagcatttcaagaaatcagggcttgcgcctcattttccaaaatggttttcgattcttcttccggatgaaacggcacgggaagtgccggggcccccaattcgcctgtacatcaatagctatgagaaagaacgttgccaagattaaccaaggaccccccagggtccatgttggcccccccttattttcccattgccctgaaaagtgtcccggcttgcaggagaggacgggagcgcacttgcacccactgtcatcacctaagaaagatagtcctgatgtggtatgtccctccacccccgggaccccatcccaagtcatctgattgaaagagcatgaccagaaaccaaaatgtaattcaccaaagccatttttaggaatttgactttttcactaacccagttggacggagcagtgcatttaaccagggcactgcccaaaacaagatgccccttggggagctgtgaggggaaagagggaccctgtggggcttaagaatcaatcctcaattcccttttccatgcccctccctgcattgcctgcctgccgtggggtatttgtcgtccttagcccatcagggtacagttttacacttacaatgttaaggctatagggtggggagcattcaggcagttgaggtgaggggccttctttcatcccttagggtgtgggcaatgaaaatgatgggtgcaagttcctttctcttttgtgaatctttccccccatttcctgttttacatgtaacccaacaaaatgcaatttctaagtgccttctgtccaatcagttctttcctctgagtgagacgtactatggctacagatttctgccttgttttgcgacattgtcccattcacacaagatattttggggataataaaggaaaataagctactaaaaataaaaaaaaggggccccccttcattaaaaaaccattttatagcccccatttaggaacctaattcctttctttatgggccg

SEQ ID NO: 134971 - DNA, 548 bp, Homo sapiens
  misc_feature (1)...(548): n = a,t,c or g
tttttttggcaagcaattgagctttattttcttgtaatataatttaatttctcttttgagacctcattctatctgatggcagaaaaacaatcaaataagttccagatagactcagtcatttcagggttttctcaggcattttagatctcacttaactcaggatactctcacatacttccttctctccaggaggcatctcggggcttgctgggcatcctggcccaggagaggcatttagtccaggctgatcccctggagagaggcgtcacccagatgtgatgcatcctgtctcatgctgggtcatcatgtcctgcaggccactctgcacccgcctgattctgagtgacagccctcctgggccaccatcagacatttgtgtgtcccgcaaaaacccctcgaactacccagccatggtgttgccgcaatgttttaccatatgcattatttagggctgtctggatatccttctccccatttttcacttctgtcaaaaatcccttcaaaaatntgagacctctcttcagccacaagagggcttcagtcgctga

SEQ ID NO: 134972 - DNA, 1494 bp, Homo sapiens
atgtcagaactaagactctgctgtgacctccttgttcagcaagtagataaaacaaaagaagtgaccacaactggtgtgtccaattctgaggagggaattgatgtgggaactttgctgaaatcaacctgtaatacttttctgaagaccttggaagaatgcatgcagattgcaaatgcagccttcacctctgagctgctctaccacactccaccaggatcaccacagctggccatgctcaagtccagcaagatgaaacatcctattataccaattcataattcattggaaaggcaaacggagttgagcacttgtgaaaatggatctttaaatatggaaataaatggtgaggaagaaatcctaatgaaaaataagaattccttatatttgaaatctgcagagatagactgcagcatatcaagtgaggaaaatacagatgataatataaccgtccaaggtgaaataatgaaggaagatagaatggaaaacctgaaaaatcatgacaataacttgtctcagtctggatcagactcaagttgctctccagaatgcctctgggaggaaggcaaagaagttatcccaactttctttagtaccatgaacacaagctttagtgacattgaacttctggaagacagtggcattcccacagaagcattcttggcatcatgttgtgctgtggttccagtattagacaaacttggccctacagtgtttgctcctgttaagatggatcttgttgaaaatattaagaaagtaaatcagaagtatataaccaacaaagaagagtttaccactctccagaagatagtgctgcacgaagtggaggcggatgtagcccaggttaggaactcagcgactgaagccctcttgtggctgaagagaggtctcaaatttttgaagggatttttgacagaagtgaaaaatggggaaaaggatatccagacagccctgaataacgcatatggtaaaacattgcggcaacaccatggctgggtagttcgaggggtttttgcgttagctttaagggcaactccatcctatgaagattttgtggccgcgttaaccgtaaaggaaggtgaccaccggaaagaagctttcagtattgggatgcagagggacctcagcctttacctccctgccatgaagaagcagatggccatactggacgctttataagaggtccatgggctggaatctgatgaggttgtatgatggctgctgggcagcacctcctaacttcagggaataaagtgctaaagtgttttgttgccctacttaatttccagcaacagcctcaaccctctccaaccccttcacctggggggatggacaggaggtggcaaaacccagtgcttttataatttttaaaatgcatatgtgttttgtttaaagatcaaggtgctatatatttcagttcagcaggcctactggaaaccaaatgataagctgctgtagacttgaacagcaagttataagagcagatttaacaaacaa

SEQ ID NO: 134973 - DNA, 2094 bp, Homo sapiens
atgggagttgagctgttcacaccagccagcgtcatgggagtgaaaagatgctgttgttctataccaggacagctttctgggaatggggagccaaggttctcagaaattgactcttctgtttcagtgaggggaggttggcagcctcgatggttccttctctgtgggggaatattgtcctattatgattctcctgaagatgcctggaaaggttgcaaagggagcatacaaatggcagtctgtgaaattcaagttcattctgtagataatacacgcatggacctgataatccctggggaacagtatttctacctgaaggccagaagtgtggctgaaagacagcggtggctggtggccctgggatcagccaaggcttgcctgactgacaagtttgctgaaaacactgaaaacttgaaaaccaaaatgtcagaactaagactctactgtgacctccttgttcagcaagtagataaaacaaaagaagtgaccacaactggtgtgtccaattctgaggagggaattgatgtgggaactttgctgaaatcaacctgtaatacttttctgaagaccttggaagaatgcatgcagatcgcaaatgcagccttcacctctgagctgctctaccgcactccaccaggatcacctcagctggccatgctcaagtccagcaagaaagtaaatcagaagtatataaccaacaaagaagagtttaccactctccagaagatagtgctgcacgaagtggaggcggatgtagcccaggttaggaactcagcgactgaagccctcttgtggctgaagagaggtctcaaatttttgaagggatttttgacagaagtgaaaaatggggagaaggatatccagacagccctaagtttctcatcaaatgttgtacttgatttggagactgggcccaggggatgtattgactttgtgaagaaagaggagactttgaagggcaaatgctgctttgtgactgcaataatcacagccagtctcagctttttcttccctctcttctccttcggcacaattttcaatggaaaagagaagggaggctgtaaatttgacatttttgtcctgatgttcaggcttatttcaaagaagacacagacacaacaagctctgcgtaaacggttttttgagaaatgtttacacaatagttactcagaacctgtaggctccttgatgcatatttcttctgggataatggttcctttttctcattttgaagtcccagccttcataagtagaactgataccttgtttgaaatgagggaggataatgcatatggtaaaacattgcggcaacaccatggctgggtagttcgaggggtttttgcgttagctttaagggcagctccatcctatgaagattttgtggccgcgttaaccgtaaaggaaggtgaccaccagaaagaagctttcagtattgggatgcagagggacctcagcctttacctccctgccatggagaagcagctggccatactggacactttatatgaggtccacgggctggaatctgatgaggtgctgtaccctttggggtgcttggactgctgtccagagggtgaacagagctggtttcagaaaaagaatgtgtttggatgtctgtcccaacttccagtgggtagaggagtacagctgccttgtggtcatgagggtccagcaaaggagaacagagtgtggctgtgcatgccacttgctattactccagaatctgcagaggcacaaaatagagataaccacctttggagcagtgtggttcgggttgatggagaattgatgaacgatgatggtctgacatcagcactgaggacacagatcacgtttgggatgatttgctgtgtgaatgcattgtcctcagagaacaaagttgtcgcatctttgctgacacttgtaagattcactgctgcccctagtctccccactttgcactgtgtgtcacggcaccttcaagtagaagaccctcatctagtcatgtctgtatgtgaatgtggcactaccatttccttgcctgagccccggagccagctgcagtgctccacagctgtatcccagttggaggattccagaagaatggctgagcattag

SEQ ID NO: 134974 - DNA, 453 bp, Homo sapiens
atgaagaaaccaaaagcgtagcaaggtcaagccaagatgcaagcgcgactgacacggtcccttggcaggccttgtctatacttctggtggcagggaattaccgctgccttccagttggttttatgtggcgggaaggtgacctcagagatgtggtgctggaaaaagccatgcacaagtgcatcttgaagcccctcaaggggcatgtggaggccatgctgaaggactttcacatggccgatggctcatggaagcaactcaaggagaacctgcagcttgtgcggcagaggaatccgcagaagctgggggtcttcgccccgacccctgattttgtggatgtggagaaaatcaaagtcaagttcatgaccatgcagaagatgtattcgccagaaaagaaggtcatgctgctgctgcgggtctgcaagctcatttacacggtcatggagaacaactcag

SEQ ID NO: 134975 - DNA, 455 bp, Homo sapiens
ggtccaattcaagcatgtcacactgggctatgacataggtcaggactggcaagaagtcatcagcgccatacatcctccctgagagcaggaagagaaggagatggaatatttttaccaacttttctttctttcacatccttcttgctgcttttattagacagcaaggagtcactctggggggaactgtgctatttataaacagaggtgagtgtttctggaatcctatgtagcctctgaccctcccagctgctaatgttagagaccagcccttacagtttcagaatgaatgtctatgaaccaatgaacacattacagattttctccctacttttataatttgtataaaattatgtgatagaacagaatactcgttaaaatattttaactttcagcaaacaagattataaaatgcttacaaaatatttacttatgctaattctttgtgtcttacttcc

SEQ ID NO: 134976 - DNA, 1314 bp, Homo sapiens
atgttggaacatgggggtctcatcgtgcaggaagatgaggtggactggagctttttcgtgaccaccatgtcggtgaggttgcggttcctgtcccctggggacacaggggccgtgggggtcgtgggccggagcgcctccttcgcaggcttcagcagtgcacagagccggaggatcgcaaacctgccttttcccgagtctgcagccctgaccgtctctgccagcctcaagatggcaaacttgcggagggcccggttcaagagaaagtccatcaacaggaactccgtgagatcgcgaatgcctgcaaaatcctccaagatgtacggcacgctgcggaaggggtcggtctgtgcagacccgaagccccagcaggtgaagaagatcttcgaagcattgaaaagaggcctcaaggagtatctgtgtgtgcagcaggctgagctggaccacctgtctggacgccacaaagacaccaggaggaattccaggctgggccgtggcaagaagcaccagagcacaagcccgaccacagaaacactttttagagccagtgctcatggcatttattctattgggcaatgcaggtcatgccgggaaaccccacatcaaagggcagggaaatatgctctgcctctacgtggggaactgcaaagccacatggcacagggtgtggataaatcgaagggtaaagaattgaaggtcgaaggccgtggcggcggcacttttgcccatgaattgctcgctgtggagtacgcaggctgcatttctcccgcatttcgggtgaaggtaaaccagacatttatcgactatcgaaccctaagattacaacctgctattccgcagagcctccctgaagctctccgtttggctgccgacctggcagagcaaaagcaacggctggagcaaaaaatgcttatggatgcacctaaagtcgaattctctgaacgcgttgctaccgccagcggggttctaatccgcaactatgccaaagtgctcggcctgggccaaaactatctcttcacctggttgcgtgataacggaattctgatcgcaaccggtgaacgcagaacgtccccaaacaagaatacatatttcgggcatgtggaggccatgctgaatgactttcacatggccgatggctcatggaagcaactcaaggagaacctgcagcttgtgctgcagaagaatccgcaagagctgggggtcttcgccccgacccctgattttgtggatgtggagaaaatcaaagtcaagttcatgaccatgcagaagatgtataccccagaaaagaagggcatgctgctgatgcggctctgctag

SEQ ID NO: 134977 - DNA, 551 bp, Homo sapiens
ccaagatgcagaagaaagtcctctccctccgcctgccctgtgaatttggggccccactcaaggaatttgccataaaggaaagcacatacaccttttccctggaaggctcaggaatcagtttcgcagatttattccggctcattgctttctactgcatcagcagggatgttctaccatttaccttgaagttgccttatgccatttcaacagccaagtcggaggctcagcttgaagaactggcccagatgggactaaatttctggagctccccagctgacagcaaacccccgaaccttccacctccccataggcctctttcctccgacggtgtctgtcctgcctccctgcgtcagctctgccttataaatggagtgcattctatcaaaaccaggacgccttcagagctggagtgcagccagaccaacggggccctgtgctttattaatccccttttcttgaaagtgcacagccaggacctcagtggaggcctgaaacggccgagcacaaggactcccaacgcgaatggcacggagcggactcggtcccccccc

SEQ ID NO: 134978 - DNA, 3252 bp, Homo sapiens
atagcaaaactctggaaacaactaagcctctatcaaaatagaatggatatgtggattgtggtatatccctatggtggaaaaccgttcccacttacaacaaatgaaccagggcttccacgcctctccacttcctgacgtcatactatttttgtctttgaatagctcattgacacaattgcctcggagatcggagaactgaaacaggagatggtgcgggaaatggtactgcagccagctgaccgtgccgcttctctttctcctagcatggtaagacacaaggatggtggctattccgaggaagaggacgtgaagacctgtgcccgggactcaggctatgacagcctctccaacaggctcagcatcttggaccggctcctccacacccaccccatatggctgcagctgagtaacattctagatatttcctaaagcttgtatttcttttccctccactagatcttcctggttcataaatctaccaagatgcagaagaaagtcctctccctccgcctgccctgtgagttaggggagggtaaaacctgccaggctgactgtgaaccgcctccagctcaattgtcaacctggatcttacaagtccacaaggtcatggatgccagggaaaaacttccccctgaaaggcgcacaagctctctctttttctgaacaatcagggatgttctaccatttaccttgaagttgccttatgccatttcaatagttttcctcctttggtggttttaatgctgaatgtgtaaaaccctaggcagattgtgtaacatcccccaggcccagctgctggtcctgcccattaaaggggaacttcaaggcccgattccttggctggcagctgcactgagctccccagctgacagcaaacccccgaaccttccacctccccataggcctctttcctccgacggtgtctgtcctgcctccctgcgtcagctctgccttataaatggagtgcattctatcaaaaccaggacgccttcagagctggagtgcagccagaccaacggggccctgtgctttattaatccccttttcttgaaagtgcacagccaggacctcagtggaggcctgaaacggccgagcacaaggactcccaacgcgaatggcacggagcggactcggtcccccccacccaggcccccgccacccgctattaatagtctccacacaagccctcggctggccaggactgaaacccagacgagcatgccagaaacagtcaaccataacaaacatgggaacgtagctctgcctggaacgaaaccaactcccatccctccaccccggctgaagaagcaggcttcttttctggaagcagagggcggtgcaaagaccttgagcggcggccggccgggcgcaggcccggagctggagctgggcacagctggcagcccaggtggggccccgcctgaggccgccccgggggattgcacaagggccccgccgcccagctctgaatcacggcccccgtgccatggaggccggcagcggctgagcgacatgagcatttctacttcctcctccgactcgctggagttcgaccggagcatgcctctgtttggctacgaggcggacaccaacagcagcctggaggactacgagggggaaagtgaccaagagaccatggcgccccccatcaagtccaaaaagaaaaggagcagctccttcgtgctgcccaagctcgtcaagtcccagctgcagaaggtgagcggggtgttcagctccttcatgaccccggagaagcggatggtccgcaggatcgccgagctttcccgggacaaatgcacctacttcgggtgcttagtgcaggactacgtgagcttcctgcaggagaacaaggagtgccacgtgtccagcaccgacatgctgcagaccatccggcagttcatgacccaggtcaagaactatttgtctcagagcttcctccgaatgccttgggaggctccatttattgccctcacttctatagatgaagaaaccaaaggcgtagcaaggtcaagccaagatgcaagcgcgactgacacggtcccttggcaggccttgtctatacttctggtggcagggaatttcttctttcttcagacaatagtcatagtagctacactttctttggcagatgtggtgctggaaaaagccatgcacaagtgcatcttgaagcccctcaaggggcacgtggaggccatgctgaaggactttcacatggccgatggctcatggaagcaactcaaggagaacctgcagcttgtgcggcagaggaatccgcaggagctgggggtcttcgccccgacccctgattttgtggatgtggagaaaatcaaagtcaagttcatgaccatgcagaagatgtattcgccggaaaagaaggtcatgctgcaagaaaagttggtaaaaatattccatctccttctcttcctgctctcagggaggatgtatggcgctgatgacttcttgccagtcctgacctatgtcatagcccagtgtgacatgcttgaattggacactgaaatgagcggaggttggcactgggaggacccactctttctgctcttttcaggaggctattacttgacaagcgcatatggagcactttctctgataaagaatttccaagaagaacaagcagcgcgactgctcagctcagaaaccagagacaccctgaggcagtggcacatctagttttctcttctgactgtctcaacattcctcttccacctgcagaattacctccgagttgcatttcaggaggtcaacagtggttgcacaggaaagaccctccttgtgagaccttacatcaccactgaggatgtgtgtcagatctgcgctgagaagttcaaggtgggggaccctgaggagtacagcctctttctcttcgttgacgagacatggcagcagctggcagaggacacttaccctcaaaaaatcaaggcggagcgtgccacagccgaccacagccccacatcttccactttgtctacaaacgcatcaaggaacgatccttatgggcatcattttccaggaacggggaaggaggacctcaccacctcctaggaaggacagggcgggatttcccagtggtggcttccaaaggggagctggaagccttgccttcccgcttctacatgcttgagcttgaaaagcagtcacctcctcggggacccctcagtgtagtgactaagccatccacaggccaactcggccaagggcaactttagccacgcaaggtagctgaggtttgcgaaa

SEQ ID NO: 134979 - DNA, 445 bp, Homo sapiens
  misc_feature (1)...(445): n = a,t,c or g
cggagcatttataaaaaggatgggtggaatcagaaccattttattacacctgtgtcgacattggagcgagaccgattcaaatcacatccttccttgtctaccaccaaccaacagatgtcacccatcattcagtcagcatcaacagctgtattatagtcaagatgactccaacagaaagaactttgatgcatacagattgtatttgcagtctcctcatagctatgaagatccttattttgatgaccgagttcactttccagcttctactgattactcaacacagtatggactgaaatcgaccacaaattatgtagacttttattccactaaacgaccttcttatagagcagaacagtacccagggtccccagactcatgggtgtagcatcaagatgcccaacagaggaactctttctttctaaccttgntcagattgaggtgaana

SEQ ID NO: 134980 - DNA, 660 bp, Homo sapiens
ttttgttgctaattagtttattgaagcaagcgaagaagatacagaagggcatgcatgctaaagaggtgatctgtaagataaagcaggctgctgcaaatcggaagcaaccatgcacttcagttggtatgtgcatttccttttgcccagagcttggtgttgaaatgtagcatctgcaattttctgagcagggtacaggcctttatgtgtggcatccccttggctattgtaatactgcataggtggctgggtcctatcgtattcagagcgagggtctctgattcctaacagtgctggtgaggaagaggtgctgccgactgactgaatgatgggtgacatctgttggttggtggtagacaaggaaggatgtgatttgaatcggtctcgctccaatgtcgacacaggtgtaataaaatggttctgattccacccatcctttttataaatgctccggaggtcccgatattgccataatgtattcaagacctgggctgctgccttcaccactttcagagatgatctgtcgcccctgcctttggttatgttcaccagcttctctatgcctcctgagtcggccagggcttttgcgttctccatgtttttgctggtgacctcgtgcagagcacagcagatggctgccatggtctcattaaacaaaacact

SEQ ID NO: 134981 - DNA, 485 bp, Homo sapiens
ttgtcccacattctggatggaataactcttcttttgatgatgatcataaaattaaatttcagacttcactagtttctgcgtaacacgacaaggttgcctaaggaaccttcaactccgcgggggaagaagctcggaagcaaatgcggtcctgcgaggggctggtagacttcactgttgtatgtgatccacacgtgtgtgaacacatccgattacgacagcaaggaggccactctccagatcaaagggcaagtctccaaagttacaggggcaaggacgtggcaacttaagaaaatatcctgagaaccgtgagaacagagtggcttggtgtgacggtggagaactgcgtgtgcaccctgaggaacctgtctatcggctggagctggaggtccccaggcccggttactgggactgaacgaattggatgacttactaggaaaagagtctcccagcaaagactctgagccaagttgctgggggaagaagaa

SEQ ID NO: 134982 - DNA, 1375 bp, Homo sapiens
aggaaaatgaaacgtagttgaggcaaattagtttattgaagcaagcgaagaagatacagaagggcatgcatgctaaagaggtgatctgtaagataaagcaggctgctgcaaatcggaagcaaccatgcacttcagttggtatgtgcatttccttttgcccagagcttggtgttgaaatgtagcatctgcaattttctgagctattaattgccatagtaacaacagtcgattagtaaatagtcctgtgaaatcacaatttcaaagacaacagtacaatggagactgcctcccctgcaggagtaaagctgccaccagcttttatttatttttaatagacaggtttgagaaaagagtactttttgtggggtagctcacactgacttatttggaacatctaaagtagttataatcgccagacggttgagaatgggaacagtatgaaatcttagtaaccctttgggctggtatcctttaaataaattgtatgcacagctttctgaataggatataaaaatattaacactatgtaacattatttttgttattcttaaaaaataatcacgttgagaagaatcacattataccttttgctatttattcaaactcttctccatgaaaatgtaaatgaaattgatctccattctctggtttgaatttaagagatgagccagtctagaagatgtggcccctgcaaagtgacactgggctgacggttctgatgcatgtggaaaacacagagactgctcgagccaggaggggacggagcaaggggactgtgccagtgagcagccagaaatgatttatttggatacagccctctttttatttgtgcccaccgtacaactacatacatacatacatacaaacaagtacatgcttgttttactttaaacaagcagaaaaggcaacaatccccaaagtaggaaagggaatgactggaacatggtttgctgctgggggactgtctcaatacaagcacaggctacttcccaggccactggccaagcgcctggaaatgcggcttttcaagagactgtatcacacacccaactggcgtcttaccagggtacaggcctttatgtgtggcatccccttggctattgtaatactgcataggtggctgggtcctatcgtattcagagcgagggtctctgactcctaacagtgctggtgaggaagaggtgctgccgactgactgaatgatgggtgacatctgttggttggtggtagacaaggaaggatgtgatttgaatcggtctcgctccaatgtcgacacaggtgtaataaaatggttctgattccacccatcctttgtatgaatgctccggaggtcccgatattgccataatgtattcaacacctgggctgctgcctt

SEQ ID NO: 134983 - DNA, 448 bp, Homo sapiens
gtctgctcggcagcagccctgaagagaaacactgggccggaaccctcaagcatttcggtcggccatgaaagtcaaatccctcagcaggactgagaagggctctgcatccctgtcatctgggtattcccacaaacactcctagaatcataattcctctccttcagattgtttcaagttcctcataaataaaaagtagttctttcatatttccccatttatttccctgtctgtagtgttcagtacagaagtgttttgctctaatgtgccgagttgtttttaattatacgccatgctgggtttcagacggtggagaactgcgtgtgcaccctgaggaacctgtcctatcggctggagctggaggtgccccaggcccggttactgggactgaacgaattggatgacttactaggaaaagagtctcccagcaaagactctgagccaagttgct

SEQ ID NO: 134984 - DNA, 3148 bp, Homo sapiens
atgtttgtgatttctaggctgacgccagccctgtctgttcccaccagcccttcctctcccttcaggcatgacatctcacttcgctacagtgcacgtgtttacctgagccttgcacctgcagatttcttacatagggagtttgcctggcgtgatcctgagttgcctgaggtcattcacatgcttcagcaccagttcccatctgttcaggcaaatgcagcggcctacctgcagcacctgtgctttggtgacaacaaagtgaagatggaggtgtgtaggttagggggaatcaagcatctggttgaccttctggaccacagagttttggaagttcagaagaatgcttgtggtgcccttcgaaacctcgtttttggcaagtctacagatgaaaataaaatagcaatgaagaatgttggtgggatacctgccttgttgcgactgttgagaaaatctattgatgcagaactccctcctaggaagcatcttgccctcagaccacctgagcacccacttcccactgcgctgaaagctgagatggtggtgttccgagcacagctggacctgagagttctttggaatttatcctcatgtgatgctgtaaaaatgacaatcattcgagatgctctctcaaccttaacaaacactgtgattgttccacattctggatggaataactcttcttttgatgatgatcataaaattaaatttcagacttcactagttctgcgtaacacgacaggttgcctaagaatagggatgataataccacctcagagctgtgaggggtcagcaggtacttgtggaaggtgcttagcacagtgtcatcgcatgagcactcagaacctcagctccgcgggggaagaagctcggaagcaaatgcggtcctgcgaggggctggtagactcactgttgtatgtgatccacacgtgtgtgaacacatccgattacgacagcaagcatgagccccttaccctctccctcctgtgcccgagtacagggcattctgctcatcatttgtcagctgtgacgaccatccaggatcctcctgggggccgaggaaagtggaaagaacaggaaagagggactgaaagtgtcaggacttccaaagcgggccagttacttggtgtcaggatggactggactaggagaggccattggaaggtgttggattgtaagggtgagcctgagagaaaaaaggatgaagagtgcctgggagaagagagaggaatgcaagggaacagccagtttttgagccttattgaaccaggagatctgcagatgaaattgagaggatgttcagtacagaagtgttttgctctaatgtgccgagttgtttttaattatacgccatgctgggtttcagacggtggagaactgcgtgtgcaccctgaggaacctgtctatcggctggagctggaggtgccccaggcccggttactgggactgaacgaattggatgacttactaggaaaagagtctcccagcaaagactctgagccaagttgctgggggaagaagaagaaaaagaaaaagaggactccgcaagaagatcaatgggatggagttggtcctatcccaggactgtcgaagtcccccaaaggggttgagatgctgtggcacccatcggtggtaaaaccatatctgactcttctagcagaaagttccaacccagccaccttggaaggctctgcagggtctctccagaacctctctgctggcaactggaagtttgcagcatatatcccgggcggcccgtccgaaaagaaaaggggctccccatccttgtggagcttctgagaatggataaccgatagagttgtttcttccgtggcaacaagccttgaggaatatggcactagatgttcgcaacaaggagctcataggcaaatacgccatgcgagacctggtcaaccggctccccggcggcaatggccccagtgtcttgtctgatgagaccatggcagccatctgctgtgctctgcacgaggtcaccagcaaaaacatggagaacgcaaaagccctggccgactcaggaggcatagagaagctggaacgtcttcttgaatccccagttctggaattgagttttctgccacatacccagaaagtattaaaattactgctctgcagcagggctgctgtgtggcctcaggatgtgccccaggcttggatggcgcatttccctttgcttctgcatgacacctcactgattaagcaggaaggaaggactagagaatcagtggtaaaaattgaaggctgcttgtcatggagctgtagcagtgactataagtttgccttagtatcagatcagagaaatgagattcggaaagtcctggaccaaatcaaattgtctcctagctccacacacttaacttctttcacaagtacttactgcctgcctgctgtgtgccagacgctcttctctatgctgggcttgcagcagcagacaggtcgcatgacagccccacccgaggtagcttacgttccatgggtgagatcatctctgaaagtggtgaaggcagcagcccaggtcttgaatacattatggcaatatcgggacctccggagcatttataaaaaggatgggtggaatcagaaccattttattacacctgtgtcgacattggagcgagaccgattcaaatcacatccttccttgtctaccaccaaccaacagatgtcacccatcattcagtcagtcggcagcacctcttcctcaccagcactgttaggaatcagagaccctcgctctgaatacgataggacccagccacctatgcagtattacaatagccaaggggatgccacacataaaggcctgtaccctggctccagcaaaccttcaccaatttacatcagttcctattcctcaccagcaagagaacaaaatagacggctacagcatcaacagctgtattatagtcaagatgactccaacagaaagaactttgatgcatacagattgtatttgcagtctcctcatagctatgaagatccttattttgatgaccgagttcactttccagcttctactgattactcaacacagtatggactgaaatcgaccacaaattatgtagacttttattccactaaacgaccttcttatagagcagaacagtacccagggtccccagactcatgggtgtag

SEQ ID NO: 134985 - DNA, 4977 bp, Homo sapiens
  misc_feature (1)...(4977): n = a,t,c or g
ctactgttgtttttgaggggcgggcagccgcgccgccgcggcacttttttaattttttcgggtgccgcagcagcgacccctcggcgccgatgtccctgatccctggagcgacgacggccgctgcctaagctgggaagaggaatgccagctcctgagcaggcctcattggtggaggaggggcaaccacagacccgccaggaagctgcctccactggcccaggcatggaacccgagaccacagccaccactattctagcatccgtgaaggagcaggagcttcagtttcagcgactcacccgagaactggaagtggaacgtgcagattgttgctcatgtcaactagaacgaagtatgcttgtagcagaatcaccaagcattgccagcacctgctcaactgagaaggcatttccttgtagatcaactgacgtgccaaatactggtgtaagcaaacctacagtttctgacgctgtccagcccaacaactatctcatcaggacagagccagaacaaggaacccgtctattcaccagaacagacatctctccatgaaagtgagggatcattgggtaactcaagaagttcaacacaaatgaattcttattccgacagtggataccaggaagcagggagtttccacaacagcccagaacgtgagcaaagggagacaacagacagcagcattcattcataggatcaactaacaaccatgtggtgaggaattcaaagagctgaaaggacaaacactgggtttcagccatcagtagccaatcgggccatgagaagagttagttcagttccatctagagcacagtctccttcttatgttatcagcacaggcgtgtctccttcaaagggggtctctgagaacttctcctgggtagtggatttggctctcccgtcagtgaccgacccccgacctctggaanccccagtgcatattcctccaccacattacctgctgcacgggcagcctcttccggtactcacagagacccgcctccccaacagctatacggcggatttgggtcagtcacctcccggcagacctccaatcccaacggaccaacccctcaataccaaaccaccccccagagtggggtccccactgaccctgacggatgcacagactcgagtagcttccccatcccaaggccaggtggggtcgtcgtcccccaaacgctcagggatgaccgccgtaccacagcatctgggaccttcactgcaaaggactgttcatgacatggagcaattcggacagcagcagtatgacatttatgagaggatggttccacccaggccagacagcctgacaggcttacggagttcctatgctagtcagcatagtcagcttgggcaagaccttcgttctgccgtgtctcccgacttgcacattactcctatatatgaggggaggacctattacagcccagtgtaccgcagcccaaaccatggaactgtggagctccaaggatcgcagacggcgttgtatcgcacaggttcagtaggtattggaaatctacaaaggacatccagccaacgaagtacccttacataccaaagaaataattatgctctgaacacaacagctacctacgcggagccctacaggcctatacaataccgagtgcaagagtgcaattataacaggcttcagcatgcagtgccggctgatgatggcaccacaagatccccatcaatagacagcattcataaggaccccaggggagtttgcctgggcgtgatcctgagttgcctgaggtcatttcacatgctttcagcaccagtttcccatctgtttcagggcaaatgcaggcggccttacctggcaggcacctgtgtttttgggtggacaacaaagttgaaggtgggaggtgttttagggtttaggggggggattcaagcatctgggttngaccttctgggaccacagagttttgggaagttcagaaggaattgctttgtgggtgcccttcggaaacctcgtttttggcaagtctacaggatgaaaataaaatagcaatgaagaatgttggtggggatacctgccttgttgccgactgttgagaaaaatctatttgatgcagaagtaagggagcttgttacaggagttctttggaatttatcctcatgtgatgcctgtaaaaaatgacaatccattccgaaaatgctctcctcaacccttaaacaaaaacactgtgattggttccccacattcctgggaatggaaataactccttccttttgatggatgaatccataaaattaaattttcagacttcactagttcctgcgtaacacggacaggttgccctaaggaacctcagctctgcgggggaagaagctcggaagcaaatgcggtcctgcgaggggctggtagactcactgttgtatgtgatcccacacgtgtgtgaacacatccgattacgacagcaagacgggtggagaactgcgtgtgcaccctgaggaacctgtcctatcggctggagctggaggtgccccaggcccggttactgggactgaacgaattggatgacttactaggaaaagagtctcccagcaaagactctgagccaaagttgctgggggaagaagaagaaaaagaaaaagaggactccgcaagaagatcaatgggatggagttggtcctatcccaggactgtcgaagtcccccaaaggggttgagatgctgtggcacccatcggtggtaaaaccatatctgactcttctagcagaaagttccaacccagccaccttggaaggctctgcagggtctctccagaacctctctgctagcaactggaagtttgcagcatatatccggggcggccgtccgaaaagaaaagggctccccatccttgtggagcttctgagaatggataacgatagagttgtttcttccggtgcaacagccttgaggaatatggcactagatgttcgcaacaaggagctcataggcaaatacgccatgcgagacctggtcaaccggctccccggcggcaatggccccagtgtcttgtctgatgagaccatggcagccatctgctgtgctctgcacgaggtcaccagcaaaaacatggagaacgcaaaagccctggccgactcaggaggcatagagaagctggtgaacataaccaaaggcaggggcgacagatcatctctgaaagtggtgaaggcagcagcccaggtcttgaatacattatggcaatatcgggacctccggagcatttataaaaaggatgggtggaatcagaaccattttattacacctgtgtcgacattggagcgagaccgattcaaatcacatccttccttgtctaccaccaaccaacagatgtcacccatcattcagtcagtcggcagcacctcttcctcaccagcactgttaggaatcagagaccctcgctctgaatacgataggacccagccacctatgcagtattacaatagccaaggggatgccacacataaaggcctgtaccctggctccagcaaaccttcaccaatttacatcagttcctattcctcaccagcaagagaacaaaatagacggctacagcatcaacagctgtattatagtcaagatgactccaacagaaagaactttgatgcatacagattgtatttgcagtctcctcatagctatgaagatccttattttgatgaccgagttcactttccagcttctactgattactcaacacagtatggactgaaatcgaccacaaaattatgtagacttttattccactaacgacctttcttatagagcagaacagtacccagggtccccagactcatgggtgtagcatcaagatgcccaacagaggaactctttctttctaaccttgttcagattgaggtgaaaagtccatcttgctgatttgatgattgaaatgtgaaagtgaagtggaaggaattgaatgaagtgtgttttttttttttcttttttgaggaattatcagggaagtgaggaaatgtttgggagaggactttctaagctctatttaggtgttagatctaattacttatagattctgtagtctggtgaaggtgtgggtgacgtgatgagaggtttgagaaatgggtgaaatgaaatgggggatatgtaggtcaaatccaaattaaagatgatttttttaatgggaataaagttatgttctgataagtttgtacagaaaaaaataaacatggatgccccatgttttattggcttattactaaatgtccaagattgttatgctaattatgtcttgtaaaatttcttttgttggtgtaaatatgggaaatgccacatgggttaagtgccatcatttgtaatgcaatgtgtcacttgaaaagagaatttgaagaaactgacaacttcaaaaacaaatgagaaggccaagggacctgtgagcaattaaaagcaaaccgcgacaccctttgtctccaccaacacatagtgtactttggaagcacaacgtccaggctggtaccgcagcgccatgcccattcctcgcctcattcataggacactttcactgccattttctattcacataaaagaaaaataaatgtggaaatttcatccttggaaatgtgttctctattctttttaaattttctgtatgtatatggaaaagcagatttaataaacacaaatctaactgcatgttggaaacagcttaaatatatccaactattttggacttttcctagttttatatatactttgtgagatggaccacaccaaagaattaagctatgaactttccttctctgacaatctaggtatttttatttcttggaactatttcaaatctagtacccttcacagttttatcatgtttttctatatggcagcctggccataactaaattgatataactaaattgataccttttttaggcatcatttttaagaactcagtaacttcataagaacagtggttgggcatttatttggttggcaccaatataataaaccaaattctaaatt

SEQ ID NO: 134986 - DNA, 456 bp, Homo sapiens
attgaaagactcctgttggaatgctggcccccgcaggaaccaccatgatcccgattcacccaggagggccaccctcccgtccagccccccaagagcagcagggctccctcttgcccttgaacctcctctgccctgacaggcggcgtcacccagggctcaggatcctggcttccagcattccagaggtgactcaccaaccaaagtgtcactcaccaaccgaaggaccttgcacaaatgcaccagcctccccatgcctcagtctccccatctgtaaatgagtgttatgacggtactgtcataaactccctggaggatccaggtggtcacgttactgttggtgacattgtccctctgttggctgcagacgcatcttctctccagactgccgatcccagaaagccaggtgatcaccattaaccccgagctgcctgtggaggaggcggctgaggactacgc

SEQ ID NO: 134987 - DNA, 1283 bp, Homo sapiens
atggccgcgccggccccgggcctcatctcggtgttctcgagttcccaggagctgggtgcggcgctagcgcagctggctggcccagcgcgcagcatgctgcctggcaggggcccgcgcccgtttcgcgctcggcctgtcgggcgggagcctcgtctcgatgctagcccgcgagctacccgccgccgtcgcccctgccgggccagctagcttagcgcgctggacgctgggcttctgcgacgagcgcctcgtgcccttcgatcacgccgagagcacgtacggcctctaccgggtgagagctacgggggccgccggggatcacgccgagagggccacagccaccgcctacaccccggctacggaggccgccgggggccatgccgaaagggccgcgcccactgtctgcacctcggctacgggggccactgggtatcatgccaagagggccgtgcccactgcctgcacctcggctaccgagttctcggggatccctgggcagctttgccgctctgatggctctgcttccaggctgttcatctttggctttgagcctcaggattctatagaatcagaggagcgcgctcttttaaagacaggactgccgatcccagaaagccaggtgatcaccattaaccccgagctgcctgtggaggaggcggctgaggactacgccaagaagctgagacaggtgagccccgaggagcggccgcaagggagtcacatccacgaagcggccacaccccgggcaacagagcggccttctgattgtcaccagcaggaactgccccagggatcactggcagatccctttgaggaatcccctcttcgaggccacagccctgccctggggagcctgaaggccactcggcctctgttgcccaggctgtcttctccccacgcccaggcattccaaggggactccatcccggttttcgacctgctgatcctgggggtgggccccgatggtcacacctgctcactcttcccagaccaccccctcctacaggagcgggagaagattgtggctcccatcagtgactccccgaagccaaccgccacagcgtgtgaccctcacactacctgtcctgaatgcagcacgaactgtcatctttgtggcaactggagaaggcaaggcagctgttctgaagcgcattttggaggaccaggaggaaaacccgctgcccgccgccctggtccagccccacaccgggaaactgtgctggttcttggacgaggcggccgcccgcctcctgaccgtgcccttcgagaagcattccactttgtag

SEQ ID NO: 134988 - DNA, 1047 bp, Homo sapiens
tttttttttttttttttttccagcaacgctccattttaatatccggatgtccagagccacagcctgtgtgttgagccccgggtaggactgctggccggaggctgttgtgcttccagcagcagcacgacgtggctttttgaaaggagagtcccggagacgtggcggccagcagggggcccacgcccactggcgccgcgtggctccttggtcccagctgcggcgtccctctggccagctaaaaagtggaatgcttctcgaagggcacggtcaggaggcgggcggccgcctcggtccaagaaccagcacagtttcccggtgtggggctggaccagggcggcggggcaacgggttttcctcctgggtcctccaaaatgcgcttcagaacagctgccttgccttctccagttgccacaaagatgacagttcgtgctgcattcaggacaggtagtgtgagggtcacacgctgtggcggtggctttcggggagtcactgatgggagccacaatcttctcccgctcctgtaggagggggtggtctgggaagagtgagcaggttgtacccattgggggcccacccccaggatcagcaggtcgaaaaccgggatggagtccccttggaatgcctgtctcagcttctttggcgtagtcctcagccgcctcctccacaggccagcctcgggggtaaaggtgatcacctaggctttctggggatcggcagtctggagagaagatgcgtccggttagaggccgtacgtgctctcggcgtgattcgaagggcacgaggcgcttcgtcgcagaagcccagcgtccagcgcgcttaagcttagcttggcccggcaggggcgacggcggcgggtagctcgcgggctagcatcgagacgaggctcccgccctacaggccgagcgcccaacgggcgcgggcccctgccaggcagcatgctgcgcgctgggccagccagctgcgctagcgccgcacccagctcctgggaactcgagaacaccgagatgaggcccggggccggcgcggccatggcgagggcggcggcgg

SEQ ID NO: 134989 - DNA, 456 bp, Homo sapiens
  misc_feature (1)...(456): n = a,t,c or g
ttcccgggtcgacgatttcgtcctgagcagaaataaaacactggaagaagatgaagaggaacnnnnnnnnnnnnnnnnnnnnnnnnnnnnnnnnnnnnnnnnnnnnnnnnnnnnnnnnnnnnnnnnnnnnnnnnnnnnnnnnnnnnnnnnnnnnnnnnnnnnnnnnnnnnnnnnnnnnnnnnnnnnnnnnnnnnnnnnnnnnnaactgttccgatttgcctctgagaacgatctcccagaatggaaaggagcgaggcactggtgacgtcaagctcctgaagcacaaggagaaaggggccatccgcctcctcatgcggagggacaagaccctgaagatctgtgccaaccactacatcacgccgatgatggagctgaagcccaacgcaggtagcgaccgtgcctgggtctggaacacccacgctgacttcgccgacgagtgccccaagccagagctgg

SEQ ID NO: 134990 - DNA, 512 bp, Homo sapiens
gcggccgccaaggacactcatgaggaccatgatacttccactgagaatacagacgagtccaaccatgaccctcagtttgagccaatagtttctcttcctgagcaagaaattaaaacactggaagaagatgaagaggaactttttaaaatgtaagtaggctgatgtcccagaaataggactctttaaggttgaggttacaacttttatgggtgtccaggttttggcctgacttttaatcagactgaggctgcttaaagaaagggcctaaagttggtgactaatcccatgtggaaatttaacccgttcctttcatgaatcttcaccagatgcccttgctgccctgcagccagttgcatgaagggcatcccatcttgctgctctgtccactggcatggcggccccactgcccttttttgccactggcttctgaggatccagggagtcccttggttgagcaaggggttttaagtttttgcagcatagacttctttggcatcgtgaagcttataaat

SEQ ID NO: 134991 - DNA, 1439 bp, Homo sapiens
cgcggggcgggccggacaatgagagtgtccgcctcctgagccaataaagctgtactggttttgaatcgcggcgcgtttcccgccgctggggtcaggggtcgaggttcgggtcgtggggcggagggaagagcgggcgggcgggaggcgccggcgccagacgcggagggaaggagctacgagtagccgccgagaggccgcggagccagcgacgaccgacccagccgagccgccgccgccgccgcgcccccatggcggccgccaagggacactcatgaggaccatgatacttccacttgagaatacagacgagtccaaccatgaccctcagtttgagccaatagtttcttcttcctgagcaagaaatttaaaacactggaagaagatgaagaggaactttttaaaatgcgggcaaaactgttccgatttgcctctgagaacgatctcccatgaatggaaggagcgaggcacttggtgaccgtcaagctcctgaagcacaaggagaaaggggccatccgcctcctcatgccggaggggacaaagacccttgaaagatctgttgccaacccactaccatcacgccggatgatgggagttgaagccccaaacgccaggtaggcgaccgtgccctgggttctggaaacaccccacgcttgactttcgcccgacgaagtgccccccaagcccagagcctgcctggccccatcccgccttccctgaaatgcctgaagaatgccacagaaattccaaaaccaaagttttgaagaattgcagggaaagagattcgaagagaggaggaaaaggaaagcagggttccagggcaaaaatgattcattgcccgaaaaaagtgtgcggaaaagctagaaggctctctgcggtgaagggaggagacccaaggaggatgctgaggcagaagcaataaatcgtcttattttattttcttttcctctctttcctttcctttttttttaaaaaattttacccctgcccctcttttttcggtttgtttttgattctttcatttttacaagggacgttatattaagtacctgaactcaacattcaggttgtttttttttttttgtttctaagtttttgccctattgaagatgacttcagaaaatccattccccagtcatgaaaatgtactgtgctaactttcttttccatagtggaaacacttatttatagtcatcaaaaatagtgaataaaaaacacatttggaacctgggccagatggcaggactgtgtgtgtacaggcccctgcgctgtgagcgccgctcgcctaagcctcccgggtgtatgtccaggcctgtccgcagcacaggtgggtgctgcacctcacggtagcctgggttcctgggagagacgccctggtgtctgaggtcgtgcatgtatcttgctgtgggccttgaagctgaggtgtctgagctggcgctggt

SEQ ID NO: 134992 - DNA, 428 bp, Homo sapiens
tgcaatgtagttttgttggaggccattttttattgcagacttgaagagctattattcaccgcctccgagctgctccgggtcgcgggtctgcagcgtctccggccctccgcgcctacagctcaagccacatccgaagtcaggaaatatttttaaaataaaatggctagagatgctaaatacacttctgaatcctgcaagggagcccaaggctttacagctggctggacagcaaagtcagccacctccctctggccttcaccttcagggcaagaatccacaaaggagtctgagaatgcattgttggcaccatcttcttgttcaggatttggcagacaggaacaaatttcagcccagagatcctggccagatcttgtggctgtagagtcagcgctctcaaacattttcatttggaatctgagccctcgtgc

SEQ ID NO: 134993 - DNA, 502 bp, Homo sapiens
caatgcattctcagactcctttgtggattcttgccctgaaggtgaaggccagagggaggtggctgactttgctgtccagccagctgtaaagccttgggctcccttgcaggattcagaagtgtatttagcatctctagagaagaagctaagaagaatcaaaggtttaaatcaggaagtgacttccaaggacatgcttcgaactctggcccaagccaagaaggaatgctgggatcggttcctccaggagaagttagcttcagagttctttgtggatggacttgattctgatgagaggtaatcgattccccgtctagttccagctgaaatcatcctttatgtagttgttctatttgtttttagcccagcagtagatttttaagaacagacttttttgccaaaaggcaaatactgcagctacgtgttggtcacagattgaatagagttaaggataaagcattgtgttcatttttaagtatgcaatgaacttgagaaagtagtaaaa

SEQ ID NO: 134994 - DNA, 1779 bp, Homo sapiens
atttcctccgggctacaggcgacagagctgagccaagcgtttactgggcagctgttacgctcagattccaaatgaaaatgtttgagagcgctgactcttcccgccccaagttctggccaggatctctgggctgaaatttgttcctgtctgccaaatcctgaacaagaagatggtgccaacaatgcattctcagactcctttgtggattcttgccctgaaggtgaaggccagagggaggtggctgactttgctgtccagccagctgtaaagccttgggctcccttgcaggattcagaagtgtatttagcatctctagagaagaagctaagaagaatcaaaggtttaaatcaggaagtgacttccaaggacatgcttcgaactctggcccaagccaaggaaggaatgctggggatcggttcctccacgagaaagttagctttcagagtttctttgtgggatgggcttgattctgatgagagcaccttggaacatttcaagaggtggctccagccagataaagtagccgtcagcacagaggaggtccagtatctgattcctccagagtcacaggttgagaagccagtggccgaggacgagccagcagccggggacaagccagcagcagcagaacagtaaattacacacacacacacacacacacacacgccggagcagctgtctcgggtccagagcgagcagcgtggagctcagtgacagcagcagggagaaatccactgaaggaaaaaacccaaatttccactccacaaagaaaacagctgcaagcccccagggacttacctggggctggcatgtgtgaccgtctcggatgaagtgactgacccagtgcacactggatcaaaatgctgctttcctctgtgtctcacagcttggctgagctctgtctctgcaggttagaagtctgctaaagatcaaatgtgaaagtacttggagaaactgaggcctcttatgtgtaatgtgtaagttaagtgagccatatattttcttgcctctttccggacattcatgcttgtgtcccaagcattcccttggtgaattgtcacgtgagtggggcccagtaaagagtgaagtctgctccttgaatccccaaaccccatctggggcttctctaaaaaaatctgtagtaagtatacggactcccagggagagaggctgggcttctctctctcatttgttccttgtggaacaaatgggcaaaaagaagtgtgaaaatgtgggtgtttatgtcttgtgtatatgtattttttacttccagcatggcttctcctccaacttcctccctgcacttaaaaagggcccaggttccaaaattagacttgtaaatatggtgttagtgtttgacactactcctggatagttccaaacatcttccttgtggcaggtttcctggctgagcccgagcttccctccctgtttattgtgttcatgatcagtatgtgtttccatataaaactttttctcaacggaatagcagtgtctgtggtgctgttgactcgattgctcctggaaggatgttcccaggcagcaggaggtaaagacaaatgcatgcaaaggcatgggatctggccactttgccagcctcctgttattagcatgtgccctcagacagtccagactttggtgttctgaggccttagctccatgggccttcttcctgggtaatagtttacaaatccctaaagatcagtagggtggctgtaaaaatcttccgatcgagagaggagctaaaagaaaaaatagaataaataaatcttctgaaaa

SEQ ID NO: 134995 - DNA, 423 bp, Homo sapiens
atgcggctgctcgggggcggcgcatgcgcgcggcggagggggggtggggccttggggccgcgagtgggagcgggagcggttctgcggcctcctcgggcttcttggccctgggcagagtgggattgggtgtcccggctgttcgcagtggccgcgactcgcctcccttccgccaagattcacagaacacggcagagtggcctcgggatcacctgcccaagacacctgcacgaccggaagttgggagaagaaattaaggccatgatgatgaacgcagcctttctcgtttatttccaatcccacaacaaaccggagtccaggaactcatgggtgattatcggactattacctagtcgtaaaactgtggagcattggtgtctaaaggaatctgagacagacccgcagtgtctcccccacatgccttaa

SEQ ID NO: 134996 - DNA, 2040 bp, Homo sapiens
caggggccggcgcgctggaccctccaagagcgtgtcacccccaggcgatacagggggcgtcatcggggggcgaatgggcttccccataaccgggaaacaaaggaggcccaaaaagcttttttttttcggcatgattacctgttccactagcttactcggtgaccttccgattcatatcctagataaggtctgtacaagggctaaatttagatgtgccatctggtttcctcagcagactggtgtttatacagtgagtaccttatctgaatgttggcaaagattcagatattttgattcgatatttgcatatacataataagtatctcgggatggacccaagtctaaatggaaattcatttgttcacatacaccttaccttacccacatagcctgaaggtaaggttatattatatattttaaataattttgtgcatgaaacaaagttttgatggcgttttaaaaaaaaatgttttcattgttttttttgttttggtttttgtttttttacagacagggtctggctatatcgtccaggctggactcaaactcctgggctcaagcaatcctcctgctcaacctcccgagtagctggcactacaggtgcccaccacaccaggcttgattgtgacttgactgtcacccagtgtcacatgagggcaagtgtggaattttccatttgtggggtcacgtcagtactcaaaaaaatccgaattttagagcattttggatttcagattaggaatgtttaacctaagtttgtaaaggaaattttttagccttagaatagggatgtttcagattgttcaagagacaaatgaaagactaaaacaaccagaaaacattggaatgataaatccatttaagtatatttaaaatgtgcgttgtttacctcctgcccatacaaaaccactcatgacatacatacaaatgtaaggacaaaactgtagtcacctgattaacaagagccagagttcattgcatgctgatcaacgaaccaacacaacttttatcatacactaaaaaaagggtagaacaaaggccaacttaaagcctggaaagtgatctaatctgttaaattagtgtaccgcagagtaattttgaaagccttctcgttttgttttgttttttttcagagacagagtctcgctctgtcgcccaggctggagtgcagcggcgcgattctcggctcattgcaacctcccccacccgagttcaagccattctcctgcctcagcctcctgagtagctgggattacaggcgcgtgccgccacgcccggctaattttttgtattttaagtagggacgggggtttcaccgtgtcgcccaaggctggtctcgaactcctgaactcaagcaatccgcccacctcggcctcctaaaggataggattacaggcgtgagccaccgcgcccggccccttctcttttttaaaaccaatttcactaacatttacttaaaaatgattttctgcttggcagaagtgacttaaggcatgtgggggagacactgcgggtctgtctcagattcctttagacaccaatgctccacagttttacgactaggtaatagtccgataatcacccatgagttcctggactccggtttgttgtgggattggaaataaacgagaaaggctgcgttcatcatcatggccttaatttcttctcccaacttccggtcgtgcaggtgtcttgggcaggtgatcccgaggccactctgccgtgttctgtgaatcttggcggaagggaggcgagcgcggaggccaccagtgcgcgtctcgcgtggcgctacggcctcgggaattccgtcacggcatagccgggtccagcgcggtgtagaccggggccccgcgccttgctcggccagagcggctcaggtactactccaggtccggccgcactcgcgcgccactgcgaacagccgggacacccaatcccactctgcccaggaccaagaagcccgagaaggccgcagatccgctcccgctcccactcgcggcccccctcgtgccaagctggcggtaatcatgctcatggctg

SEQ ID NO: 134997 - DNA, 292 bp, Homo sapiens
  misc_feature (1)...(292): n = a,t,c or g
cagggcctcgccttcccccntgcagcctgaggcccagcgggcactccagcagctcaagcagaaaatggtcaactacatccagatgaagctggaccctgcctggctggcttaagggggctgggtaaggggcctggcatgaacctggcctcccggggagctgagactagggtcccagcacagcccagaaacctttggccacaagaagtggggtcagtcagggctggggcaggggtcactgcagtttgggatggttgaatgctgtattttctaaagaataaaatatttttaaatc

SEQ ID NO: 134998 - DNA, 381 bp, Homo sapiens
  misc_feature (1)...(381): n = a,t,c or g
ctcttggtccagcgagcgttgccgggccagggtctagcggagggctccgacggcgcggacggagcgaagcgccgagccatggcgcaccaaacgggcatccacnnnnnnnnnnnnnnnnnnnnnnnnnnnnnnnnnnnnnnnnnnnnnnnnnnnnnnnnnnnnnnnnnnnnnnnnnnnnnnnnnnnnnnnnnnnnnnnnnnnnnnnnnnnnnnnnnnnnnnnnnnnnnnnnnnaagagctgaaggaattctttgccaaggcacgggctggctctgtgcggctcatcaaggttgtgattgaggacgagcagctcgtgctgggtgcctcgcaagagccagtaggccgctgggatcaggactatgacagggccgtgctgccactg

SEQ ID NO: 134999 - DNA, 1680 bp, Homo sapiens
  misc_feature (1)...(1680): n = a,t,c or g
agtgcgttgcggaattcggcacgagccgccacatcctccacctctcttgtgtcctttgagcgttgccgggccagggtcaagcggagggctccgacggcgcggacggagcgaagcgccgagccatggcgcaccaaacgggcatccacgccacggagagagctgaaggaattctttgccaaggcacgggctggctctgtgcggctcatcaaggttgtgattgaggacgagcagctcgtgctggggtgcctcgcaggagccagtaggccgctgggatcaggactatgacagggccgtgctgccactgctggacgcccagcagccctgcttacctgctctaccgcctcgactcacagaatgctcaagggcttcgaatggctcttcctcgcctgggtcgcctgataactccccccgtgcggctgaagatgctgtacgcggccacgggggccacaagttgaaaaaggagtttggaggtggccacatcaaggatgagctctttcgggactgtgaaggatgaacctctcttttgctgggaatccagaaacacctgtcgtcctgtgcggcacctgccccgcttgacctcggctgagagagagctccagcagatccgcattaacgaggttgaaagacagagatcagtgttggaaagcaagcaccagaccctgcagggcctcgccttccccctgcagcctgaggcccagcgggcactccagcagctcaagcagaagatggtcaactacatccagatgaagctggacctagagcgggaaaccattgagctggtgcacacagagcccacggatgtgcaccaagctgccctcccgggttgccccgagattgcttgcccgctaccactttctttncttttacaagcacacccatgagggcgacccctttgaggtctgtaagtgttcatctacttcattgccgggggtacaagtccagcatcaagaagcggatgctctactccagctgcaagagccgcctcctcgactccgtggagcaggacttccatctggagatcgccaagaaaattgagattggcgatggggcagagctgacggcagagttcctctacgacgagggtgcaccccaagcaaacacgcctttcaagcaggccttcgcaaaagccaaagggccaagggggcaaagcgggcccataagcgcctcatccgcggcccgggtgaaaatggggatgacagctaggaggctggagccaggcccggccacgtgtggaacttgtggggctgccccaaccttcccgctcccctgcccacccatccctcccttccctgggctccccaggaaaaatgtttctgggaaggtcaaggaagggctgggcagcttgaaacgcactttgcaagcgtcccgagggccaacgggcttggcattttgtgacccttcccctgtttgctgtcccctgcatcttcgtcttgtgtgccccagggtgtcccggggacccttgcctgggttggctttaaagggggctgggtcaggggcctggcatgaacctgggcctcccggggagctgagactagggtcccagcacagcccataaactctttggccacaagaagtggggtcagtcagggctggggcaggggtcactgcagtttgggatggttgaatgctgtattttctaaagaataaaatatttttaaatcaaaaaaaaaaaaaaagggc

SEQ ID NO: 135000 - DNA, 504 bp, Homo sapiens
  misc_feature (1)...(504): n = a,t,c or g
agtgagggggnntttgacggcgttgcccggctgcggattcggccgagcttatgtctcccagcatggccttcagggtgcacagccgcaacggcaagagttacacgttcctgatctcctctgactatgagcgtgcagagtggagggagaacatccgggagcagcagaagaagtgtttcagaagcttctccctgacatccgtggagctgcagatgctgaccaactcgtgtgtgaaactccagactgtccacagcattccgctgaccatcaataaggaagatgatgagtctccggggctctatgggtttctgaatgtcatcgtccactcagccactggatttaagcagagttcaaatctgtactgcaccctggaggtggattcctttgggtattttgtgaataaagcaaagacgcgcgtctacagggacacagctgagccaaactggaacgaggaatttgagatagagccccaggctggcctcagaactgtgttttttatgtggccac

SEQ ID NO: 135001 - DNA, 763 bp, Homo sapiens
  misc_feature (1)...(763): n = a,t,c or g
atcnatatttctcaaggaagcccaaagtgggtgaaatggtcagcactgccgtgctgtggggtcctaaagtctgctgtcctccttcctgcaagacagggttaaacactggtgcccaggtgctcttgccatgggtcctggtccagccaagcatggtttcaaacatgacntgaccnttagtcaacctggaggctgatgtctagagtgggcgctggagcgtgcagcacctgtagcctgtgcatcacccttagggcaggtctgcctcccgggcccatgcacagaggacctggtctcccagcctgcaggtgcccctgtggtgtccaggatgtcgagggggtctctgtgtacttggtggggctgggaccctcccacttcccacctccttgtgtccctcactcccctgtttcattccatgctgagcctcccctgccttgggctccctggggagggggtggtggcaggagttgcccgagggcagctctgcccatgagcagctgctctagcggctcctcctgctgctgttcgccgggtgctgctgacaccaaggctggagtcagcttgcagcacagccagggtcgaggtcactccctccctgaggactctagcacggcacagcccctctgcctctctcctggtggtggcgttgaaacagcaccctctgcttcggtcctctaataagatgctggaatgtaatcctggacaatccgtgtcctggcagcatttggtcttcctctaagcgcctggctccgctgttctcaggagtggg

SEQ ID NO: 135002 - DNA, 921 bp, Homo sapiens
gcgaacaagggcagcaaggctacggagaggctgaagaagaagctgtcggagcaggagtcactgctgctgcttatgtctcccagcatggccttcagggtgcacagccgcaacggcaagagttacacgttcctgatctcctctgactatgagcgtgcagagtggagggagaacatccgggagcagcagaagaagtgtttcagaagcttctccctgacatccgtggagctgcagatgctgaccaactcgtgtgtgaaactccagactgtccacagcattccgctgaccatcaataaggaagaagcccttcagcggccagtagcatctgactttgagcctcagggtctgagtgaagccgctcgttggaactccaaggaaaaccttctcgctggacccagtgaaaatgaccccaaccttttcgttgcactgtatgattttgtggccagtggagataacactctaagcataactaaaggtgaaaagctccgggtcttaggctataatcacaatggggaatggtgtgaagcccaaaccaaaaatggccaaggctgggtcccaagcaactacatcacgccagtcaacagtctggagaaacactcctggtaccatgggcctgtgtcccgcaatgccgctgagtatctgctgagcagcgggatcaatggcagcttcttggtgcgtgagagtgagagcagtcctggccagaggtccatctcgctgagatacgaagggagggtgtaccattacaggatcaacactgcttctgatggcaagctctacgtctcctccgagagccgcttcaacaccctggccgagttggttcatcatcattcaacggtggccgacgggctcatcaccacgctccattatccagccccaaagcgcaacaagcccactgtctatggtgtgtcccccaactacgacaag

SEQ ID NO: 135003 - DNA, 1079 bp, Homo sapiens
gtaccagccctaccagagcatctacgtcgggggcatgatggaaggggagggcaagggcccgctcctgcgcagccagagcacctctgagcaggagaagcgccttacctggccccgcaggtcctactccccccggagttttgaggattgcggaggcggctataccccggactgcagctccaatgagaacctcacctccagcgaggaggacttctcctctggccagtccagccgcgtgtccccaagccccaccacctaccgcatgttccgggacaaaagccgctctccctcgcagaactcgcaacagtccttcgacagcagcagtccccccacgccgcagtgccataagcggcaccggcactgcccggttgtcgtgtccgaggccaccatcgtgggcgtccgcaagaccgggcagatctggcccaacgatggcgagggcgccttccatggagacgcagaagcccttcagcggccagtagcatctgactttgagcctcagggtctgagtgaagccgctcgttggaactccaaggaaaaccttctcgctggacccagtgaaaatgaccccaaccttttcgttgcactgtatgattttgtggccagtggagataacactctaagcataactaaaggtgaaaagctccgggtcttaggctataatcacaatggggaatggtgtgaagcccaaaccaaaaatggccaaggctgggtcccaagcaactacatcacgccagtcaacagtctggagaaacactcctggtaccatgggcctgtgtcccgcaatgccgctgagtatctgctgagcagcgggatcaatggcagcttcttggtgcgtgagagtgagagcagtcctggccagaggtccatctcgctgagatacgaagggagggtgtaccattacaggatcaacactgcttctgatggcaagctctacgtctcctccgagagccgcttcaacaccctggccgagttggttcatcatcattcaacggtggccgacgggctcatcaccacgctccattatccagccccaaagcgcaacaagcccactgtctatggtgtgtcccccaactacgacaagt

SEQ ID NO: 135004 - DNA, 870 bp, Homo sapiens
atgcagaaggctctgtgtgcagccccagacctgggtaccttcgtcaccgtcctcaccccacctccgggtgcgcagatagggagcaggagagagaggtccaaggtgccctacatcgtgcgccagtgcgtggaggagatcgagcgccgaggcatggaggaggtgggcatctaccgcatgtctggggtggccgcagacatccaggcactgaaggcagccttcaacgtcaataacaaggacgtgtcggtgatgatgagcgagatggacgtgaacgccatcgcaggcacgctgaagctgtacttccgtgagctgcccgagcccctcttcactgacgagttctaccccaacttcgcagagggcatcgggtcctcactggcggccagcgctgtgggtgtgacgatgatgacaagcctaaactgcgcaaggactcgtgtcccgggcgctccatgtgaccacctcgggagaggtctccggcttgtcgtaacccagaggagtgacccactgcctcctgcagctctttcagacccagttgcaaagaagagctgcatgctcaacctgctgtcgtccctgccggaggccaacctgctcaccttccttttccttctagaccacctggaaaggatggcagagaaggaggcagtcaataagatgtccctgcacaaccttggcacggtctttggccccacgctgctccggccctccgagaaggagagcaagctccctgccaaccccagccagcccatcaccatgactgacagctggtccttggaggtcatgtcccaggtcgaggtgctgctgtacttcttgcggctggaggccatccctgccctggacagcaagggacagagcatcctgttcttcaccgatgtctaa

SEQ ID NO: 135005 - DNA, 1212 bp, Homo sapiens
accgacctgcttctctgcaccaagctcaagaagcagagcggaggcaaaacgcagcagtatgactgcaaatggtacattccggtcacggatctcagcttccagatggtggatgaactggaggcagtgcccaacatccccttggtgcccgatgaggagctgaacgctttgaagatcaagatctcccagatcaagagtgacatccagagagagaagagggcgaacaagggcagcaaggctacggagaggctgaagaagaagctgtcggagcaggagtcactgctgctgcttatgtctcccagcatggccttcagggtgcacagccgcaacggcaagagttacacgttcctgatctcctctgactatgagcgtgcagagtggagggagaacatccgggagcagcagaagaagtgtttcagaagcttctccctggcatccgtggagctgcagatgctgaccaactcgtgtgtgaaactccagactgtccacagcattccgctgaccatcaataaggaagatgatgagtctccggggctctatgggtttctgaatgtcatcgtccactcagccactggatttaagcagagttcaaaagcccttcagcggccagtagcatctgactttgagcctcagggtctgagtgaagccgctcgttggaactccaaggaaaaccttctcgctggacccagtgaaaatgaccccaaccttttcgttgcactgtatgattttgtggccagtggagataacactctaagcataactaaaggtgaaaagctccgggtcttaggctataatcacaatggggaatggtgtgaagcccaaaccaaaaatggccaaggctgggtcccaagcaactacatcacgccagtcaacagtctggagaaacactcctggtaccatgggcctgtgtcccgcaatgccgctgagtatctgctgagcagcgggatcaatggcagcttcttggtgcgtgagagtgagagcagtcctggccagaggtccatctcgctgagatacgaagggagggtgtaccattacaggatcaacactgcttctgatggcaagctctacgtctcctccgagagccgcttcaacaccctggccgagttggttcatcatcattcaacggtggccgacgggctcatcaccacgctccattatccagccccaaagcgcaacaagcccactgtctatggtgtgtcccctaactacgacaag

SEQ ID NO: 135006 - DNA, 961 bp, Homo sapiens
atggcaagagcacctgggcaccagtgtttagccctggtctgcaggaaggaggacagcagactttaggaccccacagcacggcagtgctgaccatttcacccacttggcctccttgagaaatatggatggggacccctctggggatgggcaaggccttccaggataggctcagttttggtcccctgctttttgaggttgggttaaaattccgaccatggcagaggaagcacagctcaggttcccacacctcacttttcacagcctctgagggcagcagtgcacgtggaggagacgtctcccatgaggccaaggcctccagtgctcaccgatgccctctgcgaagttggggtagaactcgtcagtgaagaggggctcgggcagctcacggaaatacagcttcagcgtgcctgcgatggcgttcacgtccatctcgctcatcatcactgacacgtccttgttatctggaaagagcacggaaatgcagcggcctccttgaagatcctgataaatgaagaaaagacacagagaaggatgtgacatgcctgggccatggagcactcttgagatctcatcgtggacaccactgcccacacctccatcccgtcctgcgcaggccgacactcacttgaacgttgaaggctgccttcagtgcctggatgtctgcggccacaccggccggacacgcggtaaatgcccacctcctccatgcctcggcgctcgatctcctccacgcactggcgcacgatgtagggcaccttggacctctctctcctgcgggaggagggaatgttctcagtgtcctaacagccctgcttgggccataacacaggagacctgctccctatgtgcacacccggaggtggggtgaggacggtgatgaaggtacccaggtctggggctgcacacagagccttctgcatgcctgtcctccctctgcaagctctgtcctcattgcatgtgc

SEQ ID NO: 135007 - DNA, 4756 bp, Homo sapiens
  misc_feature (1)...(4756): n = a,t,c or g
tttttttttttttcacaggatgaagcagcagcgtttattcaaaatacaacagtgagggaatccagtcacgttcccttttccccagagagggcgcatcttgacaagggatccagtagaaattttttaaactctaagttaagttcataaaaaccactcccttcaccctgtctcccagggccaggcctgggactccgaggatgaactgggcttggggcgccctcaggtggccacataaaaaaccacagtctgaggccagcctggggctcccaggacctggggcgggatctttccagggccacctgttccttcggctttggggtcgctgtctcttgggcagatggcccaacacttggggggtnggcccaagggacaacttcagggaaggttcccgctctacgggatnggcccgatttaggccagaggttttccaggccatctgtccgccttccaaggaagatgggactgggacctttagacttcggtggagaacaggatgctctgtctcttgctgtccggggcagggatggcctccagctgcaggaagtacagcagcacctggacctgggacatgacctccaaggaccagctgtcagtcatggtgataggctggctggggttggcagggagcttgctctccttctcggagggccggagcagcgtggggccaaagaccgtggcgaggttgtgcagggacatcttattgactgcctccttctctgccacccttttcaggtggtccagaaggaaaaggaaggtgagcaggttggcctccggcagggacagcagcaggttgagcatgcagctctcctttgcaaccgggtctgaaagagcgatgccctctgcgaagttggggtagaactcgtcagtgaagaggggctcgggcagctcacggaagtacagcttcagcgtgcctgcgatggcgttcacgtccatctcgctcatcatcaccgacacatccttgttattgacgtcgaaggctgccttcagtgcctggatgtccgtggccacaccggacacgcggtagatgcccacctcctccatgcctcggcgctcgatctcctccacgcactggcgcacgatgtagggcaccttggacctctctctcttggtgaccacagcaatcttgactccgaagacccctgtctgttttcgggacggcatcctcttcaagctgaactccctgctgttgaacttgaccgagagctttacttcgatcccattcatggcgatgacggtgcgctgccagtctctgtcctgcagggcctgcgggtccagctcgttccagtttggctcagctgtgtccctgtagacgcgcgtctttgctttattcacaaaatacccaaaggaatccacctccagggtgcagtacagatttgaactctgcttaaatccagtggctgagtggacgatgacattcagaaacccatagagccccggagactcatcatcttccttattgatggtcagcggaatgctgtggacagtctggagtttcacacacgagttggtcagcatctgcagctccacggatgtcagggagaagcttctgaaacacttcttctgctgctcccggatgttctccctccactctgcacgctcatagtcagaggagatcaggaacgtgtaaactcttgccgttgcggctgttgcacccctgaaggccatgctgggagacataagcagcagcagtgactcctgctccgacaagcttcttcttcaagcctctccgtagccttgctgcccttgttcgccctcttctctctctggatgtcactcttgatctgggagatcttgatcttcaaagcgtccagctcctcatcgggcaccagggggatgttgggcactgcctccagttcatccaccatctggaagctgagatccgtgagcggaatgtaccatttgcagtcatactgctgcgttttgcctccgctctgcttcttgagcttggtgcagagaagcaggtcggtgaacaggaagacgtgccgcagcttgcgggccccctccaccagctccaccatgaagctgtccttcagcagctgccggtgctctcccttcttcaccgtcatggactgccgtcggggtgtgatctcctcattgatgctggacaggaagttctgtgagatgcggagggcgtcctgcagcaaggggtggtcagggtggctggcaggagtgtgcttcagcaagtcatggaggaccagcgtgctcctcgtcacacggtccacaggcttgtagagcagagtttccagagagttcttggtcgttggatccttggcatctttgttgcttctggctctcaggttctcggagatttctgcaaactgagcattggcctgacagcacttctcagccatttccatggcaactccgtagttgtccacgaaggcccggtacacacccagctggctggccagcttctggaagaggtcgcccacccgctgctggtggctccactgctgcacgcgggggaagagcccatcataggactccttgtggatctcgtagagctcaggcactttgaagaagatggtctcgatctgctgactcgtcagcaccggctgagaggtggtggcagcggctttcaaaggcttcatgggcagcagcagtgcctccaggtggctcaggtaagtctcctcgctagccaggattcccgacaggacccattttctcatctccaagcccttttccaagtccagctcactcgctttagtggacttcagggctcccgagaccagcgcatcccggctgcccctgcccttgctgctgaggtggggcgatgaggagggcgagtcatcaatgtagggcagcccatcttggtgccggcgctgctcctctgcccggtctgcagcgcagccgtatccaggtggtgttccgaacgagccatctgcgtctccatggaaggcgccctcgtcatcgttgggccagatctgcccggtcttgcggacgcccacgatggtggcctcggacacgacaaccgggcagtgccggtgccgcttatggcactgcggcgtggggggactgctgctgtcgaaggactgttgcgagttctgcgagggagagcggcttttgtcccggaacatgcggtaggtggtggggcttggggacacgcggctggactggccagaggagaagtcctcctcgctggaggtgaggttctcattggagctgcagtccggggtatagccgcctccgcaatcctcaaaactccggggggagtaggacctgcggggccaggtaaggcgcttctcctgctcagaggtgctctggctgcgcaggagcgggcccttgccctccccttccatgatgcccccgacgtagatgctctggtagggctggtactccaggggcggccaagggggcctgctaccgccattggcgtcgatcaggttgtccttcaggaagcgggggttcaactcggcgtcctcgtagtcgccgtcgacgccgcagctgctctccgaggagcgtccccggtaagggggcctggatgcatcccccacgctcgagcccgcgccgtgctgggactttttgcgctccatctgcatggcctggctgccaagggagctgatgcggtccgacacctctttgtcgttgaccttcaccaggccgcgctcgtggtgaaactcgacgttcacgtagaagggcttctcggcgtccgccccgggctggccatggcccttccggatccgctcgaagttggacctgagcgccgccacgctggcggggggtccccggtcgtcccgttcccccgacgcggctgccccgggcctgcgggcggtcccgggcctggccttacccggagaaccctcgccgtcgggccgggcctcgggctcctcggcgggcggcgggtcggctccgtcggcgggcgctggctgcgggcgcgacgcggacgctcggggctcggaggcgccgtcgggggcctgcgccgcgcgccggaagccccatcgctgccggtcatagctcttcttttccttggccagcaacgtctgcaggtagatcatgcggaagcgctcctggttcacctcctgctccaggcgccgaatggaggccttgcagcgctccagctcctgctcgatgtcgcccactgagcgcagctccatgcgcgggggctctgagtccgggaactgcgccttccacgcctccgcgaagcccaccgggtccaccatggcgcggccggccttacctgcgccgccgggctgcgcgcggggcccgtctcagcggcggcgcggcggcctcgccaggcccggccccgggcgccgggcggcccccatggccccgcgcggcggcggcggcggcgaacaatgcccgcccactccctggtggcaggtgaggcggagcggggcgctcggcgcgcggggcggggcgcgccggggggaagggcgcgggctgcgcgcgccgctattgtgtgcggggctcctccgcacggcgaggcgcgggcgctgctctccgctccgccaggccgccgccagactctggccacggcccgcgcgctcctcgcctctcgcttccgcaccgccccaccagccccgccgccgccgctgccgccgccgccgccgccgcctcctcggacgctaagccagccggctcgccgcactcccgcccggcccgcactctgcgccgcaggaagggagggccggggggaggcggccgcgatgcgcgatggagcggagccaggcgggcctccttaaaggggccgcgccgtgggcacagggcgggggggccccctggggcggctcccccatcgagccgccaccctcccccc

SEQ ID NO: 135008 - DNA, 5795 bp, Homo sapiens
ggggagataggtaggagtagcgtggtaagggcgatgagtgtgggccgggcgggagtgcggcgagagccggctggctgagcttagcgtccgaggaggcggcggcggcggcggcggcagcggcggcggcggggctgtggggcggtgcggaagcgagaggcgaggagcgcgcgggccgtggccagagtctggcggcggcctggcggagcggagagcagcgcccgcgcctcgccgtgcggaggagccccgcacacaatagcggcgcgcgcagcccgcgcccttccccccggcgcgccccgccccgcgcgccgagcgccccgctccgcctcacctgccaccagggagtgggcgggcattgttcgccgccgccgccgccgcgcggggccatgggggccgcccggcgcccggggccgggcctggcgaggccgccgcgccgccgctgagacgggccccgcgcgcagcccggcggcgcaggtaaggccggccgcgccatggtggacccggtgggcttcgcggaggcgtggaaggcgcagttcccggactcagagcccccgcgcatggagctgcgctcagtgggcgacatcgagcaggagctggagcgctgcaaggcctccattcggcgcctggagcaggaggtgaaccaggagcgcttccgcatgatctacctgcagacgttgctggccaaggaaaagaagagctatgaccggcagcgatggggcttccggcgcgcggcgcaggcccccgacggcgcctccgagccccgagcgtccgcgtcgcgcccgcagccagcgcccgccgacggagccgacccgccgcccgccgaggagcccgaggcccggcccgacggcgagggttctccgggtaaggccaggcccgggaccgcccgcaggcccggggcagccgcgtcgggggaacgggacgaccggggaccccccgccagcgtggcggcgctcaggtccaacttcgagcggatccgcaagggccatggccagcccggggcggacgccgagaagcccttctacgtgaacgtcgagtttcaccacgagcgcggcctggtgaaggtcaacgacaaagaggtgtcggaccgcatcagctccctgggcagccaggccatgcagatggagcgcaaaaagtcccagcacggcgcgggctcgagcgtgggggatgcatccaggcccccttaccggggacgctcctcggagagcagctgcggcgtcgacggcgactacgaggacgccgagttgaacccccgcttcctgaaggacaacctgatcgacgccaatggcggtagcaggcccccttggccgcccctggagtaccagccctaccagagcatctacgtcgggggcatgatggaaggggagggcaagggcccgctcctgcgcagccagagcacctctgagcaggagaagcgccttacctggccccgcaggtcctactccccccggagttttgaggattgcggaggcggctataccccggactgcagctccaatgagaacctcacctccagcgaggaggacttctcctctggccagtccagccgcgtgtccccaagccccaccacctaccgcatgttccgggacaaaagccgctctccctcgcagaactcgcaacagtccttcgacagcagcagtccccccacgccgcagtgccataagcggcaccggcactgcccggttgtcgtgtccgaggccaccatcgtgggcgtccgcaagaccgggcagatctggcccaacgatggcgagggcgccttccatggagacgcagatggctcgttcggaacaccacctggatacggctgcgctgcagaccgggcagaggagcagcgccggcaccaagatgggctgccctacattgatgactcgccctcctcatcgccccacctcagcagcaagggcaggggcagccgggatgcgctggtctcgggagccctggagtccactaaagcgagtgagctggacttggaaaagggcttggagatgagaaaatgggtcctgtcgggaatcctggctagcgaggagacttacctgagccacctggaggcactgctgctgcccatgaagcctttgaaagccgctgccaccacctctcagccggtgctgacgagtcagcagatcgagaccatcttcttcaaagtgcctgagctctacgagatccacaaggagttctatgatgggctcttcccccgcgtgcagcagtggagccaccagcagcgggtgggcgacctcttccagaagctggccagccagctgggtgtgtaccgggccttcgtggacaactacggagttgccatggaaatggctgagaagtgctgtcaggccaatgctcagtttgcagaaatctccgagaacctgagagccagaagcaacaaagatgccaaggatccaacgaccaagaactctctggaaactctgctctacaagcctgtggaccgtgtgacgaggagcacgctggtcctccatgacttgctgaagcacactcctgccagccaccctgaccaccccttgctgcaggacgccctccgcatctcacagaacttcctgtccagcatcaatgaggagatcacaccccgacggcagtccatgacggtgaagaagggagagcaccggcagctgctgaaggacagcttcatggtggagctggtggagggggcccgcaagctgcgccacgtcttcctgttcaccgagctgcttctctgcaccaagctcaagaagcagagcggaggcaaaacgcagcagtatgactgcaaatggtacattccgcttcacggatctcagcttccagatggtggatgaactggaggcagtgcccaacatccccctggtgcccgatgaggagctggacgctttgaagatcaagatctcccagatcaagagtgacatccagagagagaagagggcgaacaagggcagcaaggctacggagaggctgaagaagaagctgtcggagcaggagtcactgcatgctgcttatgtctcccagcatggccattcagggtgcacagccgcaacggcaagagttacacgttcctgatctcctctgactatgagcgtgcagagtggagggagaacatccgggagcagcagaagaagtgtttcagaagcttctcccttgacatccgtggagctgcagatgcttgaccaactcgtgtgtgaaactccagactgtccacagcattccgctgaccatcaataaggaagatgatgagtctccggggctctatgggtttctgaatgtcatcgtccactcagccactgggatttaagcagagttcaaatctgtactgcaccctgggaggtgggattcctttggggtatttttgtggaataaagcaaagacgcgcgtctacagggacatcatgctgatccaaactggagacgaggaatttgagatagagctggagggctcccaaaccctgaggatactgtgctatgaaaagtgttacaacaagacgaagatccccaaggaggactggccatagcccgggcaggactcatggggaagggccaggtccagctggacccgcaggccctgcaggacagagactggcagcgcaccggttatcagcatgaatgggatcgaagtataggtctcggtcaagatcaacagcagggagatcaacttagaagaggatgccagccccgataacgacaggggtcttcggagtcaagattgctgtggtcaccaagagagagaggtccaaggttgccctacatcggtgcgccagtgcgtggaggagatcgagccgccgaaggcattggaaggaggttgggcatctaccgcgtgtccggccggtgtggccacggacatccaggcactgaaggcagccttcgacgtcaataacaaggatgtgtcggtgatgatgagcgagatggacgtgaacgccatcgcaggcacgctgaagctgtacttccgtgagctgcccgagcccctcttcacttgacgagttctaccccaacttcgcagagggcatcgcttctttcagacccggtttgcaaaggagagctgcatgttcaaccttgcttgctgttcccttgccggagggccaccttgcttcaactttcctttttcctttcttggaaccaacttgaaaaagggttggcagagaaggaggcagtcaataatatgttctctgcacaacctcgccacggtcttttggccccacgctgctccggccctccgagaaaagaagagcaagctccctgccaaccccagcccagcctattcaccatgacttgacagctggtccttgggaggtcatgttcccagggtccaggtgcttgctgtaatttcctggcaggtgggaggccattccctgccccgggacagcaaggagacagagcatcctgttctccaccgaagtctaaagggtcccagtccatctcctggaggcagacagatggcctggaaacctctggctaatcgggccatccgtagagcgggaaccttccctgaggtgtccttgggccacccccaagtgttgggccatctgccaagagacagcgacccaaagccgaaggacaggtggcctggggcagatctcgcccaggtctgggagccccaggctggcctcagactgtgggttttttatgtggccacccgaggggcgccccaagccagttcatctcagagtccaggggctgaccctggggaagacagggttgaaggggagtgatttttattgaactttaacttaggagtcttaaaagatttctactggatcacttgtcaagatgcgccctctctggggagaagggaacgtgaccggattccctcactgtttgaatcttgaataaaacgctgctgcttcatcctgtgggggccgtggccctgtccctgtgtgggtggggcctcttccatttccctgacttagaaaccacacactccctgcccccagtgtccctgcccctgccccagcacaggtgacttcatttctgtcctctcagctcagtggactcgctcaacttttgtataagtctccacttggtggtagcagcttgctgatgacttgttttaaaactttcatcctaaataaccttttgatacttgaatatttgtaagttttatacatagtttctaatttttttccgaccagatccagatacctaataagatgctggaatgtaatccctggacaatccgtgtcctggcagcatttggtcttcctctaagcgcctggctccgctgttctcaggagtggggttctgaagtctctgggagaacaggatacgtggaggggttaggaagggggccaggcctagagacgggagactccctcccggagcaggtggaggcacaggaccgttcgctaccccatctgccggcacctgcggggggagcccagggcattctttgtaaaccctcctggaccacctgggttcaaaggaaaacagaagcatgggagggccgccaagtatttttcaaggaaattaacccccatgaatattccatcacttttttataaagaggggcttggggcaggcagaggagagaagggagagcaaactgagagccaagttttccacacggtccttgcaggagggagaggatgcagtttcccagagggaagcagggttcacattttaaggaagtgtgtggggtccctggatgacaccagcacccagtgcggctctgtctggcaaccgctcccaaggtgggaggagtgggtgtcccctgtgtgtcagtgggcagctcctgctgaacccgcagctcactagggagcctgacagtggggccatgcgcctgacactcctctctgcttgtggacctggcaaggcagggagcagaaaacagag

SEQ ID NO: 135009 - DNA, 447 bp, Homo sapiens
  misc_feature (1)...(447): n = a,t,c or g
tttttgatatgtctctctctttatacgggaatgtcgatagcaaataaattcttatgtaacacatcatacaatttcaaatcctggaatcactgcatgggattctgtaatggattacatgctaaagtgacagttttcatcaaaaggagaagataaaatgtcattatctctgaagaagggtcagtcctgtgcccacgctggccgtgtgaggtgagcggagtctccttgccctgcctggtgggggctctgcctgtgaggtggctctcacaggtcctgcccaaggganctgggcacactccttcaacacagaacagcccaggtccgctgcttccaggccctgctctcgtgaaagctctgggaagcagcgaggtagccaattcgcttgaaggtgaacttggaggcactcatcacttctatgatgttgaaggcggcccagctgatgtcgtatcc

SEQ ID NO: 135010 - DNA, 725 bp, Homo sapiens
  misc_feature (1)...(725): n = a,t,c or g
ccagaacctgccagagacctgcaaaatgacatcatgacactgatgtcacacaccaggccctacatcaggaagaaggctgtgctgatcagtacaaggtgttcntgaagtacccgagtcgctgcgccctgcttttcccgggctgaaggagaagctggaggacccgacnncggggttcagtcggctgccgtcaatgtcatctgcgagctggccagacgcaaccttaagaactacctgtccctggcnccgctctttttcaagctgatgacgtcctccaccaacaactgggtcctcatcaagatcatcaagctgttcggtgctcttactcctttggaaccgcggctgggcaagaagctgatcgagcccctcaccaatctcatccacagcacgtctgccatgtctctcctctatgaatgtgtgaacaccgtgattgcagtgctcatctcgctgtcctccggcatgcccaaccacagcgccagcatccagctttgtgttcagaaattaaggatattgatcgaggactccgatcagaacttgaagtacctggggctgctggcaatgtccaagatcctgaagacccaccccaagtccgtgcagtcccacaaggacctcatcctgcagtgcctggacgacaaggaccgcagccctgacgtgtctcgcctctcctcagtcgtgtgtactgtacccaagcctgagtgttaatttaactctatgttgtccgccgtgta

SEQ ID NO: 135011 - DNA, 464 bp, Homo sapiens
  misc_feature (1)...(464): n = a,t,c or g
cggatgtccttccagaatcttctggcgaagatctgttttcaccaccatttttccgttgtggagcgagtggactcctgcgcctccatgtacagccgctccatccagggccaccatgtctgcctcctggtgaaaaagggtgagaactctgtctcagtcgacgggaagtgcagtgactccacgctactgagcaacttgttagaagagatgaaggcgacgctggccaagtgttgagagctgcctgcgagccctgcaccacccccacctctcctcagtcgtgtgtactgtacccaagcctgagtgttaatttaactctatgttgtccgccgtgtagacatccgaggtcatttgttgcgttgaattatcttgaccatccttttttactgtggantcttcccattctntttgggcaagaagtccctttttggnccccaaaccaggcaagggattnccccactngggttttt

SEQ ID NO: 135012 - DNA, 686 bp, Homo sapiens
  misc_feature (1)...(686): n = a,t,c or g
ctcggacagcgagtcagaggacgagaggcccagggccgtcttccacgaggaggagcagcggcgtcccaagcaccggccgtcggaggcggacgaggaagagctggctcggcgccgagaggcccggaagcaggagcaggccaacaaccccttctacatcaagagctcgccatcgccacagaagcggtaccaggacaccccgggcgtggagcacattcccgtggtgcagattgacctctccgtccccttgaaggttccagggctgcctatgtcagatcantatgtgaagctggaggaggagcggcggcaccggcagaagctggagaaggacaagaggaggaaaaagaggaaggagaaggagaagaagggcaagcgccgccacagctcgctgcccacggagagcgacgaggacatcgcccctgcccagcaggtggacatcgtcacagaggagatgcctgagaatgctctgcccagcgacgaggatgacaaagaccccacgacccctacaggctctgggatatgacctgggatagccctanccgacagcgagaaactggctattcagaacacagaacaccgagactcaaattccctgagaagacgtnccatggtngaaagaagacnngaaccccnnnnnnnnnnnnnnnnnnnnnnnnnnnnnnnnnnnnnnnnnnnnnaaaagaaagagg

SEQ ID NO: 135013 - DNA, 476 bp, Homo sapiens
gctagatatagtctcacagtttttccttattcttttataagtcatgtggcccttcaggtcctttccaaaacatatttatgtaagtgagaaaaggaagccgagggaaaaactaattctcattttggacacttcccctaccagtaaagataacaaatctatagtaaatggtgagtaaatgtaaataaaattacatttcagagtgaaacccacatttgggccatccttcaaattttatcctaaaatctggagtgcaattctgggaggataaccatcctgaggggaaggggagaagatgactggggtcctaggatatcacaggcaatgttatccctgaggctgtggaactggtgccatggaggggagcaatacggagttagtttcccttcacttcgcctattcagaaacacagaaacaccgagacctcaaaatcccctgagaaggacgttcccatggtagaaaagaagagcaagaaaccc

SEQ ID NO: 135014 - DNA, 1174 bp, Homo sapiens
ggggagctcagtgtgaacactgtcactaccccgaaggacgagtgtgaggacgccaagacggaggcgcagggcgaggaggacgatgccgaggggcaagaccaggacaaggtgcatccacactatggcttgggtcagagcctggttcctgttcgtggccgggtcatgttccagtgcgtggacaggtcaccctctgctgaccccgttcctccgcggatgggccacactgtgctgacccactcatctgttgatagccacttgggccgcttcccctttgtggtgacacagtatgccgctttgaacatctgcgcagtgcgcgtggatgtgtgtgttccctctcggatgtgcacatgggcgtggggttgctgcgtcaagtgtggtgtcctcactggtttgccctgcatggctccctggtcggtggggactgttccccgggctgctttggcgcttgccgccaaccagagacggccccagcctccgctgggcctggtctggcctgagcttgtcccgaaatctcccaagcctaagaagaagaagcacaggaaggagaaggaggagcggaccaaaggcaagaagaagtccaagaagcagcctccaggcagcgaggaggcagcgggggagccggtgcagaatggcgcgccagaggaggagcagctcccggtgagggcctccatgcgggagagaactgagcagattcgagaagaagccgagcctggcgggggcaggggactggccctggcccgcagccccacattaggcacccccgtggtgggctgtgtggtcctgggagccggggatccctcatcggctcctttgaagccccttgccccaagcattcttggagtcgtggcattcgacctggggtattgggccatactggagtcttcgctgagacggagctcggggcccccaaggctgatgcgccttttctatttccagcctgagtccagctactccctcctcgctgaaaattcctatgttaaaatgacctgtgacatccggggcagtctgcaggaggacagccaggtcactgtggccatcgtgctggagaacaggagcagcagcatcctcaagggcatggagctcagcgtgctggactcactcaatgccaggatggcccggccgcagggctcctccgtccacgatggcgtccccgtgcctttccagctgcccccag

SEQ ID NO: 135015 - DNA, 763 bp, Homo sapiens
  misc_feature (1)...(763): n = a,t,c or g
cccagagctttcacgaaggcaccgacgtcatcatgctgaccaccaatcagatccgtaagnacttgagcagccccagccagtacgacacaggtgttgcactgacgggtctgtcctgcttcgtcaccccagaccttgccagagacctggcaaatgacatcatgacactgatgtcacacaccaagccctacatcaggaagaaggctgtgctgatcatgtacaaggtgttcctgaagtaccccgagtcgctgcgccctgcctttccccggctgaaggagaagctggaggaccccgaccccggggttcagtcggctgccgtcaatgtcatctgcgagctggccagacgcaaccctaagaactacctgtccctggccccgctctttttcaagctgatgacgtcctccaccaacaactgggtcctcatcaagatcatcaagctgttcggtgctcttactcctttggaaccgcggctgggcaagaagctgatcgagcccctcaccaatctcatccacagcacgtctgccatgtctctcctctatgaatgtgtgaacaccgtgattgcagtgctcatctcgctgtcctccggcatgcccaaccacagcgccagcatccagctttgtgttcagaaattaaggatattgatcgaggactccgatcagaacttgaagtacctggggctgctggcaatgtccaagatcctgaagacccaccccaagtccgtgcagtcccacaaggacctcatcctgcagtgcctggacgacaagga

SEQ ID NO: 135016 - DNA, 4911 bp, Homo sapiens
cggggggcccggagcgggatcgcggcacctgccgagcgggtcgccgcgtctgccgcggtccttggaccccgccgccgccctggcctgggagcttgccccgccgcagcggccggcagcgcggcgctccgcgggcggcaggcacgggccccgggccccctcacggcgcccagccgcgggcctcccgaggcaaaagcccgtgggccgccgcgatggccttcaagatggtgaagggcagcatcgaccgcatgttcgacaagaatctgcaggacttggtccgcggcatccgtaaccacaaggaggacgaggcaaaatacatatctcagtgcattgatgagatcaagcaggagctgaagcaggacaacatagcggtgaaggcgaacgcggtctgcaagctgacgtatttacagatgttgggatacgacatcagctgggccgccttcaacatcatagaagtgatgagtgcctccaaagttcacctttcaagcgaattggctacctcgctgcttcccagagctttcacgaaggcaccgacgtcatcatgctgaccaccaatcagatccgtaaggacttgagcagccccagccagtacgacacaggtgttgcactgacgggtctgtcctgcttcgtcaccccagaccttgccagagacctggcaaatgacatcatgacactgatgtcacacaccaagccctacatcaggaagaaggctgtgctgatcgagcccctcaccaatctcatccacagcacgtctgccatgtctctcctctatgaatgtgtgaacaccgtgattgcagtgctcatctcgctgtcctccggcatgcccaaccacagcgccagcatccagctttgtgttcagaaattaaggatattgatcgaggactccgatcagaacttgaagtacctgggggctgctgggcaatgtccaagatcctggaaggacccaccccaagtccgtggcagttcccacaagggaccttcatcctgcagtgcctgggacgacaaggacgagtccatccggctgcgggccctgggaccttgcttctatggggatggtgttccaaggaaggaacctggatgggagatcgtggaaggaaggttgatggacccacgtagacaaggcagaggggtaccacctaccggtgacgagctgctcaccaagatcattgacatctgcagccagtccaactaccagtacatcaccaacttcgagtggtaacatcagcatcctggtggagctgacccggctggagggcacacggcacaggcaacctcatcgccgcccaaatgctggacgtggccatccgcgtgaaggccatccgcaaggttcgccgtgtcccagatgtctgcgctgcttgacagtgcacacctgctggccagcagcacccagcggaacgggatctgtgaggtgctgtacgctgccgcctggatctgcggggagttctcagagcatctgcaggaaccacaccacactttggaggccatgctgcggcccagagtcaccacgctgccaggccacatccaggcccgtgtatgtgcagaacgtggtcaagctctacgcctccatccttgcaagcaagaaggagcaggccggggaggcagagggcgctcaggccgtcacccagctcatggtggaccggctgccccagtttgtgcagagcgcagacctggaggtgcaggagcgggcgtcctgcatcctgcagctggtcaagcacatccagaagcttcaggccaaggacgtgcctgtggcagaggaggtcagcgctctcttttgctggggagctgaacccagtgggcccccaaggccccagaagaaggtttcaagtcccgaaagggctgggacctggacggctgggacaatgagccactctgggacagcgagtcagaggacgagaggcccatggccgtcttccacgaggagggagcagcggcgtccaaagcaccggccgtcggaggcggacgagaaagagctggctcggcgccgagaggccgggaagcaggagcaggccaacaaccccttctacatcaagagctcgccatcgccacagaagcggtaccaggacaccccgggcgtggagcacattcccgtggtgcagattgacctctccgtccccttgaaggtttccagggctgcctatgtcagatcagtatgtgaagctggaggaggagcggcggcacccggcagaagctggagaaggacaagaggaggaaaaagaggaaggagaaggagaagaagggcaagcgccgccacagctcgcttgcccacggagagcgacgaggacatcgcccccgccccccagggtggacatcgtcacagaggagatgcctgagaatgctctgcccagcgacgaggatgacaaagaccccaacgacccctacagggctctggatattgacctggataagcccttagccgacagcgagaaactgcctattcagaaacacagaaacaccgagaccgtcaaaatccccgtgaagaaaggacagttcccatggtagaaaagaagagcaagaaacccaagaagaaagagaaaaagcacaaagagaaagagagagacaaggagaagaagaaggagaaggagaacgaaggctgaggacctggacttctggctgtctaccaccccaccgcctgcccccgcccccgcccccgcccccgttccatccacggacgagtgtgaggacgccaagacggaggcgcaggtgcgagtgaggacgatgccgaggggcaagaccaggacaagaaatctcccaagcctaagaagaagaagcacaggaaggagaaggaggagcggaccaaaggcaagaagaagtccaagaagcagcctccaggcagcgaggaggcagcgggggagccggtgcagaatggcgcgccagaggaggagcagctcccgccctgagtccagcctactccctcctcgctgaaaattcctatgttaaaatgaccctgtgacatccggggcagtctgcaggaggacagccaggtcacttgtggccatcgtgctggagaacaggagcagcagcatcctcaagggcatggagctcagcgtgctggactcactcaatgccaggatggcccggccgcagggctcctccgtccacgatggcgtccccgtgcctttccagctgcccccaggcgtctccaacgaagcccagtatgtgttcaccatccagagcatcgtcatggcgcaaaagctcaaggggaccctgtccttcattgccaagaatgacgagggtgcgacccacgagaagctggacttcaggctgcacttcagctgcagcttcctacttgatcaccactcctttgctacagtgacgcttttgctaagttgctgggagtctggggacttgagcatgagctcaattcaaagtcgatgggcatttcgggatgttcctttccagaatcttctgggcgaagatctgttttcaccaccatttttccgttgtggagcgagtggactcctgcgcctccatgtacagccgctccatccagggccaccatgtctgcctcctggtgatagaagggtgagaacttctgtctcagctcgacgggaagtgcagtgtactccacggtactgagcaacttgttagaagagatgaaggtgacgctgggccaagtgtttgagagctgccttgcgagccccgcaccacccccgccggagcacgctccccaggggaccgcaggccctgacgtctctcgccctctcctcagtcgtgtgtactgtacccaagcctgagtgttaatttaactctatgttgtccgccgtgtaggacatccgaggtcatttgttgcggttgaattatctggaccatcctttttttactgtgaactcttcccattttcttttggcaaagaaagtcccctttttcggcccccaaaccaggcaaggggactcccccacctggggtctgtggccctggccccgcggctgggggccggagttccttggaatgtgggctttcagggggctcctgtcctgggccagggcctgatgggcaccacgtgaggggcacttggtggacagggcggggctgacgtggcctcctctggggtcgcctgcttttgacccaaaggtccatgacggttgcgtccgggggaggggaaggaagggccgctgtcgccaaggttttctctcccagaacccacaattgggaaagcggtcttgccaggcgttgtccattgtcagtgtgctcgtgggctggtgactgggtcttgggatcccaggccacgcgccagccaggctgtgggcagggcggggccagggacgccaaagagaggttgcagtcagaaccgtggacggggtgggttgaggcctctctgccacccgtcttcctggtcagcaagaagtgcatctcggcttgggtttggggtgggcgtgtgtggtccgcatccccctgcttgccaactatgcgcaccaaggtttcccccacatccttccccagcaccccttaggaaaggcccaggcagggccctggtaagcagcggaccctgggctgttcctgtgttgaaaggaagtgtgcccccagtgccccttggggcaggaccctgtgaagagcccaccctccaccaggcagagccccccaacccaggcagggcaagggagactcccgcctcacattccccacggcccagccgtgggcacagggattgacccttccttccagagataatgacattttatccttcctcccttttgatgaaaactgtcactttagcatgtaatccgattacagaatcccatgcagtgattctgtaatggatttgaaattgtatgatgtgttacataagaatttatttgctatcgacattcccgtataaagagagagacatatcacgctgctgtcatgcattccgtgtcaagatgatccaataaagttaaaaaacaggcaaaaaaaaaaaaaaaaaaaagtcgacgc

SEQ ID NO: 135017 - DNA, 338 bp, Homo sapiens
atcgaatttctagagtgtgcagctttgtagggcatgatgatggggctgcaagatgctgaacgaggacaaatggggataactagggtgcaggtgattggttttacacacaagagtgccagaggagcgttaacaacgctgctctcccatgggatgagctgcaggcggcgagctaaacgtcaccacataagcaagatgttagaagcattcttttcagagtcaagagggcataatacatcgtacctattgcttccatacgctcggccttcacaggaccaggctctgcagggaggatgaatggaaaagagtcagggcaacaggacccctgtccagagggagca

SEQ ID NO: 135018 - DNA, 531 bp, Homo sapiens
caatctgtgtatgccacttggaaaaatgaaggctgtggcctaagctgatgtaaagaaaagaacatatgtttcctatgagtaacagaattcacttaaatataagactgtgaatcctaacagaattgcctattcttatataagtgtatataacagtatagtaagttttagaaatttaaggtattactatggtattcttgaaataagattttagataaatgtcatattaatcttgttctttttctgtctcttcatgtagaagttatatgagtgtttcttctgaagaaccaaagctgaaatttaatgagaatttctacaattaatgggaattcctttcctgctataaaggagcatcccctccacccgttttctaggagttcttgaccatcattttgaaaaggatttattaaaactaggctaaaggacaacagactgggataggcttttctaataatttttcatcaataggaaaaaagaaatacgtctcattcttcaatactttaaaatggctttttccagtgtgctccttcttaa

SEQ ID NO: 135019 - DNA, 1011 bp, Homo sapiens
tggttttgttctttggattttgtttccaactggttttctccttgtacctatttgtgcagctgctccagccatggccccagctccagcctcggccccagctccagcctcggccccagctccagccccggtccccaccccagccatggtctcagccccgtcatccactgtgaatgccagtgcttctgttaagacttctgcaggcaccaccgacccagaggaggccacaaggcttctagctgagagacggaggcctctcttcaaagatttctcctcaggtgtctttggttttggttttgttctgtctttttccagacaaaagagagaggaattggctcaacgtgtggctgaagagaggacgactcgccgtgaggaggagtcgcgcaggctggaagccgagcaggcccgggagaaggaggatgggcaccccctgggagacccgggcagcccgcctgtttgtcagaggcagacgccgaccttctgttttcagaaagaagaagaagctcgcgttcgtgaagaagcatgcttttatctttttcattttcacttgtaactctaatttttaaaagtcctcttttttggctcttggaggttaggtctaagaaaagaatattagtaaccctgtgttctgtctcctttactatgcccagaggtgtctgcacttccatgtacaacaaacgctcgttttcctaataatgtgttttccagttttaagactaacttatttctatttttatttttcaaattccttagcactcccgatttggaaaaacaaccaaatgaaaatggtgtatctgttcagaatgaaaattttgaagaaattataaacttacccattggatctaaaccatccagattagatgtcaccaacagtgagagcccagaaattcctttgaatccaattttggtgcctggctcatagaaattgaattttgagttggattggacaacttctaaggcctctcctattctctcagtcagtgcagaagtccagtccgcagcacccagtgggtg

SEQ ID NO: 135020 - DNA, 1011 bp, Homo sapiens
atggccccagctccagcctcggccccagctccagcctcggccccagctccagccccggtccccaccccagccatggtctcagccccgtcatccactgtgaatgccagtgcttctgttaagacttctgcaggcaccaccgacccagaggaggccacaaggcttctagctgagaagaggcggctggcccgagagcagagagaaaaggaagaaagggagaggagggagcaggaagagcttgaaagacaaaagagagaggaattggctcaacgtgtggctgaagagaggacgactcgccgtgaggaggagtcgcgcaggctggaagccgagcaggcccgggagaaggaggagcagctgcagcggcaggcggaggagcgggcgctgcgcgagtgggaggaggcagagcgcgcccagaggcagaaagaagaagaagctcgcgttcgtgaagaagcagagagggtccggcaggaacgagagaagcatttccagagagaagagcaagagcgcctggagagaaagaagaaaaccagtgatcagagaaacggtgatatagccaagggagctctcactggaggaacagaggtgtctgcacttccatgtacaacaaacgctccgggaaatggaaagccagttggcagcccacatgtggttacctcacaccagtcaaaagtgacagtggagagcactcccgatttggaaaaacaaccaaatgaaaatggtgtatctgttcagaatgaaaattttgaagaaattataaacttacccattggatctaaaccatccagattagatgtcaccaacagtgagagcccagaaattcctttgaatccaattttggcctttgatgatgaagggacacttgggcccctgcctcaggtagatggtgttcagacacagcagactgcagtcagtgcagaagtccagtccgcagcacccagtgggtgtctgtcagcctctctgcacagagcagcacccattacccgacatcatgcatgctcagaatatgctttgtag

SEQ ID NO: 135021 - DNA, 1661 bp, Homo sapiens
gaattcccgggtcgacgatttcgtcggagcaccatggcggagctaggagctggcggcgacggccacaggggcggcgacggcgcagtgcaatttcaggacaaaataacaaccactcaggaaataaaccagaccctccgcctgtgttacgtgttgatgaccggcagcggctggcccgggagcgacgtgaggaacgggagaaacagctagctgcaagagaaatagtgtggttagaaagagaagagcgagccaggcagcactacgagaagcacctggaagagcggaagaagaggttggaggagcagaggcagaaggaggagcggaggagggctgctgtggaggagaagcggaggcagagacttgaggaggacaaagaacgccacgaagctgttgtacggcgcacaatggaaaggagccagaagccaaaacagatgcataaccgttggtcgtggggaggctctctccatgggagccctagcatccacagtgcaggtggttttgttgaatcatcattctcctctctggatttagcaggcctggaccaccacttcataacttttggtggtactagaaaagctgatccagacaggcggtcagtttccaccatgaatctttcgaaatatgttgatcccgtcattagcaagcggctctcctcttcatctgcaactttactaaattctccagatagagagcctggtcctgtgaaggcccagcgtatggaagcaatagctcgccgcctgcagctcagcccatgggagagcagcgttgttaacagactcctgacgcccacacattcgttcctggccagaagtaaaagcacagctgccttgtctggagaagcagcatcttgcagccccatcatcatgccctacaaagctgcacactctagaaattcgatggatcgaccaaaactctttgtaacaccacctgagggctcttctcgcaggaggatcattcatggcacagcgagctataaaaaagaaagagagagagaaaatgtactcttcctcacatctggcacccgaagggctgtatctccatctaatcccaaagcaagacaaccagctcgctcccgactttggcttccgtccaagtctcttcctcatttgcctggcacacccagaccgacatcctccttgccacccggctcagtcaaagctgctcctgctcaggtccggcccccatcccccggcaacatccgccctgtcaagagggaagtcaaagtggagcctgagaagaaagatcctgagaaggaacctcagaaagttgccaatgagccctcactaaagggcagagcacctttagtgaaggtagaagaagccacagttgaagagcggacacctgctgaaccagaagttggccctgctggaacagcattggtggagggggcaggaccttctgctggtgcagggccacgagctcctccattgcagatgaggctccccatgtcaacattggccaaggcttttgcaaacaagccagtccaaaaaggttcaacatttacaccagctgctttaatgagggcattgatcttatcctccttgacggtcacctcaccctcatgcagaatgagggccgagccttatgcagaatgcaggcgagctcagaaacagaggccatggtgtgagcaagtgtggggctggcactgccaggcaaggtgctag

SEQ ID NO: 135022 - DNA, 4767 bp, Homo sapiens
  misc_feature (1)...(4767): n = a,t,c or g
cttaatgtagggtgaatactgaagacctccttaaggtctgcaagtaaatatagatttttccagtgctggccaaaaagcaagccagccattgtaaaggtcagggtcattctctggcagcgctgctctttaacacaatataattaagaattttgcaccacttctaattaaaacttgattacttagaaggctttccgtttgctaatgatgactaaagtttaaaaacacacatgaaaaagaaaaacagccaaaatacacctactgctctaaattttaaataaggctatcctatatgcttaatcaacaggaggctaggaaaatgtcactgagttaaatgaaggacaatctgaagactcaagaatcaatctgagtgaagttataacatatgagaaagctaaaagtaaaactatgtcaaacattttttatttggtggtttcanttgctatgttgatttaaacaaattaaacaagtttgttataataattttcttttctaatgtaatgactagtgtgtacatggacaactgaaaaacagggaaaacccccaaattcaatgttttcacaaatttacaagccattactaaagaccatatgcctggattaaaaaaaaatagtccaataggatgaagtctctcattcaacctaggcagttcaaccaatttctcttttaataaaaggctgcacattacagtgggtataaatttatcttttaaacactccacataaaaaacatggtggcaccctctccttcttacattttaatcattaggtaggtctctaaaatgggtaaaattaaaactggaatttatattagcaaatggaaagtggcaagtttggtacagctaggctcagcagccaaaagtggaagaataagaatggaaggtgaaaagctgacagatgccacgcagagcaaggacttccatgaaggtccgtgtcctgtgtgcccaaacacagtctaacattcccatcattttcctcattgctcttaaacgagcaaaaccaaattctttttcctatttaaagaaatattaaatctttattttccccaacattaatttgtgatcaggtaaggcaaagataagtcctccatcactggggacagcagcaacatacagacttcagaaatagccctgaatcatcagtaacattctatcgtggtaacatcagaaggaatgcagcctaacaaattaaatttgtaatgttgtcacattattcctaatttatttgattaggtttatctggaaaaactttataaatacattatgtaagagggcagtaaattattttcttgcttttgaaaaaaataaatgttttttcacatttttaaaacattttagtctgctttttgcaaaaggagttgcaaaaaaaatgtgacagctggggtttgcaggaatgtccatgtacaagctgtatttataagaacctggtaatctgcctataatttgcttctaccaaataggaggctctttgccaataatattttaaaaaaacaggcttaaactcttctcctattcattctacttgtagaacaaagaggtacttatttttcaagtattataaaaggtaaaaaattttttttgccaattttacatgttaagccttttaagaccaaaaaaatcatgcctagtcagcccatttcttttataaccaaattctcttgtcttttaaagaatgcagaaaaatattgattgctaagaaggagcacactggaaaaagccattttaaagtattgaagaatgagacgtatttcttttttcctattgatgaaaattattagaaaagctatccagtctgttgtctttagctagtttggagtaaagcttttcaaaatgatggtcaagaactctagaaaacgggtggaggggatgctcctttataggcagggaaagggaattccattaattgtagaaattctcaattaaatttcagctttggttcttcaggaangaaacactccatataacttctgcaagtctgctggtgtctgaacaccatcttacctggaggcaggggcccaagtgtcccttcatcatcaaaggccaaaattggattcaaaggaatttctgggctctcactgttggtgacatcttaatctggatggtttagatccaatggggtaagtttataatttcttcaaaattttcattctgaacagatacaccattttcatttgggttgtttttcccaaatcggggagtgctctcccactgtcactttttgactgggtgtgagggtaaccacatgtggggctgcccaactgggttttcccatttcccgggagcgtttgttgtacaatggaggtgcagacacctctgttcctccagtgaggagctcccttgggctatatcacccgtttctctgatcactggttttcttatctgtaggcttctgttctcctgggtccttttcataatctcctcaaggtcgcttctttctctccaaggcgctcttgctcttctctctgcgaaatgcttctctgcgttcctgccggaccctctctgcttcttcacgaacgcgagcttcttcttctttctgcctctgggcgcgctctgcctcctcccgctcgcgcagcgcccgctcctccgcctgccgctgcagctgctcctccttctcccgggcctgctcggcttccagcctgcgcgactcctcctcacggcgagtcgtcctctcttcagccacacgttgagccaattcctctctcttttgtctttcaagctcttcctgctccctcctctccctttcttccttttctctctgctctcgggccagccgcctcttctcagctagaagccttgtggcctcctctgggtcggtggtgcctgcagaagtcttaacagaagcactggcattcacagtggatgacggggctgagaccatggctggggtggggaccggggctggagctggggccgaggctggagctggggccgaggctggagctggggccatggctggagcagcagggccaacttctggttcagcaggtgtccgctcttcaactgtggcttcttctaccttcactaaaggtgctctgccctttagtgagggctcattggcaactttctgaggttccttctcaggatctttcttctcaggctccactttgacttccctcttgacagggcggatgttgccgggggatgggggccggacctgagcaggagcagctttgactgagccgggtggcaaggaggatgtcggtctgggtgtgccaggcaaatgaggaagagacttggacggaagccaaagtcgggagcgagctggttgtcttgctttgggattagatggagatacagcccttcgggtgccagatgtgaggaagagtacattttctctctctctttcttttttatagctcgctgtgccatgaatgatcctcctgcgagaagagccctcaggtggtgttacaaagagttttggtcgatccatcgaatttctagagtgtgcagctttgtagggcatgatgatggggctgcaagatgctgaacgaggacaaatggggataactgcttctccagacaaggcagctgtgcttttacttctggccaggaacgaatgtgtgggcgtcaggagtctgttaacaacgctgctctcccatgggctgagctgcaggcggcgagctctatctggagaatttagtaaagttgcagatgaagaggagagccgcttgctaatgacgggatcaacatatttcgaaagattcatggtggaaactgaccgcctgtctggatctgcactgtggatgctagggctcccatggagagagcctccccacgaccaacggttatgcttctgttttggcttctggctcctttccattgtgcgccgtacaacagcttcgtggcgttctttgtcctcctcaagtctctgcctccgcttctcctccacagcagccctcctccgctcctccttctgcctctgctcctccaacctcttcttccgctcttccaggtgcttctcgtagtgctgcctggctcgctcttctctttctaaccacactatttctcttgcagctagctgtttctcccgttcctcacgtcgctcccgggccagccgctgccggtcatcaacacgtaacacaggcggagggtctggtttatttcctgagtggttgttattttgtcctgaaattgcagaggcagggcggctggaggcatttttcttatcttgcactttgtagctgtcgggtgctgtttcgcttcgcactgcgccgtcgccgcccctgtggccgtcgccgccagctcctagctccgccatggtgctccgatgacgcgcccggagagccgctccgccctttcctcggcttggctcccgccggcccccgcctcccaggccagcggcccagacaggtgagcgcagtccggggatggcggagggcgggggcagagagcgcggcagtcggctgcggcctgggcctggcgcgccccctcgcgggcaggtgcggcgtggcagccgctccgaccgccgctgccgagtctcggctggaagagcggcgggcggaaccagtacctcagtccggagcttccggtcgccgcggccgaccagctgagggctcccggagatatggagcggggtcagcgaggcctggtggcgcctcctggagtctgggacgagcggcggtccgaggagcagcccaggtggggcgagggtacggagacgctatttccctccgaactctgaagtagccaggtcagtgtcggctccgaacgaatttttctttttttaaagaaacagattattggccgaggaaaaaccaatttcgctctaaagg

SEQ ID NO: 135023 - DNA, 350 bp, Homo sapiens
gtccagagtaccgcacctgcagatgctgctgtctggctgggtggtggctccggacaggagcttcctcgaaggacactttaagtccgcctacgacaaggagatttcatgtccctgaacgaggacctgcagacctggacagcggctcaaagagtggcttggaggatccatcacacctgggagaggcccagagactggaccgaagtctattgcatttgccgcagtcccgactagggagtcatggggttgaagtgacccataggctgatggagtgtgcttgctggacgcgggggaaagggagatttatatctgccctggagggagtcagtggtgtttgcatcatggcatatgag

SEQ ID NO: 135024 - DNA, 756 bp, Homo sapiens
atggagttaattctaggactgataagggcgtccagatgggacgcctttatcagttggtctcgggttctagagaagccatcagagtcagtggaggatgagcttcataaagtgggagatctccaggatccttcctggactccaagatacccagagaagccggatcctgtgtcccggaacccccttcctgttcctttgtgggccctgaccttagggagaactgggctggccgccgggctccgccttcaccacgtgggccctgagttcctccgcggcgccttcgtgggcgacacgcgattcctgagcttccacagccgcggcgagaatcagagcgtgaagcgcgggtggagaagatggcacagggctgtgggcgccctgaggaaagttctcgaagaccgcagggaatgtgttactgaggggcctgaggttcctgggcccgcaccaccaccagggtcagccggatgtgatcttcaagataaaacccagctgcaccctcaagagaccattccactgctctatcagctggcagcgtgtgtgatgcagtatggggtagaaccaggagatctcatggtcgtgtgcccactaccagacagcgttcgctataaagccccggacccgctatttaagccatttgccgttgcctatgagtctgtgcatgttctcacctcaggccacttctgtctacacaaagtgggcaaatcagagccccacctgcctattggcaggaccctcttcagcactgtctctgctcattcctga

SEQ ID NO: 135025 - DNA, 1250 bp, Homo sapiens
atgaggtcatattacagccgcacttctgtattactagatgactctgtcttctaccttctttgtttgcaagttttgatgaagcagaaaggcccatgtggcaaggaactgaagtcagcctctggccaccagccagttgacatcccactttctctttaccagtgtgaatgtcaagttctcttactatctccgtcactctcctctcacaccatccaggaggccccactagggagtggcaggcagagaggaggaagtgtgggcaagcacactccatcagcctatgggtcacttcaaccccatgactccccagtcgggactgtggcaaatgcaatagacttcagtccagtctctgtgcctggagaagaaagggaagctggtcagagcccacaggaggaggtgacccacagggagccagtagtaggtgtgatgaaaccagctctccccaacacttatcctgacccccgttctatgcctgcaggtggagcgctgttctgtcccctacaacctatgctccaagaggtcctgacgtggggcctggaggaccccagtacctgccggcagcatcatctccttgccatgctccaggtgtctgagcagccacctagtgcagtgacccatcggggcttcccttgtggcctccgcggtccagaacctctcccaggtgtgatggatcctccaagccgctctttgagccgctgtccaggcggacttaaagtgtccttcgaggaagctcctgtccggagccaccacccagccagacagcagcatctgcaggtgcggtactctggaccggctgaccctggtggtggtgcgggcccaggaacctcaggcccctcagtaacacattccctgcggtcttcgagaattttcctcagggcgcccacagccctgtgccatcttctccacccgcgcttcacgctctgattctcgccgcggctgtggaagctcaggaatcgcgtgtcgcccacgaaggcgccgctgaggaactcagggcccacgtggtgaaggcggagcccggcggccttcaagtacccgggccgatcccaaataaaagccagaaagcaaggctgccttttgtggtccagcaggccatgcagcacagtgtccaggacacggagcagggagagtacatggagtgtggatcaggagtgcacagagaagataccagcagacctgccctctccattgcactcaaaatcacactggatttcctagctagtgcaatcaggcaacagaatatatcaactacatga

SEQ ID NO: 135026 - DNA, 478 bp, Homo sapiens
gccactacagttgttgctgctgcctcctccaccagcatccctagctcagaggccacgaccccaaccccaggagcctccccaccagcccctgaaatgggaaaggccctccagctcctgagtcacgtggggcacagagggagatgccctgaggatggagagcccgatgcagcaagagttccggtcgcgccgcctgcagaagctggagtctccctgttgcccccactgactattatcattcagaaattccaaacacaagaccacatgaaattctggaaaaaccttcccctccacagccaccacctccgtcttcggtaccacaaactgtgattccaaagaagactggctcacctgaaattaaactaaaaataaccaaaactatccagaatggcagggaattgtttgagtcttccctttgtggagaccttttaaatgaagtacaggcaagtgagcacacgaaatcaaagcatgaaagcagaaa

SEQ ID NO: 135027 - DNA, 3275 bp, Homo sapiens
gtgcggtgcaattcccctagccttcctcttcccgcagcacgcccggcccggcccggccgaggccctcctttttgttcgggccgccatggcagaggcgaccggcgcggggaaaatctagcccggggatttcatgcggcctatctcggttccgcctcctcctcgcgcggacccagcggctgcccgcaccccagccccactccgggcctccgtgtctctcctgtgatcgcactgacacggccggggggttagaatggaacaaactgaaggcccgatgagagaaagggaaagttaaggatgctggagcagaacaatggatttctctttctctttcatgcaagggatcatgggaaacacaattcagcaaccacctcaactcattgactccggccaacatccgtcaggaggatgcctttgataacaacagtgacattgctgaagatggtggccagacaccatatgaagctactttcgcagcaaggctttcagtacccagctacaacagaagatcttcctccactcacaaatggggtatccatcatcaatcagtgtgtatgaaactcaaaccaaataccagtcatataatcagtatcctaatgggtcagccaatggctttggtgcagttagaaactttagccccactgacatattatcattcagaaattccaaacacaagaccacatgaaattctggaaaaaccttccctctcctcagccaccacctcctccttgggtaccgcaaactgtgattccaaagaagactggctctcctgaaattaatctaaaaatagcccaaactatccagaatggcagggaattgtttgagtcttccctttgtggagaccttttaaatgaagtacaggcaagtgagcccccgaaatcaaagcatcgaaagcagaaaagaaaagaggaaaaaaagcaacaagcatgactcatcaagatctgaagagcgcaagtcacacaaaatccccaaattagaaccagaggaacaaaatagaccaaatgagagggttgacactgtatcagaaaaaccaagggaagaaccagtactaaaagagggaagccccagttcagccaatactatcttctgttccaacaacggaagtgtccactggtgttaagtttcaggttggcgatctttgtgtggtccaaggtgggaaccaaatccttggtggcctagtatggtttcaagtgatccccagcttgaggttcatactaaaattaacacaagaggtgcccgagaatatcatgtccagttttttagcaaccagccagagagggcgtgggttcatgaaaaacgggttacgagagtataaaggtcataaacagtatgaagaattactgggtgaggcaaccaaacaagccatcaattcactttgagaaacaaaagattcggaaaccccgacctcagagagaacgtgctcagtgggatattggcattgcccatgtttagatagcattgaatatgactctagaagaaagaatagaacagtatacttttatttacattgataaacagcctgaagaggctttatcccaaggcaaaaaagagtgttgcctccaaaaccgaagttaaaaaaacccgacgaccaagatctgtgctgaatactcagccagaacagaccaatgcaggggaggtggcctcctcactctcaagtactgaaattcggagacatagccagaggcggcacacaagtgcggaagaggaagagccaccgcctgttaaaatagcctggaaaacttgcggcagcaaaggaaatccttaccagcttccattacgatgcacaaagggagcctgggatttgcagaagtgtaacatgtctccagttgtgaaaattgaacaagtgtttgctcttcagaatgctacaggggatggggaaatttattcgatcaatttgtttatttcaacaaaggggaatttggtaacaaaacagaaataagtgtcagggggcaagacaggcttataatttctacaccaaaccagagaaatgaaaagccaacgcagagtgtatcatctcctgaagcaacatcctggttcctacaggcctcagtagaaaagaagcaacagagaagatcaattagaactcgttctgaatcagagaaatccacttgaggttgtgccaaagaagaagatcaaaaaaggagcaggttggaaacagttcctcagggctacagtgaaagactggattaccagaaagggtcggcggaccgggggagtgcagggctctgtcagattcagtgaccagctccgtctccgcagcgattgaggaaactgtggactgagattcctgtacaatttcatcccagaaactccagacttgtagtctccatgcaagatttctttgtcggcggcttgataaacagtttctttgttttcgattttgatttcgccaatcatcattattggcattttcctgcctggtttcttcttcaagactctgaacaattgctttaacagtcaaatgatttttttttttcggtttgagctggatgggtacagcttaaatcatgggtccagcctaaaaaaccaccatttaacttaccctgatcgattccaacatggactgtttttggttttttgtttttaaataaagcatcattaatgcacatctgcaggggtttgccaaacagcccaaactgtatacattacaatcattaaaagctcttattgtttttttaacattagtgccgttatcatggagaacaacaggacagccgccttcagcggtctgtcatttttctagcattttcagaaactcatcggaattggcgggacccgtgtttcccttcgcaagcctctcagtacagcacgtcctgttcctctgttaaaactccttgttaatccagtgatcttttaggccaaggaaatattttgtgatggtgttatgggtccatacaccagcaatgaaggagatagatttgtgtacttgtgttttttaatcagcattaacatgggcaggcaccctcatttatagatgtcaggaaacattcagtgaaaaacttgtagaatgggatgtgataacgaggttccagtaatctgagcagtctaacgaggcccacctcctccaccacagaacgtggctatgttccaagtgctactctcactcagcctgttgcggatcttcatggcctcaggagacttgtttctccatgggctcttctggactgcacacttccaccatagcttgctgggttgatctagatgtctgtttgttgtatggaaattttgggggaaaaaatccaaaacacaaactgtgggttgaaatattaaccgtctcc

SEQ ID NO: 135028 - DNA, 511 bp, Homo sapiens
  misc_feature (1)...(511): n = a,t,c or g
gcgnccgccaccggggggctgtgcggggacttccagggcccggagcggntnggaagaattcaattcgtcataatctgtccctacacagcaagttcattcgtgtgcagaatgaaggaactggaaaaagttcttggtggatgctcaatccagagggtggcaagagcgggaaatctcctaggagaagagctgcatccatggacaacaacagtaaatttgctaagagccgaagccgagctgccaagaagaaagcatctctccagtctggccaggagggtgctggggacagccctggatcacagttttccaaatggcctgcaagccctggctctcacagcaatgatgactttgataactggagtacatttcgccctcgaactagctcaaatgctagtactattagtgggagactctcacccattatgaccgaacaggatgatcttggagaaggggatgtgcattctatgggtgtacccgccatctgccgcaaagatggcctctactttacccagtc

SEQ ID NO: 135029 - DNA, 2514 bp, Homo sapiens
atgaccacgctggccggcgctgtgcccaggatgatgcggccgggcccggggcagaactacccgcgtagcgggttcccgctggaagtgtccactcccctcggccagggccgcgtcaaccagctcggcggcgtttttatcaacggcaggccgctgcccaaccacatccgccacaagatcgtggagatggcccaccacggcatccggccctgcgtcatctcgcgccagctgcgcgtgtcccacggctgcgtctccaagatcctgtgcaggtaccaggagactggctccatacgtcctggtgccatcggcggcagcaagcccaagcaggtgacaacgcctgacgtggagaagaaaattgaggaatacaaaagagagaacccgggcatgttcagctgggaaatccgagacaaattactcaaggacgcggtctgtgatcgaaacaccgtgccgtcagtgagttccatcagccgcatcctgagaagtaaattcgggaaaggtgaagaggaggaggccgacttggagaggaaggaggcagaggaaagcgagaagaaggccaaacacagcatcgacggcatcctgagcgagcgagcctcagcaccccaatcagatgaaggctctgatattgactctgaaccagatttaccactaaagaggaaacagcgcagaagccgaaccaccttcacagcagaacagctggaggaactggagcacgttgcttttgagagaactcattaccctgacatttatactagggaggaactggcccagagggcgaagctcaccgaggcccgagtacaggtctggtttagcaaccgccgtgcaagatggaggaagcaagctggggccaatcaactgatggctttcaaccatctcattcccgggggattccctcccactgccatgccgaccttgccaacgtaccagctgtcggagcactcttaccagcccacatctattccacaagctgtgtcagatcccagcagcaccgttcacagacctcaaccgcttcctccaagcactgtacaccaaagcacgattccttccaacccagacagcagctctgcctactgcctccccagcaccaggcatggattttccagctatacagacagctttgtgcctccgtcggggccctccaaccccatgaaccccaccattggcaatggcctctcacctcagaattcaattcgtcataatctgtccctacacagcaagttcattcgtgtgcagaatgaaggaactggaaaaagttcttggtggatgctcaatccagagggtggcaagagcgggaaatctcctaggagaagagctgcatccatggacaacaacagtaaatttgctaagagccgaagccgagctgccaagaagaaagcatctctccagtctggccaggagggtgctggggacagccctggatcacagttttccaaatggcctgcaagccctggctctcacagcaatgatgactttgataactggagtacatttcgccctcgaactagctcaaatgctagtactattagtgggagactctcacccattatgaccgaacaggatgatcttggagaaggggatgtgcattctatggtgtacccgccatctgccgcaaagatggcctctactttacccagtctgtctgagataagcaatcccgaaaacatggaaaatcttttggataatctcaaccttctctcatcaccaacatcattaactgtttcgacccagtcctcacctggcaccatgatgcagcagacgccgtgctactcgtttgcgccaccaaacaccagtttgaattcacccagcccaaactaccaaaaatatacatatggccaatccagcatgagccctttgccccagatgcctatacaaacacttcaggacaataagtcgagttatggaggtatgagtcagtataactgtgcgcctggactcttgaaggagttgctgacttctgactctcctccccataatgacattatgacaccagttgatcctggggtagcccagcccaacagccgggttctgggccagaacgtcatgatgggccctaattcggtcatgtcaacctatggcagccaggcatctcataacaaaatgatgaatcccagctcccatacccaccctggacatgctcagcagacatctgcagtcaacgggcgtcccctgccccacacggtaagcaccatgccccacacctcgggtatgaaccgcctgacccaagtgaagacacctgtacaagtgcctctgccccaccccatgcagatgagtgccctggggggctactcctccgtgagcagctgcaatggctatggcagaatgggccttctccaccaggagaagctcccaagtgacttggatggcatgttcattgagcgcttagactgtgacatggaatccatcattcggaatgacctcatggatggagatacattggattttaactttgacaatgtgttgcccaaccaaagcttcccacacagtgtcaagacaacgacacatagctgggtgtcaggctga

SEQ ID NO: 135030 - DNA, 5833 bp, Homo sapiens
gcagccgccacattcaacaggcagcagcgcagcgggcgcgccgctggggagagcaagcggcccgcggcgtccgtccgtccttccgtccgcggccctgtcagctggagcgcggcgcaggctctgccccggcccggcggctctggccggccgtccagtccgtgcggcggaccccgaggagcctcgatgtggatggccccgcgaagttaagttctgggctcgcgcttccactccgccgcgccttcctcccagtttccgtccgctcgccgcaccggcttcgttcccccaaatctcggaccgtcccttcgcgccccctccccgtccgcccccagtgctgcgttctccccctcttggctctcctgcggctgggggaggggcgggggtcaccatggccgaggcgcctcaggtggtggagatcgacccggacttcgagccgctgccccggccgcgctcgtgcacctggccgctgcccaggccggagtttagccagtccaactcggccacctccagcccggcgccgtcgggcagcgcggctgccaatccccgacgccgcggcgggcctgccctcggcctcggctgccgctgtcagcgccgacttcatgagcaacctgagcttgctggaggagagcgaggacttcccgcaggcgcccggacaaccgtggcggcggcggtggcggcggcggccgccgcggccgccaccggggggctgtgcggggacttccagggcccggaggcgggctgcctgcacccagcgccaccgcagctccccgccgcccgggccgctgtcgcagcacccgccggtgccccccgccgccgctgggccgctcgcggggcagccgcgcaagagcagctcgtcccgccgcaacgcgtggggcaacctgtcctacgccgacctcatcaccaaggccatcgagagctcggcggagaagcggctcacgctgtcgcagatctaacgagtggatggtcaatagcgtgccctacttcaaggataagggtgacagcaacagctcggcgggctggaagaattcaattcgtcataatctgtccctacacagcaagttcatttcctgtgcagaatgaaggaactggaaaaagttcttggtggatgctcaatccagagggtggcaagagcgggaaatctcctaggagaagagctgcatccatgggacaacaacagtaaatttgctaagagccgaagccggagctgccaagaaggaaagcatcttttccagttttggccaggaggggtggctgggggacagcccctggatcacagttttccaaatgggcctgcaagccctggctttcacagcaatgatgactttgataactggagtacatttcggccctccaacctactcaaatggtaatactatttaatgggagactctctaccccatttggaccgaaacgggatgactgggaaaggggaatgggcattctatgggggcccccgcatctggccgcaaagatggcctctactttacccagtctgtctgagataagcaatcccgaaaacatggaaaatcttttggataatctcaaccttctctcatcaccaacatcattaactgtttcgacccagtcctcacctggcaccatgatgcagcagacgccgtgctactcgtttgcgccaccaaacaccagtttgaattcacccagcccaaactaccaaaaatatacatatggccaatccagcatgagccctttgccccagatgcctatacaaacacttcaggacaataagtcgagttatggaggtatgagtcagtataactgtgcgcctggactcttgaaggagttgctgacttctgactctcctccccataatgacattatgacaccagttgatcctggggtagcccagcccaacaagcggggttttgggcccagaacgtcatgatgggccctaattcggtcatgtcaacctatggcagccaggcatctcataacaaaatgatgaatcccagctcccatacccaccctgggacatgctcagcagacatcctcattttaaccgggcgttcccctgccccaaaacggttaagcaccaatgcccccacaccttcgggtatgaaccgcctgaccccaaagtgaaagacacctgtacaaagtgccttcttgccccaccccatggcagatgagtgccctgggggggttaacttccttccgtgaggcagctggcaatgggttatgggcaggatggggcctttttccaccaggaggaagctcccaagtgaattgggatggcatgttcatttgagcgcttagactgtgacatggattccatcattcggaatgacctcatggatggagatacattggtttttaactttgacaatgtgttgcccaaccaaagcttcccacacagtgtcaagacaacgacacatagctgggtgtcaggctgagggttagtgagcaggttacacttaaaagtacttcagattgtctgacagcaggaactgagaagaagcagtccaaaagatgtctttcaccaactcccttttaagttttcttggttaaaagaaaaaagcaaaaaagagaaccctcctttttttcctttcgtcagacttggcagcaaagacatttttcctgtacaggatgtttgcccaatgtgtgcaggttatgtgctgctgtagataaggactgtgccattggaaatttcattacaatgaagtgccaaactcactacaccatataattgcagaaaagattttcagatcctggtgtgctttcaagttttgtatataagcagtagatacagattgtatttgtgtgtgtttttggtttttctaaatatccaattggtccaaggaaagtttatactctttttgtaatactgtgatgggcctcatgtcttgataagttaaacttttgtttgtactacctgttttctgcggaactgacggatcacaaagaactgaatctccattctgcatctccattgaacagccttggacctgttcacgttgccacagaattcacatgagaaccaagtagcctgttatcaatctgctaaattaatggacttgttaaacttttggaaaaaaaaagattaaatgccagctttgtacaggtcttttctatttttttttgtttattttgttatttgcaaatttgtacaaacatttaaatggttctaatttccagataaatgatttttgatgttattgttgggacttaagaacatttttggaatagatattgaactgtaataatgttttcttaaaactagagtctactttgttacatagtcagcttgtaaattttgtggaaccacaggtatttgggggcagcattcataattttcattttgtattctaactggattagtactaattttatacatgcttaactggtttgtacactttgggatgctacttagtgatgtttctgactaatcttaaatcattgtaattagtacttgcatattcaacgtttcaggccctggttgggcaggaaagtgatgtatagttatggacactttgcgtttcttatttaggataacttaatatgtttttatgtatgtattttaaagaaatttcatctgcttctactgaactatgcgtactgcatagcatcaagtcttctctagagacctctgtagtcctgggaggcctcataatgtttgtagatcagaaaagggagatctgcatctaaagcaatggtcctttgtcaaacgagggattttgatccacttcaccattctgagttgagctttagcaaaagtttcccctcataattctttgctcttgtttcagtccaggtggaggttggttttgtagttctgccttgaggaattatgtcaacactcatacttcatctcattctcccttctgccctgcagattagattacttagcacactgtggaagtttaagtggaaggagggaatttaaaaatgggacttgagtggtttgtagaatttgtgttcataagttcagatgggtagcaaatggaatagaacttacttaaaaattggggagatttatttgaaaaccagctgtaagttgtgcattgagattatgttaaaagccttggcttaagaatttgaaaatttctttagcctgtagcaacctaaactgtaattcctatcattatgttttattactttccaattacctgtaactgacagaccaaattaattggctttgtgtcctatttagtccatcagtattttcaagtcatgtggaaagcccaaagtcatcacaatgaagagaacaggtgcacagcactgttcctcttgtgttcttgagaaggatctaatttttctgtatatagcccacatcacacttgctttgtcttgtatgttaattgcatcttcattggcttggtatttcctaaatgtttaacaagaacacaagtgttcctcgataagatttcctacagtaagccagctctattgtaagcttcccactgtgatgatcatttttttgaagattcattgaacagccaccactctatcatcctcattttggggcagtccaagacatagctggttttagaaacccaagttcctctaagcacagcctcccgggtatgtaactgaacttgggtgccaaagtacttgtgtactaatttctaattactacgtactggtcactttcctcccgtggccattactgcatcataataccaggaacctcagagcccccatttgttcattaaagaggcaactacagccaaaatcactgttaaaatcttactacttcatggagtagctcttaggaaaatatatcttcctcctgagtctgggtaattatacctctcccaagcccccattgtgtgttgaaatcctgtcatgaatccttggtagctctctgagaacagtgaagtccagggaaaggcatctggtctgtctggaaagcaaacattatgtggcctctggtagtttttttcctgtaagaatactgactttctggagtaatgagtatatatcagtttattgtacatgattgctttgtgaaatgtgcaaatgatatcacctatgcagccttgtttgatttattttctctgggttggactgttattaaaagcatattgtattatagagctattcagatattttaaatataaagatgtattgtttccgtaatatagacgtatggaatatatttaggtaatagatgtattacttggaaagttctgctttgacaaactgacaaagtctaaatgagcacatgtatcccagtgagcagtaaatcaatggaacatcccaagaagaggataaggatgcttaaaatggaaatcattctccaacgatataccaaattggacttgttccaactgctggatatatgctacccaataaccccagccccaacttaaaattcttacattcaagctcctaagaggttccttaatttaaaaaccctaattttaaaaaagagaagtttccttttcctgggttttaagtttggggaataatcattcattaaaaaaaaatgtattgtggtttatggcgaacagacctaacctgggcattacagttgggcctctccttggaggtggggcacagctgggccagtgtggccaggggtggccatgtaagtcccatcaggacgtagtcatgcctcctgcatttcgctacccgagtttagtaacagtgcagattccaccgttcttgttccgatactcctgagaagtgcctgatgttgatgtacttacagacacaagaacaatctttgctataattgtataaagccataaatgtacataaattatgtttaaatggcttggtgtctttcttttctaattatgcagaataagctctttattaggaattttttgtgaagctattaaatacttgagttaagtcttgtcagccaaaaaaaaaa

SEQ ID NO: 135031 - DNA, 383 bp, Homo sapiens
  misc_feature (1)...(383): n = a,t,c or g
aagacattaaaatattgattgcatctccatctgctacccacatacataaagaaactactagggccacatcatcaccatatagagatactcaaagtcggacagcctcaccaaacagagcaggaaaaggagtcatagaacagacagaaaaatctcatccaagaagccctaacgtgttatctgccgctttgagtcaaagaactacagttcctgaggaagaactaaatccaaagatactagctttgcaaaatgctcaaagaaagcgaaaaatggaacatgatggttcactttttcaagcagtaggaattatttagcatgtagactgtggggcaatcaatggatgaaagtggattaccacagctgaccagttatgattgtgaagttan

SEQ ID NO: 135032 - DNA, 2487 bp, Homo sapiens
atgagcaaagggggcaaagtggtagaaggtgagatcaaagaggtagatagtgttagaattgaattgaaggacacccagttggtgtccgctgcagaactgattgctcacctggtggtggagagaacccctcctctcccgatagggttgcagaagttgtcttctgtgttgttgattgctgtgatcatttggaaggaggagagatttggggtggagacaattcggtacttcattcacaggatgataagttctgaacgtcgaaaagaaaagtctcgagatgcagccagatctcggcgaagtaaagaatctgaagttttttatgagcttgctcatcagttgccacttccacataatgtgagttcgcatcttgataaggcctctgtgatgaggcttaccatcagctatttgcgtgtgaggaaacttctggatgctggtgatttggatattgaagatgacatgaaagcacagatgaattgcttttatttgaaagccttggatggttttgttatggttctcacagatgatggtgacatgatttacatttctgataatgtgaacaaatacatgggattaactcaggtattgcactgcacaggccacattcacgtatatgataccaacagtaaccaacctcagtgtgggtataagaaaccacctatgacctgcttggtgctgatttgtgaacccattcctcacccatcaaatattgaaattcctttagatagcaagactttcctcagtcgacacagcctggatatgaaattttcttattgtgatgaaagaattaccgaattgatgggatatgagccagaagaacttttaggccgctcaatttatgaatattatcatgctttggactctgatcatctgaccaaaactcatcatgatatgtttactaaaggacaagtcaccacaggacagtacaggatgcttgccaaaagaggtggatatgtctgggttgaaactcaagcaactgtcatatataacaccaagaattctcaaccacagtgcattgtatgtgtgaattacgttgtgagtggtattattcagcacgacttgattttctcccttcaacaaacagaatgtgtccttaaaccggttgaatcttcagatatgaaaatgactcagctattcaccaaagttgaatcagaagatacaagtagcctctttgacaaacttaagaaggaacctgatgctttaactttgctggccccagccgctggagacacaatcatatctttagattttggcagcaacgacacagaaactgatgaccagcaacttgaggaagtaccattatataatgatgtaatgctcccctcacccaacgaaaaattacagaatataaatttggcaatgtctccattacccaccgctgaaacgccaaagccacttcgaagtagtgctgaccctgcactcaatcaagaagttgcattaaaattagaaccaaatccagagtcactggaactttcttttaccatgccccagattcaggatcagacacctagtccttccgatggaagcactagacaaagttcacctgagcctaatagtcccagtgaatattgtttttatgtggatagtgatatggtcaatgaattcaagttggaattggtagaaaaactttttgctgaagacacagaagcaaagaacccattttctactcaggacacagatttagacttggagatgttagctccctatatcccaatggatgatgacttccagttacgttccttcgatcagttgtcaccattagaaagcagttccgcaagccctgaaagcgcaagtcctcaaagcacagttacagtattccagcagactcaaatacaagaacctactgctaatgccaccactaccactgccaccactgatgaattaaaaacagtgacaaaagaccgtatggaagacattaaaatattgattgcatctccatctcctacccacatacataaagaaactactagtgccacatcatcaccatatagagatactcaaagtcggacagcctcaccaaacagagcaggaaaaggagtcatagaacagacagaaaaatctcatccaagaagccctaacgtgttatctgtcgctttgagtcaaagaactacagttcctgaggaagaactaaatccaaagatactagctttgcagaatgctcagagaaagcgaaaaatggaacatgatggttcactttttcaagcagtaggaattggaacattattacagcagccagacgatcatgcagctactacatcactttcttggaaacgtgtaaaaggatgcaaatctagtgaacagaatggaatggagcaaaagacaattattttaataccctctgatttagcatgtagactgctggggcaatcaatggatgaaagtggattaccacagctgaccagttatgattgtgaagttaatgctcctatacaaggcagcagaaacctactgcagggtgaagaattactcagagctttggatcaagttaactga

SEQ ID NO: 135033 - DNA, 411 bp, Homo sapiens
cccacgcgtccgctcccctcacccaacgaaaaattacagaatataaatttggcaatgtctccattacccaccgctgaaacgccaaagccacttcgaagtagtgctgaccctgcactcaatcaagaagttgcattaaaattagaaccaaatccagagtcactggaactttcttttaccatgccccagattcaggatcagacacctagtccttccgatggaagcactagacaaagttcacctgaggtaggtgtcatgatataatcagaaagggacaactttcagattttaacattcaagaatgtatttataagtttgattcaaacactcatttgaaccacaaattacatttgtgtgtgtgtttgaattttagcactttaaaattattgcaagagctactgcctaacctagacc

SEQ ID NO: 135034 - DNA, 569 bp, Homo sapiens
  misc_feature (1)...(569): n = a,t,c or g
agaaataactatcaaacagccatgatgatgagatgaatgaaaaagcagcctagactttatacgaggggaattttttaaagagtaatgtataggccctgggcaggaagtaggtcataggtggtatcataggaaaaatgttcattgattttcaaaaacgtgattaatccactcgtgacagttaaattttatccaaagcttactggcccatgtccgaactncaactacttatctctgctttttttttccctagccattgtaaaatattttttttaactgctttgttcttcatacacaggtattgcactgcacaggccacattcacgtatatgataccaacagtaaccaacctcagtgtgggtataagaaaccacctatgacctgcttggtgctgatttgtgaacccattgctcacccatcaaatattgaaantcctttagatagcaagactttcctcagtcgacacagcctggatatgnaattttcttattgtgatgaaaggtaaattagatctaaaatgtgaatttgaaatttttaattagtctacagcattactgaatgtncancntagc

SEQ ID NO: 135035 - DNA, 4162 bp, Homo sapiens
ttatcttgtacgcactttccttccaaacaatacccttttgctgccattgttctcgttatgaataggctgcctcagctcctcagtgcacagtgctgcctcgtctgaggggacaggaggatcaccctcttcgtcgcttcggccagtgtgtcgggctgggccctgacaagccacctgaggagaggctcggagccgggcccggaccccggcgaattgccgcccgcttctctctagtctcacgaggggtttcccgcctcgcacccccacctctggacttgcctttccttctcttcctccgcgtgtggagggagccagcgctttaggccggagcgaagcctgggggccgcccgccgtgaagacatcgcggggaccgattcaccatggagggcgccggcggcgcgaacgacaagaaaaataggataaagttcttgaacgtcgaaaaaggaaaagttttcgagattgaagccagatctcggcgaagtaaaagaatcttgaagttttttatgagcttgctcatcaagtttgccacttccacataatgtgagttcgcatccttgataaggcctctgtgatgaggcttaccatcagctatttgcgtgtgaggaaacttctggaatgctggtgatttggatattgaagatgacatgaaagcacagatgaattgcttttatttgaaagccttggatggttttgttatggttctcacagatgatggtgacatgatttacatttctgataatgtgaacaaatacatgggattaactcagtttgaactaactggacacagtgtgtttgattttactcatccatgtgaccatgaggaaatgagagaaatgcttacacacagaaatggccttgtgaaaaagggtaaagaacaaaacacacagcgaagcttttttctcagaatgaagtgtaccctaactagccgaggaagaactatgaacataaagtctgcaacatggaaggtattgcactgcacaggccacattcacgtatatgataccaacagtaaccaacctcagtgtgggtataagaaaccacctatgacctgcttggtgctgatttgtgaacccattcctcacccatcaaatattgaaattcctttagatagcaagactttcctcagtcgacacagcctggatatgaaattttcttattgtgatgaaagaattaccgaattgatgggatatgagccagaagaacttttaggccgctcaatttatgaatattatcatgctttggactctgatcatctgaccaaaactcatcatgatatgtttactaaaggacaagtcaccacaggacagtacaggatgcttgccaaaagaggtggatatgtctgggttgaaactcaagcaactgtcatatataacaccaagaattctcaaccacagtgcattgtatgtgtgaattacgttgtgagtggtattattcagcacgacttgattttctcccttcaacaaacagaatgtgtccttaaaccggttgaatcttcagatatgaaaatgactcagctattcaccaaagttgaatcagaagatacaagtagcctctttgacaaacttaagaaggaacctgatgctttaactttgctggccccagccgctggagacacaatcatatctttagattttggcagcaacgacacagaaactgatgaccagcaacttgaggaagtaccattatataatgatgtaatgctcccctcacccaacgaaaaattacagaaatataaatttggcaatgtctccattacccaccgctgaaacgccaaagccacttcgaagtagtgctgaccctgcactcaatcaagaagttgcattaaaattagaaccaaatccagagtcactggaactttcttttaccatgccccagattcaggatcagacacctagtccttccgatggaagcactagacaaagttcacctgagcctaatagtcccagtgaatattgtttttatgttggatagtgatatggtcaatgaattccaagtttggaattggtagaaaaaactttttgctgaagacaccagaagccaaagaacccattttctactcaggacacagatttagacttggagatgttagctccctatatcccaatgggggagtgacttccagttacgttccttcgatcagttgtcaccattagaaagcagttccgcaagccctgaaagcgcaagtcctcaaagcacagttacagtattccagcagactcaaatacaagaacctactgctaatgccaccactaccactgccaccactgatgaattaaaaacagtgacaaaagaccgtatggaagacattaaaatattgattgcatctccatctcctacccacatacataaagaaactactagtgccacatcatcaccatatagagatactcaaagtcggacagcctcaccagacagagcaggaaaaggagtcatagaacagacagaaaaatctcatccaagaacgccctaaccgtgttatctgtccgctttgagtcaaagaactacagttcctgagggaagaactaaatccaaagatactagctttgcaggaatgctcagaggaaagcgaaaaatgggaacatgatgggttcacttttttccaagccagtagggaattgggaacatttatttacagcagccagacgatcatgcagctactacatcactttcttggaaacgtgtaaaagggatgcaattctagtgaccagaatggaattggagcaaaagacaattattttaataccctcttgatttagcatgtagactgctgggggcaatcagatggattgaaaggtgggattaccaacagctggaccagataatgattgagaagttaatgctcctatacaagggcagcagaaacctactgcagggtgaagaattactcagagctttggatcaagtttaactgagctttttcttaatttcattcctttttttggacactggtggctcactacctaaagcagtctatttatattttctacatctaattttagaagcctggctacaatactgcacaaactttggttaagttcaattttttgatcccctttctacttaatttacattaatgctcttttttagtatgttctttaatgctggatcacagacagctcatttttctcagttttttggtatttaaaccattggcattgcagtagcattcatttttaaaaaatgcacctttttatttatttatttttggctagggagtttatccctttttcgaattatttttaagaagatgccaatataatttttgtaagaaggcagtaacctttcatcatgatcataggcagtttgaaaaatttttacacctttttttttcacattttacataaataataatgctttgccagcagtacgtggtagccacaattgcacaatatattttcttaaaaaataccagcagttactcatggaatatattctgcgtttataaaactagtttttaagaagaaatttttttttggcctatgaaattgttaaacctgggaacatggaccattggttaaatccatataataaggattcttaaaatgctgtatggtttattatttaaatggggtaaagccattttacataatataggaaagatatggcatatatctaggaaggtatgtgggcctttatttgggataaaattctccaatttcaggggaaatcctctggatgtttcccatagttcactttgccagctcaaaagaaaacaataccctatgttattgttgaagttttatgctaatattgtgttactgatattaaaccctaaaaggttcctgccctacccctgttgggtataaaagatattttgagcagactgttaaacaagaaaaaaaaaaaatcatgcattcttagcaaaaattgcctagtatgttaatttggcccaaaaaccaaggtttgattttatgcactttgtcgctattaacatccttttttttcatgtagattttcaataattggagtaattttagaagcattattttaggaatatatagttgtcacagtaaatatcttgttttttcatatgtacaattgtacaaatattttcaatcctctttgctctttgtggttggatcttaaccactaactgtattgttttgttacatcaaataaacatcttctgtggaccaggaaaaaaaaaaaaaaaaaaaaagtcgac

SEQ ID NO: 135036 - DNA, 2591 bp, Homo sapiens
tttttttttttttttaccacttagattaagttatgaaatttatttatattttaccttttaaaagccatgtatatatcaaatctcactttcttggtaaagtcatcttattagaaatacaagaagtgcacttaatacaaggaagtaagtttctcggtgccaccaggtgaggtggtacatacactcacatcagtccctcaaacgaaggttttcggcagatttccccttccagacttctgaggttgatctggaattcagggaaggtctgaggtgaacttcttccaggaaattacaggtggaacaaggctggacctttaacttttgggggtcctccccgaagaaatactaaatgaaaaaaactaatttttttcccagtgggggccctggtggtttggctgggctttctcgggcatctggcaggctccttcacccgggcaggcggcgggaggccccaacagcaggcagtgtacaagcgcgaggtaagcacttgcagccccatcagagacatatgacatcaaaaaaccaaccttaaacccatatgccttttgggtcaatcaggaggtcctgctcctacaggtttaggctgacagctcttggacttatatttattaatatttgttgaaatattgaactccaaggttcttgagcttgttcctaaagcaagtttcccagcaacagcttttaattaacaaactgttatcttgccgatgtcttgttgccttattgaacgattgtctccgtcagaacagacccaggggttggtactggggtttcctatagcttctctctgcatctacaaagcaggttttcaaacacattttacatgtcgaaaccagtgtcataaggaaaacatttgtgacagaaaaacaatgctcagtttaatctaagttaccaaggcggaaggtaaaaggaactagtatccggctgagtccccaaacctctttcttctaattcatctgaggattttttgtgcttctagaacaagaatgtaggcaggctcccaaatggagaggtaaacatgaccggcgttgtttgaaactacttcattaatttgtaaatccagaaccaaaaagctctggccctcccacttctcttagctgaccctcctccccacttacggataaacagactttaacttccctaacccagaaacacttccaccaaaaatgtatggttataccttatcctaaaaaggcaccatgcaggcatttaagactgaaccagtgaactctaaatatgtagtagtagaaaatatcactaatcaaaacttccagcatcagatggtacaaaaccccaagaggactggtgacatgtaccccggggatggccaaccccagcttcttggcaaccccacaagcccaagcggggagcttcaactctggtcaggtgcacggctgccaaagtctgcacaccttggggacaagggaaaggagacacttgccttcattgtgctattcatgaccccagaaaaggtccctggctggcttgaagggaccccgagagacaaacactggattggagggaatgagtgtgaaacaagaggtggagaagctagattatcttccacaggaggcggcagaagctcccaggaagtagccgagaaccaatacgaactcgaccgtgtgacaaacaaggttaacagtaggggaaaaacaacctttgggcaaagaaccccaaagggaaagagaaagggctggaccctggggaccccacttccccctgtccagaagtgacccctgtcccccaatgcccatggcctcattttccaggtctgttgaaacaggtaaggtaacaggagtccatagatttcacggtttaatatgtaaatggaagctctgtaacatgagacaagaatagcaagcacggactctgctcactggtcgatgatggagcgctgcaacaccctgattcatcatgtccctcttcatcaacatcataatccacaaaagtgtcataagaaaaaccggtgccgggcgctggatgtgctctctgaagttggcgcttgcgggtagttggggtcatccccagggcaatcgaggcacatatcggacaaaccacagatttggtatcccgtgcctatggaataatttgcaagtttccaacaagtccttcctaatcaaagttccttctcaggacagtaaaggaccaaggaaaggtgtaacgggtttggaaacattcccttggctggaagagatgcatcccttaatgggtggccttaacaaccttccaatgatgtaattcttggtatttggaacaagtagccaacgtgggaccgggatctttggacagggaagaaattctttacgggcagccatggcaagaagtcttctgtgcttctcgatctgccgctcgagctccacggctcggacgccaggtgccagagcgctgcgacacaccccacagacaggcttcttcggcttcagacattcctgcaggcatgcagagcaaaagacgtgtccgcagggcacctgtaccggcttctcgtacacctctaagcacacgggacacgtgaagcgtcctagggggtcagcctccaccgccggccccgccagctgcgcagcacccccgcagtcccgctgttgcgccgccctctt

SEQ ID NO: 135037 - DNA, 1175 bp, Homo sapiens
accaaatcaaccataggtccaagaacaattgtctctggacggcagctatgcgactcaccgtgctgtgtgctgtgtgcctgctgcctggcagcctggccctgccgctgcctcaggaggcgggaggcatgagtgagctacagtgggaacaggctcaggactatctcaagagattttatctctatgactcagaaacaaaaaatgccaacagtttagaagccaaactcaaggagatgcaaaaattctttggcctacctataactggaatgttaaactcccacgtcatagaaataatgcagaagcccagatgtggagtgcccagatgttgcagaatactcactattttccaaattagcccaaaatggactttccaaagttggtcacctacagggtcggtatcatatactcgagacttaccgcatattacagtggatcgattagtgtcaaaggctttaaacatgtgggggcaaagagatccccctgccatttcaggaaagttgtatgggaacatgctgacatcatgaatggcctttgcgcaaggagctcatggggactctccccaattttgatgggccagggaacacgctgggcctcatgcttttgcgcctgggacaggtctcggaggagatgctcactttcgatgaggatgaacgctggacggatggtcagcagtctagggattaaactccctgtattgctgcaactcatgaacttggccattctttgggtatgggacattccctctgatcctaaaccaatagatgtatccaacctatggaaatggagatccccccaaattttaaactttcccaggatgatattaaaggcattccagaaactatatggaaagagaagtaattcaagaaagaaatagaaacttccgggcagaacatccccatcattcattcattggattgtatatcattgttgcacaatcagaattgataagcactgttcctccactccatttagcaattaatgtcacccttttttattgcagttggtttttgaatgtctttcactccttttattggttaaactcctttatggtgtgactgtgtcttattccatctatgagctttgtcagtgcgcgtagatgtcaataaatgttacatacacaaataaataaaatatttaggccatggtaaatttaccgaattccgccgatactgacgggc

SEQ ID NO: 135038 - DNA, 4233 bp, Homo sapiens
atgagcaacgcgaacaaacaaaagaaaaagactggggtgatgctgcctcgagttgtcctgactcctctgaaggtaaacggggcccacgtggaatctgcatcagggttctcgggctgccacgccgatggcgagagcggcagcccgtccagcagcagcagcggctctctggccctgggcagcgctgctattcgtggccaggccgaggtcacccaggaccctgccccgctcctgagaggcttccggaagccagccacaggtcaaatgaagcgcaacagaggggaagaaatagattttgagacacctgggtccattcttgtcaacaccaacctccgtgccctgatcaactctcggaccttccatgccttaccatcacacttccagcagcagctcctcttcctcctgcctgaagtagacagacaggtggggacggatggcctgttgcgtctcagcagcagtgcactaaataacgagttttttacccatgcggctcagagctggcgggagcgcctggctgatggtgaatttactcatgagatgcaagtcaggatacgacaggaaatggagaaggaaaagaaggtggaacaatggaaagaaaagttctttgaagactactatggacagaagctgggtttgaccaaagaagagtcattgcagcagaacgtgggccaggaggaggctgaaatcaaaagtggcttgtgtgtcccaggagaatcagtgcgtatacagcgtggtccagccacccgacagcgagatgggcattttaagaaacgctctcggccagatctccgaaccagagccagaaggaatctgtacaaaaaacaggagtcagaacaagcaggggttgctaaggatgcaaaatctgtggcctcagatgttcccctctacaaggatggggaggctaagactgacccagcagggctgagcagtccccatctgccaggcacatcctctgcagcacccgacctggagggtcccgaattcccagttgagtctgtggcttctcggatccaggctgagccagacaacttggcacgtgcctctgcatctccagacagaattcctagcctgcctcaggaaactgtggatcaggaacccaaggatcagaagaggaaatcctttgagcaggcggcctctgcatcctttcccgaaaagaagccccggcttgaagatcgtcagtcctttcgtaacacaattgaaagtgttcacaccgaaaagccacagcccactaaagaggagcccaaagtcccgcccatccggattcaactttcacgtatcaaaccaccctgggtggttaaaggtcagcccacttaccagatatgcccccggatcatccccaccacggagtcctcctgccggggttggactggcgccaggaccctcgcagacattaaagcccgtgctctgcaggtccgaggggcgagaggtcaccactgccatagagaggcggccaccactgccatcggaggggggggtggcccgggtggaggtggcggcggggccaccgatgagggaggtggcagaggcagcagcagtggtgatggtggtgaggcctgtggccaccctgagcccaggggaggcccgagcacccctggaaagtgtacgtcagatctacagcgaacacaactactgccgccttatcctctaaatggggagcatacccaggccggaactgccatgtccagagctaggagagaggacctgccttctctgagaaaggaggaaagctgcctactacagagggctacagttggactcacagatgggctaggagatgcctcccaactccccgttgctcccactggggaccagccatgccaggccttgcccctactgtcctcccaaacctcagtagctgagagattagtggagcagcctcagttgcatccggatgttagaactgaatgtgagtctggcaccacttcctgggaaagtgatgatgaggagcaaggacccaccgttcctgcagacaatggtcccattctgtctctagtgggagatgatacattagagaaaggaactggccaagctcttgacagtcatcccactatgaaggatcctgtaaatgtgacccccagttccacacctgaatcctcaccgactgattgcctgcagaacagagcatttgatgacgaattagggcttggtggctcatgccctcctatgagggaaagtgatactagacaagaaaacttgaaaaccaaggctctcgtttctaacagttctttgcattggatacccatcccatcgaatgatgaggtagtgaaacagcccaaaccagaatccagagaacacataccatctgttgagccccaggttggagaggagtgggagaaagctgctcccacccctcctgcattgcctggggatttgacagctgaggagggtctagatcctcttgacagccttacttcactctggactgtgccatctcgaggaggcagtgacagcaatggcagttactgtcaacaggtggacattgaaaagctgaaaatcaacggagactctgaagcactgagtcctcacggtgagtccacggatacagcctctgactttgaaggtcacctcacggaggacagcagtgaggctgacactagagaagctgcagtgacaaagggatcttcggtggacaaggatgagaaacccaattggaaccaatctgccccactgtccaaggtgaatggtgacatgcgtctggttacaaggacagatgggatggttgctcctcagagctgggtgtctcgagtatgtgcggtccgccaaaagatcccagattccctactgctggccagtactgagtaccagccaagagccgtgtgcctgtccatgcctgggtcctcagtggaggccactaacccacttgtgatgcagttgctgcagggtagcttgcccctagagaaggttcttccaccagcccacgatgacagcatgtcagaatccccacaagtaccacttacaaaagaccagagccatggctcgcttacgcatggggatctttacatggtcttgggaaaaaacagtgggcatggttgatgggaaggcagccccagttctttaaaggggttttgaagggagcctctttcttgccagatagctgtgaaacaggcactggtcttgccaggattgaggccacccaggctcctggagcaccccaaaagaattgcaaggcagtcccaagttttgactccctccatccagtgacaaatcccattacatcctctaggaaactggaagaaatggattccaaagagcagttctcttcctttagttgtgaagatcagaaggaagtccgtgctatgtcacaggacagtaattcaaatgctgctccaggaaagagcccaggagatcttactacctcgagaacacctcgtttctcatctccaaatgtgatctcctttggtccagagcaaacaggtcgggccctgggggatcatagcaatgttacaggccaagggaagaagctttttgggtctgggaatgtggctgcaacccttcatcgccccaggcctgcggacccgatgccttttcctgctgaaatccctccagtttttcccagtgggaagttgggaccaagcacaaactccatgtgtggtggggtacagactccaagggaagactgggctcccaagccacatgcctttgttggcagcgtcaagaaagagaagacttttgtgggggggtcctcttaaggcaaatgccgagaacaggaaagctactgggcatagtcccctggaactggtgggtcacttggaaagggatgccccttttgtcattggacttgcccttctggaaattaccccgagagccagggaaggggctcagtgagcctctggagccttacttctctcccctcccaactcatgatgaagcacgcattttatgggaagctttctaaactccaacttgagttccaccagctttaattattcctctagctctcccacctttcccaaaggcctttgctggaagtgttgttgcaagctgagccacaaagcaaactttggtgcgagccacagtgcatcactttccttgcaaatgttcactgacagcagcacggtggaaagcatctcgctccagtgtgcgtgcagcctgaaagccatgatcatgtgccaaggctgcgaaaggagctgtcaggatgtaggccttgtgcccactgcgctgaggggtgatgcaggctgtgaagtcactttggaccctggcttttggtctcaggccacagacctgaccaaaggttga

SEQ ID NO: 135039 - DNA, 489 bp, Homo sapiens
ccctagtccagtgcggtggaattccgcgagtactgggactacgaggctcacgtcccgagctggggtaatcaagatgattaccaactggttcgaaaacttggtcggggaaaatatagtgaagtatttgaggccattaatatcaccaacaatgagagagtggttgtaaaaatcctgaagcaactctaccagatcctgacagactttgatatccggttttatatgtatgaactacttaaagctctggattactgccacagcaagggaatcatgcacagggatgtgaaacctcacaatgtcatgatagatcaccaacagaaaaagctgcgactgatagattggggtctggcagaattctatcatcctgctcaggagtacaatgttcgtgtagcctcaaggtacttcaagggaccagagctcctcgtggactatcagatgtatgattatagcttggacatgtggagtttgggctgtatgttagcaagcatgatc

SEQ ID NO: 135040 - DNA, 1738 bp, Homo sapiens
tttttttttttttttacgttacttttaaaaggttttatttaataatatatacttttaaaataataatatgtaactggccgccatgccacatactgcgccccgtccccccactgtggagtctgtggtcagctagttagcgtggtttgctggaaaaacaggcggccacgggacgagtttgaggggctcggggagcaacagtaaccaacaacattctgcatacccttcacattccccatgctttcctgggtcgggaaaagaagtcaacaggaaggccaaagcgaagtgagccttttagcattcggaagtgacggtttgatatacgggtggtgggctgcccttcgcttgggtctagttccgtgctccgccaaacctgccaccggttttgtgtctgctcaccggaacggtgatctctctataccgcgttaaagacgttttggatttgggttcttggttctgcttatgggaaaagtggggagaaccgcaaacagacccgtcgcttttccagtcttcatcgtgctgccgtgaagaccactggaaaagcacagcatttgtctgcacaaggcttgggactgctcccttcaccacaagggtagaagtaatgggtggctccatggcctctttgggcagtcaagtctctggttgatgggcgtattgcagaaggtttgtcccagaagattcaagggcccccagggcttgacaaggtgtctgttctcactatggactacagttttcccaagcgtttccgtgaatgttgtcccaggatatcgttgaagtgtggatctaggtctatgtgatacttcttcagatacccatacagttcttctgtacccagaaccttggcaatgcgaacaagctggtcatagttgtcctgtccatggaagaatggttccccttcgaaagatcatgcttgctaacatacagaccaaactccacatgtccgaagctataatcgatacatctgatagtccacgaggagctctggtcccttgaagtacctttgaggctacacgaacattgtactcctggagcaggatgatagaattctgccagaccccaatctatcagtcgcagctttttctgttggtgatcctatcatgacattgtaagttttcacatcccctggcatgatccccttgctgtgccagtaatccagagctttaagtagttcatccaatataaaccggatatcaaagtctgtcaggatctggtagagttgcttaaaatctgtataaccgcatatatccaaataccaaagctggtgtcttgatcactgggtcctttacagtgtcaatcagcttaatgatatttgtcccaccacgaaggttctccagaatcttaacctctcgttttatcttctttttcttcactggcttcaggattcttacaaccacttctctcattgttggtgatattaatggccctcaaaatacttcccactatattttccccgaccaaggttttcgaaccagttgggtaatcattttgattaccccagctcgggacgtgagcctcgtagtcccagtactcgcggctcctcagactgttcacctcggcgtagaccccgggccctgcctcgccgcggccgggccgggcatggcgggcgggacccgggggccgcgcggggcgcagagggtggcggcggcggcgcggcggtggtacgaagggcgtcggccggaggaggcagcgggccgaagggagctggaggaggaggaggaggagcgcggcggcgggcggccgc

SEQ ID NO: 135041 - DNA, 569 bp, Homo sapiens
gcggccgcagcagaggctctaccacgtccttcgaccggttgcaaagtggcaccaccatggggttgtcctcaatgccacggaacagtccccgctccttcagcgccaccagcaccgctttcctggcctcaaacctgggcaggcccaggaaaggcggaggcacattgatgagggccccccgggagtccatgatgctgatggcctccagcccgtgccgctgccccaacttcaatagtcaattttggtcaatgtgcgggggtgatcttcacagcacctgtgcccaaagtcccatgtccacaaattcatcgaagacaatgggaaggctccgagacaggaatgggtggatcacgttcttccccttcaggtgctgagccttggaccttataggcaaaggacacgaggaccccgaactccaccttctccttgtagccaggcacggagagcagggtgcgacctgtcagctccttcttatccacctcaatgtcagagatggcggagttgagggtgcaggaccagttaacaaggcgggtactgcgatagatgatgccttcctcgtgaagccggacaaaggc

SEQ ID NO: 135042 - DNA, 2580 bp, Homo sapiens
atgccccctaacaggcaccgcatgcgtggggagaccaccctgtggaaccctggctgtgaccatgcaggtattgccacccaggtggtggtggagaagaagctatggcgtgagcagggactgagccggcaccagctgggccgcgaggcctttctacaggaagtctggaagtggaaggaggagaaaggtgaccggatttaccaccagttgaaagaagcttggcagctcgttggactgggatcgagcctgtttcaccatggaccctaaactctcaagcagctgtgacagaggcctttgtcgggcttcacgagaaaggcatcatctatcgcagtaccgcctttgttaactgtccctgcaccctcaactccgccatctctgacattgaggtggataagaaggagctgacaggtcgcaccctgctctccgtgcctggctacaaggagaaggtggagttcggggtcctcgtgtccttttgcctataaaggtccaaggctcagattaggcgacgaggaggtggtggtggcaaacaaactcggatcgaagacaaatgctgggagatgtggctgtagctgtgccacccccaaaagataccagattaccagcaccttgaaggggaagaacgtgatccaccccattcctgtctcggagcctttccccattgtcttcggatgaatttgtggacatggacttttggcacaggtgctgtgaaagatcaccccccccgacatgaccaaaatgactatgaagttgggcagcggcacgggctggaggccatcagcatcatggactcccggggggccctcaatcaaatgtgcctccgcctttcctgggcctgccgcaggtttgaggccaggaaagcggtgctggtggcgctgaaggaaccggggactgttccgtggcattgaggacaaccccatggtggtgccactttgcaaccggtcgaaggacgtggtagagcctctgctgcggccgcagtggtacgttcgctgcggggagatggcccaggctgccagcgccgctgtgactcggggtgacctccgcatcctgcctgaggcccatcagcgcacatggcatgcctggatggacaacatccgggagtggtgcatttccaggcagctgtggtggggccatcgcatcccagcctactttgtcactgtcagtgacccagcggtgccccctggggagtcagaagacctgagtgtgttctaccccgggacactgctggagaccggtcatgacatcctcttcttctgggtggcccggatggtcatgctgggcctgaagctcacgggcaggctgccctttagagaggtctacctcccatgcccatcgtgcgaaaatgctcacggccggaaagatgagcaagtctctaggcaatgtcatcgatcccctggacgttcatctcatggaatctccctgcagggcctccacaaccagctgctgaacagcaacctggatcccagcgaggtggagaaggccaaagaagggcagaaagctgacttcccagcgggagttcctgaatgtggcaccgatgctctccggtttggattatgtgcctacatgtcccaggggtcgtgaaaataaacttggaatgtgaaccggataatgggttaacgccaattctgcaacaagctctggaaatgcaccaagtttgcccttcgtggccttgggaagggttttgtgccctcacgacacctcaaactccgcaggccatgagagcctggcggaccgatgaatccgcaacctcctgacagaggctgtgaggctcagcaatcaaggcttccaggcctacgacttcccggccgtcaccactgcccagtacagcttctggctctatgagctctgtgatgtctacttggagtgcctgaaacctgtactgaatggggtggaccaggttggcaagctgagtgtgcccgccagaccctgtacactttgccttggacgttgggcctgcggctgctctcacccttcatgcccttcgtgacggaggagctgttccagaggctgccccggaggatgccgcaagctccccctagcctctgtgttaccccctacccggagccctcagagtgctcctggaaggaccccgagggcagaagccgccccttgagctggcgctaagcatcacgcgagccgtgcgctccctgcgggccgactacaacctcacccggatccggcctgactgtttcctggaagtggcggatgaggccacgggcgccctggcatcggcggtgtcgggctacgtgcaggccctggccatgcgcaggtgtggtggctgttctggccctgggggctcccgccccccagggttgcgctgtggctctggcttctgatcgctgctccatccacctgcagcttcaggggctggtggaccctgcacgggagctgggcaagctgcaaggcaagcgaagttgaggcccagcggaagggcccagcgtctgctggaaacccgttactgcctcgggtaatcctgtcaaggtgccgctcgaagatcaggaggcagatgaagccaagctccaacagacagaagcagagctcaggaaggtggatgaggccatcgccctattccagaagatgctgtga

SEQ ID NO: 135043 - DNA, 4193 bp, Homo sapiens
gtcacaaaggggggaacacgtgggcgccggctgccggggcggcgatcttagggaactagggtcacctggagagccgcccaccgtctctgcccgctcgactcctccgcccgggccgctcggcggctcgcagccgcggccggcgcctggctgtgaggtggattccccggcccagtctgaccatctccctccagtttttccacttcgttcggaccttctcataactatgtccaccctctacgtctcccctcacccagatgccttccccagcctccgagccctcatagccgctcgctatggggaggctggggagggtcccggatggggaggagcccacccccgcatctgtctccagccacccccgactagcaggactagctttcccccaccccgcctgccggccctggagcaggggcccggtgggctctgggtgtggggggccacggctgtggcccagctgctgtggccagcaggcctggggggcccagggggcagccgggcggctgtccttgtccaacagtgggtcagttacgccgacacggagttaataccagctgcctgtggagcaacgctgccggccctgggactccgaagctcggcccaggacccccaggctgtgctgggggccctgggcagggccctgagccccttggaggagtggcttcggctgcacacctacttggccggggaggcccccactctggctgacctggcggctgtcacagccttgctgctgcctttccgatacgtcctagacccacctgcccgccggatctggaataatgtgactcgctggtttgtcacgtgtgtccggcagccagaattccgagccgtgctaggagaagtggttctatactcaggagccaggcctctctctcatcagccaggccccgaggctcctgccctcccaaagacagctgctcagctcaagaaagaggcaaagaaacgggagaagctagagaaattccaacagaagcagaagatccaacagcagcagccacctccaggggagaagaaaccaaaaccagagaagagggagaaacgggatcctggggtcattacctatgacctcccaaccccacccggggaaaagaaagatgtcagtggccccatgcccgactcctacagccctcggtatgtggaggctgcctggtacccttggtgggagcagcagggcttcttcaagccagagtatgggcgtcctaatgtgtcagcagcaaatccccgaggtgtcttcatgatgtgcatcccaccccccaatgtgacaggctccctgcacctgggccatgcactcaccaacgccatccaggactccctgactcgatggcaccgcatgcgtggggagaccaccctgtggaaccctggctgtgaccatgcaggtattgccacccaggtggtggtggagaagaagctatggcgtgacgagggactgagccggcaccagctgggccgcgacgtttactaacaggaagtctggaagtggaaggaggagaaaggtgaccggatttaccaccagttgaagaagcttggcagctccttggactagggatcgagcctgtttcaccatggaccctaaactctcagcagctgtgacagaggcctttgtccggcttcacgaggaaggcatcatctatcgcagtacccgccttgttaactggtcctgcaccctcaactccgccatctctgacattgaggtggataagaaggagctgacaggtcgcaccctgctctccgtgcctggctacaaggagaaggtggagttcggggtcctcgtgtcctttgcctataaggtccaaggctcagatagcgacgaggaggtggtggtggcaacaactcggatcgagacaatgctgggagatgtggctgtagctgtgcaccccaaagataccagataccagcacctgaaggggaagaacgtgatccacccattcctgtctcggagccttcccattgtcttcgatgaatttgtggacatggactttggcacaggtgctgggaagatcacccccgcacatgaccaaaatgactatgaagttgggcagcggcacgggctggaggccatcagcatcatggactcccgggggggccctcatcaatgtgcctccgcctttcctgggcctgcccaggttttgaggccaggaaagcggtgcctggtggcgctgaaggagcggggactgttccgtggcattgaggacaaccccatggtggtgccactttgcaaccggtcgaaggacgtggtagagcctctgctgcggccgcagtggtacgttcgctgcggggagatggcccaggctgccagcgccgctgtgactcggggtgacctccgcatcctgcctgagcgccatcagcgcacatggcatgcctggatggacaacatccgggaagtggtgcatgttcccaggcaagctgtggtggggcccatcggcatcccagcctactttgtcactgtcagtgacccagcggtgccccctggggaggaccctgatgggcggtactgggtgagtgggacgcaatgaggcggaggcccgggagaaggcagccaaggagttcggagtgtcccctgacaagatcagtctccagcaagatgaggatgtattggatacctggttctcctctggcctctgtccccttatccaattttgggcctggcccaacgcagtcagaagacctcgagtgtgttctacccctgggacacatgcctggagaccggtcatgacatcctcgtcatctgggtggcccggatggtcatgctgggcctgaagctcacgggcaggctgcactttagagaggtctacctccatgccatcgtgcgagatgctccaggccggaagatgaagcaagtcttttagggcaatgttcatcgattcccctgggacgttcatctatgggaatctccctgcaggggcctccacaaccagctgcttgaacagcaacctggggatcccagcgaggttggagaaggccaaagaaggggcagaaagctgacttcccagcggggatttcctgaatgttggcaccgatgctctccggtttggattatgtgcctacatgtcccagggtcgtgacatcaacctggatgtgaaccggatactgggttaccgccacttctgcaacaagctctggaatgccaccaagtttgcccttcgtggccttgggaagggttttgtgccctcacccacctcccagcccggaggccatgagagcctggtggaccgctggatccgcagccgcctgacagaggctgtgaggctcagcaatcaaggcttccaggcctacgacttcccggccgtcaccactgcccagtacagcttctggctctatgagcctcgggaatgtctacctgaagttgcctgaaacctgtactggaatggggtggaccaggtggcagctgagtgtgcccgccagaccctgtacacttgcctggacgttggcctgcggctgctctcacccttcatccccttcgtgacggaggagctgttccagagggctgccccggaggatgccgcaagctccccctagcctctgtgttaccccctacccggagccctcagagtgctcctggaaggaccccgaggcagaaagccgccccttgatatggcgctaagcattcacgcgagccgtgcggcctcctgcgggccgactacaaccttcacccggaatccgggcctacttgtttcctggaagtggcggatcgaggccacgggcgccctggaatcggcggtgtcgggctacgtgcaaggccctggccaagcgcaggttgtggtggctgttgctgagccctgggggctccccgcccccccaggggttgcgctgtggctctggcttctgatcgctgctccatcccacctgcagctttcaggggctggtggacccttggacgggagcttgggcaagttgcaaagccaagcgagttgaggcccaagcggcaggcccaagcgtctgcgggacacgccgtgcctgcctcgggtaatcctgtcaaggtgccgcttcgaagtccaggaggcagatgaagcccaagctccaacagacagaagcagagctcaggaaggtggatgaggccatcgccctattccagaagatgctgtgatccaccacccagcttcacccctcacccccagcggctcaccatggggatggcagcaataaaatattttcccacaaaaaaaaaaaaaaaaaaaaaaaaaaagtcgtatcga

SEQ ID NO: 135044 - DNA, 1234 bp, Homo sapiens
atggatatgggagcaattaaggaaggagagtcaagaaggcctggtgacagaatgactgtggcaggaactaagctgctccacctgcaaagcacccaccttgacttcatctctctgtcaggggcaccatctggggcacttgaactctccaaggcccagccagcacatgctcaggacacaagggttttgatgaagatggtgattatctgggacttgtcccaggtgcctctgcagccaggacatgatggacacagcttccgtatccatgattatttgtactttcaagtgctgagtcctggggacattcgatacatcttcacagccacacctgccaaggactttggtggtatctttcacacaaggtatgagcagattcaccttgtccccgctgaacctccagaggcctgcggggaactcagcaacggtttcttcatccaggaccagattgctctggtggagagggggggctgctccttcctctccaagactcgggtggtccaggagcacggcgggcggggcggtgatcatctctgacaacgcagttagcaaatgacagcttctacgtggagatgatccaggacagtacccagcgcacagctgacatccccgccctcttcctgctcggccgagacggctacatgatccgccgctctctggaacagcatgggctgccatgggccatcatttccatcccagtcaatgtccaccagcattccccacctttgagctgctgcaaccggccttttctcttctggtagaagagtttgtcccacatttcggccataagtgactctgagctgggaaggggaaacccaggaattttgctacttggaatttggagatagcatctggggaccaagtggagcccaggtagaggaaaagggtttgggcgttgctaggctgaaagggaagccacacccactggccttcccttccccagggccccccaagggtgtctcatgctacaagaagaggcaagagacagcgccccagggcttctggctagaacccgaaaacaaaaggagctgaaggcaggtggcctgagagccattttgtgacctgtcacacccaccgggcttccagccttcccctacccaaggtcttttgcacagtgacctccacagcagttgttggagttggtttaaaagagctggtgtttggggactcaataaaccctcactgactttttagcaataaagcttctcatcagggttgcaaaaaaaaaaaaaagtcgacg

SEQ ID NO: 135045 - DNA, 393 bp, Homo sapiens; identical to SEQ ID NO: 134480

SEQ ID NO: 135046 - DNA, 1827 bp, Homo sapiens; identical to SEQ ID NO: 134481
  misc_feature (1)...(1827): n = a,t,c or g

SEQ ID NO: 135047 - DNA, 902 bp, Homo sapiens; identical to SEQ ID NO: 134482

SEQ ID NO: 135048 - DNA, 2166 bp, Homo sapiens; identical to SEQ ID NO: 134483

SEQ ID NO: 135049 - DNA, 1893 bp, Homo sapiens; identical to SEQ ID NO: 134484

SEQ ID NO: 135050 - DNA, 2884 bp, Homo sapiens; identical to SEQ ID NO: 134485

SEQ ID NO: 135051 - DNA, 2258 bp, Homo sapiens; identical to SEQ ID NO: 134486

SEQ ID NO: 135052 - DNA, 348 bp, Homo sapiens
gtcggaggccccgacagcgcccaactgaccagactcagtggttctccatccttccggacttcagcctggvtctccaagaggggccctctgtagagtcccagvccctactccgatcctcatatacccccggtggatcccacaactcatttgacctttaaccatctttctattgtttgtgttagccttaccctgtccctgccccaccttggttccccttgtctatggagccccgctcttgtgagccaggaagcagcgtctcatcaggacagaaggtaggatgaagacatgggrataatgtgagagagtagaacacccccgtacctaataaaaamtctttatttttttatt

SEQ ID NO: 135053 - DNA, 1565 bp, Homo sapiens
  misc_feature (1)...(1565): n = a,t,c or g
gaccataggaagncgtagaaatccttcttaaggccctcgcggtgggcttgagggtcctcctccccctcccactgacaactgccccaactgctcttcccgccccggtcacagtgaaaatgtagacggggtcgttgtccgtacgactgtgcgccaggggctcggggaggggcgccctccgcgtgagcgcccccctgggaatattgaacataatcacctctcattccagactatgttaggtcttaatggtgggaggacgcccgagtgctcggcccgtttcaccccgaggaggaatggacactgggtcatgacgccatcagagggcgccagagcagggaccggacgcgagttggaaaatgttggactcgctgttggccttgggcgggcctggtgctgcttccgggattccgtggaattgggaaggggcgcagtctcttgaaaggcgcttgtcaagaaatctgcactgtgtggggaagcaagtgcatatcctgggctgtgaaagtgagcgagaaagagtttcgtgaaggttttgactcttgataatcaacaattcggctggtttaccatgactttcttcagagacccttctcaactggtcaaaaactgaagaaggccttttcctggggggccgctgggagccttgaggagccatgtgcaagagagacagatcctgttcctgtcaccattgctctcgattcactcagcttggctgctacttcgccttcactgcacacacactctgccaggtcactgcatgctgtggagccatccaggactcttgtcctgggtgacagctcctcagtggggaaagtgagtgtgctgggcttgctccatgagaggcttccgcgaccagcccctgtggtagctctcagcagcctcgctcagactaaggtgaccctgggcgggtaccatggggccaggccttcggcccacatcctgtggtcggaggccccgacagtcgacccaactgaccagactcagtggttctccattccttccggacttcagcctgggatctccaagaggggccctctgtagagtcccagccctaattccgattcctcatattacccccggtgggattccccacaattcattttgaccttttaaccttcacctgctccaagaaagagagagaagccagagatagcctgatcctgcccttccagttcagttctgaaaaacagcaggcttctcctgcggcctaggccagggcaggctaccagccacatcttctatgagccagatgcttatgatgacctggaccaagaagacccagatgacgacctgaatattttgcctggccagatttgattagattgtaattggagggggcgcgggaagactttgggcccagaaccatctttctattgtttgtgttagccttaccctgtccctgccccaccttggttccccttgtctatggagccccgccttgtgagccaggaagcagcgtctcatcaggacagaaggtaggatgaagacatggggtaatgtgagagagtagaacacccccgctccctaataaaaatctttatttttttattaaaaaaaaaaaataataaaaa

SEQ ID NO: 135054 - DNA, 1842 bp, Homo sapiens
atgagggttcaaggacgcaggggtacatcagagaaaccatcaagaggtctgataaaaagcgacaccgggagcaagaatctctcgctctcgcaatttccatgccaggaagcgagaccaacgagagaacaccgcctgcagctagaacagcctggtcaggagcgtaacggagtggtgcgccaacgtgagaggaaacccgtgcgcggctgcgctttcctgtccccaagccgttctagacgcgggtgcagcgggaggattgtcagcacaggagaccgagagtcttcttcctgggggcgctctcttggtccctcagagggatatcgaggaaaaatgctttctgaaagcagctcctttttgaaaggtgtgatgcttggaagccattttctgtgctttgatccactaatgctaaggacacattagggattggtcatggaaataggaatgcaccaccatgagcatcatcacctacaagctcctaacaaagaagatatcttgaaaatttcagaggatgagcgcatggagctcagtaagagctttcgagtatactgtattatccttgtaaaacccaaagatgtgagtctttgggctgcagtaaaggagacttggaccaaacactgtgacaaagcagagttcttcagttctgaaaatgttaaagtgtttgagtcaattaatatggacacaaatgacatgtggttaatgatgagaaaagcttacaaatacgcctttgataagtatagagaccaatacaactggttcttccttgcacgccccactacgtttgctatcattgaaaacctaaagtattttttgttaaaaaaggatccatcacagcctttctatctaggccacactataaaatctggagaccttgaatatgtgggtatggaaggaggaattgtcttaagtgtagaatcaatgaaaagacttaacagccttctcaatatcccagaaaagtgtcctgaacagggagggatgatttggaagatatctgaagataaacagctagcagtttgcctgaaatatgctggagtatttgcagaaaatgcagaagatgctgatggaaaagatgtatttaattcccaaatctgttgggctttctattaaagaggcaatgacttatcacccccaaccaggtagtagaaggctgttgttcagatatggctgttacttttaatggactgactccaaatcagatgcatgtgatgatgtatggggtataccgccttagggcatttgggccatatttttcaatgatgcattggttttcttacctccaaatggttctgacaatgactgagaagtggtagaaaagccgtgaatatgatctttgtataggaccgtgtgttgtcattatttgtagtaagtaacctacatatcccaataccagctggtatgtttctttttcctttccaatttggtggcactggtataacccacacctttaaagtccagtaagtacatttttaaatgagggtggtttttttctttaaaacacatgaacattgtaaatgtgttggaaagaagtgttttaagaataataattttgcaaataaactattaataaatattatatgtgataaattctaaattatgaacattagaaatctgtggggcacatatttttgctgattggttaaaaaattttaacaggtctttagcgttctaagatatgcaaatgatcatctctagttgtgaatttgtgattaaagtaaaacttttagctgtgtgttccctttacttctaatactgatttatgttctaagcctccccaagttccaatggatttgccttctcaaaatgtacaactaagcaactaaagaaaattaaagtgaaagttgaaaaata

SEQ ID NO: 135055 - DNA, 1095 bp, Homo sapiens
atggccaagccgtgtggggtgcgcctgagcggggaagcccgcaaacagatggaaacagataagcaggagaagaaagaagtccataagtgtggatttctccctgggaatgagaaagtcctgtccctgcttgccctggttaagccagaagtctggactctcaaagagaaatgcattctggtgattacatggatccaacacctgatccccaagattgaagatggaaatgattttggggtagcaatccaggagaaggtgctggagagggtgaatgccgtcaagaccaaagtggaagctttccagacaaccatttccaagtacttctcagaacgtggggatgctgtggccaaggcctccaaggagactcatgtaatggattaccgggccttggtgcatgagcgagatgaggcagcctatggggagctcagggccatggtgctggacctgagggccttctatgcctcgctcgccatgggggaggtggagatctcggccctggcctacgtgaagatgtgcctgcatgctgcccggtacccacacgccgcagtcaacgggctgtttttggcgccagcgccgcggtctggagaatgcctgtgcctcaccgactgtgtgcccctcttccacagccacctggccctgtccgtcatgttggaggtcgccctcaaccaggtggatgtgtggggagcacaggccggtctggtggtggctggttactaccatgccaatgcagctgtgaacgatcagagccctgggcccctggccttgaaaattgctgggcgaattgcagaattcttccctgatgcagtacttattatgttggataatcagaaactggtgcctcagcctcgtgtgcccccggtcatcgtcctggagaaccaaggtctccgctgggtccctaaggataagaacttagtgatgtggagggactgggaagagtcacggcagatggtgggagctctactggaagatcgggcccaccagcaccttgtggactttgactgccaccttgatgacatccggcaggactggaccaaccagcggctcaacactcaaatcacccagtgggttggtcccactaatggaaatggaaatgcctga

SEQ ID NO: 135056 - DNA, 457 bp, Homo sapiens
cttgtttgtgactttcccaatgtggagaatattaagctaaaagcattacctagaaaaactggtttgggcttcaacaaccttgacccttttctctgctcagtcctttgggatcctatttcttggtgctaagaaggggttcattctcaagttaacctatttcctataaaaggaaaccagactcatgtcccagcctcccatgggactgactcagctttgcctcccacattgcagatggattaccgggccttggtgcatgagccagattaggcagcctatggggagctcagggccatggtgctggacctgagggccttttatgctgagctttatcatatcatcagcagcaacctggagaaaattgtcaacccaaagggtgaagaaaagccatttatgtactgaacccgggactagaaggaaaataaatgatctatatgttgtgtggaaaaaaaaaaaaaaa

SEQ ID NO: 135057 - DNA, 865 bp, Homo sapiens
gggcgactgaagcagcatggccaagccgtgttggggtgcgcctgagcgggaaaggccgcaaacaggtggaggtcttctaccgaaatcttttccaggaggctgaggaatttcttctcagagttcttgccaccagaaagtcatataccctgaaacaggctcttgcaagaggacttccccttcaatgtggcttgaccttgaacctttcgtccggggccccactggacatccccccatccccagacccctccaccccaaggatgatgagatggaaacagataaagcaggagaagaaagaagtccctaagtgtgatttcctcccctggaaatgagaaatgtccgtgtccctgcttgcccctggttaagcccagaagtctggatctctccaaagagaaatgccattctggtgatttacatggggatccagacacctggatcccccaagatttgaagatgggaaatgattttgggggtaagcaatccccggagaaggtgcctggagagggtgaaatgcccgtcaaagacccaaagtgggaagctttcccagccacccccatttcccaagtactttcttcagaacgtggggatgcttgtgggccaaggcctccacaggagactcatgtatatggattaccgggccttggtgcatgagcgagatgaggcagcctatggggagctcagggccatggtgctggacctgagggccttctatgctgagctttatcatatcatcagcagcaacctgggagaaaattgtcaaccccaaggggtgaagaaaagcccatctatgtacttgaacccggggactagaagggaaaataaatgatctatatgttgtgtggaaaaaaaaaaaaaaagggcggccgct

SEQ ID NO: 135058 - DNA, 752 bp, Homo sapiens
aatggatctggtcttcctggtagatctccagccgaggataggcacacagcttccgctccttgatgtaggtgtccaaggcaggatggacacggcgggtagccagccagatggacagaatggtggtgtaggggaaggtggctgtcaccacatggctgggtgccgggaaggagaacaccttgaagccaaatttctggtagaggtcgatgagctcaggggagggcgattcctcaccttcactcaggatgctgcccacggcacatcggcacttatcagggggcaccagggagcaggtgttgtgctgcactgtaactgatggcctccccatctctctccatcactccaggcctgtaggcaaaaaggtccaggatccatgtgggggttgtcatagtagacagcgatggagcggagcttgggagagatgctgcagctctcagtgaaaagccgcccagtctcaccatagggctccacatggaacttgtagggatggggggtgagccggcactcactgccaccccagccaactgccctgagtacccggcaaagcccagcagcatcagcagcagtaacagagtcaggtccagtagtaacagtaacaggtccgacatggctctggacccctgcaccgcaccccaaggcagctttttctttgcagccgccaatttgctctgtagggtttcttcagacattgcagggcaggaaggaatgtggggttggggccacgtcagctagattgcggcttaccactggggaac

SEQ ID NO: 135059 - DNA, 517 bp, Homo sapiens
actcaccagaagaatcccccccagcctgcccaagacaggtttttcccttgtaccatcttcagagaggtcaggggaagagggtccaggtgggttaaggggggtcgctatggataaccactaagaccagactgctgccaggaggagtgggggataatgaggtggccccagggtcctggcacctggctttggttttccgtcttctttcctcaggacgcccctgaggcctgggacctgtgcctggcttcgaggagcatctgtggctgggtgatccagctgctggtgtgatcatgggcttccctcctctctagcagggcaggcgctcctgccccagagactgggcaactggctgtttctatgacgtatttatttttacttgtgtttcatgtcacttttttaaaaaaaagcaaacagaacaattgtaagtcagtataactgcctatcaggtttctttatttctctttttgaaaaagaaaatttaaactcaaaaagggccgggggaccctggagtgatactttg

SEQ ID NO: 135060 - DNA, 3642 bp, Homo sapiens
atgtctgaagaaaccctacagagcaaattggcggctgcaaagaaaaagattcaggacattctgaatgtcctggtgtctgaccttaaccgttccaatggggtagtgctccccacactggacaagtggaaggatgcccctgaggcctgggacctgtgcctggctttgaggagcatctgtggcttggcgatccagctgctgggggccgcgcctctcacgcgggctgcaaacttcagcgtcgctgaagttacagatgtgcgggactcggcaaggaggtgggagacaagaaaagctccatacctgtcttgtcggattgctttgaggatgaatgaagcagctgtgtttcgacacttagtgcctggcgtatatttccccaggtgtgaccagggctgccagctgacagctgccttggggtgcggtgcaggggtccagagccatgtcggacctgttactgttactactggacctgactctgttactgctgctgatgctgctgggctttgccgggtactcagggcagttggctggggtggcagtgagtgccggctcaccccccatccctacaagttccatgtggagccctatggggggaggctggtcccacctaggctgagtgtggacccaggaagtagcagaagagaggctaccagcaaggttgctgtggacctgctcgtgttagatgctgctggagctgatggccctgtgtcccagagtcctgtatggaaagaggctgcaggtgtggtctcacagctgcgcggtggcagacaggacttgttccacagtggtaactgggatagagctgatgtggccccaaccccacctcccttcccgccctgccatgtcggaagaaacccgacgagcaaattggcagcagcaaagaaaaagttgagagactatcagtggaggaacagccctggtgttcctacaggagtgaaaaagaaaattaaaaattgcagtaaccccgagacaaccacttctggtggttgccactcacctggagatgtaatggaggcatgtagacaaatacaactggagagagatacatttgctgagattcttaaaggagagagagccacatggcagcagaggatgaatcagatgtcggagcagatgcacacactgagggaggagaaggagtgtattatgaatcggttacaggagctggagacaagcttggtggaattgagaaaacagatgactgaactcccagccctggcacccccagcaaggccctccgaggtggagcagcagctacaagaggaggctgagcacctgagggaggagctggagagtctggcaggacagctccaagcccaggtacaggacaatgagggcttgagttgcctgaaccgggagcaggaggagaggctgctggagctggagcgggcagctgagctctggcggaagcaaactggacggagggtgggggagaaggaggggcgggggggggaggaggaggaggatgaggatgaggaggagaaggagaaggagaagaagaagaagaagaaggaggagaaggagaaggaggaggaggcgtctcggcccatgaagagcatcctgcaggacctggaaagccaggagtccatggtggcatttttaacatcagctgtagccagtgcagatggggagcaggctcggctccgtgggcagctgaaggagcaaaggctgcgctgccggtgcctggctcacctgctggcctgggcccagaagcagccagaggcagcagccccagccccagggactgggatggattctgtgtgtggggggacccaccgggccctgcagggtgccatggagaaactgcagagctgctttatgcagctgatgcaggaaaaggtggacctgaaagagcgggtggaggagctggaacatcgctgcatccagctctctggagagacagacaccatcgatctttgccaggtgaccctcaccagcagcgtggagcctgcacaaggagaggccggggagggttctcccctcgacaaccccagtgcacagcagatcatgcagctgtttggtgagatgcagaaccctcaggagcgcccaggcttgggcagcatcccctgcattctgttttcccaccaggctgacaaaaaccaccagtgctgttgtgtcctgggcagcctcctgagtgaaggtgaggaatctccctcccctgagctcatccacatctaccagaaatttgacttcaaggcattctccttccaggcacccagccacgtggtgacagccaccttcccctacaccaccatgctgtccatctgggtggctgcctgccatatccattctgccttggacacctacatcaagcccagggctggggcagcaatggcaggcccttctcctttacttcctaacctggtcactggccatggtggcagcacacccttcctggaggaaggagagccagccaccaggttgtctgacagaggaactgacatgatgagtgacacgagttctggaagcttggaggtgagccctggtagccgggagacttcatttgctaccgtgtcacctggggagagcggccgcggctgggaggatggtgacacctgcagtgagtgcagctgcagagagtcaggtgccagcggctcctcttttgaggagctggacctggaggactctccttccacgaaagacttgctgaagctcctgaggcacatgctgaactgtgatgtgggactctggagttccccaaccacgctaaaggaatgcagtagtgggatccacaaggtcaaccaccccatgattgctgactgtttccaccaccagtttcctggtgttcccatctgcgggatcctctcccatcagtactgtttcccccggtgtgaccagggcttccagctgacagctgccttggggtgcggtgcaggggtccagagccatttcggacctgttactactgggcctcacaggtggcctgactctgttactgctcctgacactgctggcctttgccgggtactcagggctgttggctggggtggcagtgagtgccggctcaccccccatccctacaagttccatgtggagccctatgaggtgcgcacccaacgccaggcagagggagctggcgtggggctgctggcggtcaatgtcacccgagatgaggaggatcttctaggaggggccccggggccacagaacgagaggggagtgtgcgctgagcccaccttgcaaagacgctctgacccagtagataagaagctgctggccaatccaaccacccaactcattcacttcaactgtccagacaccagccatcctacttcctccatttcctggatgaaaaactacaagaggtttcataaaaagcatcacatcaggacatcaagagtgctctcctcactggccattctgcatacatggctgctggtcaaccagactgtggtgctgggcggtgaggtgaagctccgctgtgaggtgtgcagggacttagcatttggaggcgaacagcagcaagcgtttggttacatcttctgtcactcagggcctgagggcggggggggggggggtcttaaacgttatccattcagcgacgctggcctgggaactgtccaatcaggcacgcagctggagcggaaagggcggcttccgggatgtggcggggtctttgtctctcgctgcagtcggagtatggtctag

SEQ ID NO: 135061 - DNA, 3384 bp, Homo sapiens; identical to SEQ ID NO: 127568

SEQ ID NO: 135062 - DNA, 2007 bp, Homo sapiens
gttcatcaagaggaagaagttcgatgatgagctggtggagagcagcctggcaaaatcttctacccgggcaaagggggccagtggggtggaaccagggcgctgttcggggagtgaaccctcctccagtgagaagaagaagatggtgcacacgcttgccagcaacggggccaactccatctgggagcactccctgctggaccccgcacaagtgcagagcggccggcgtaaagccaacccccaagacaaagtccaccccatcaagtcagaggtcatcagggccaagtaccagatgctggcatttgtgcaccagcttccctgccgggacgaatgatggagttcccgccaaagaccttcagcaaagcaaactaacactcgagcgtgcggaacaggcaaaccctggaagacatgtctgcgcctgctctcccctgggtgccccaggccaacttcttccacccagagaagggcaccacacctctgcacgtggctgccaaggcaggacagacactgcaggccgagctgcttgtagtgtatggggctgaccctggctcccctgatgttaatggccgcacacccattgactatgccaggcaggcggggcaccatgagctggcggaaaggctggttgagtgccaatatgagctcactgaccggctggccttctacctctgtggacgcaagccggatcacaagaatgggcattacatcatcccacagatggctgacagccttgacttatccgaatttggcaaagctgctaagaagaagctgcaggcgctcagcaaccggctttttgaggaactcgccatggacgtgtatgacgaggtggatcgaagagaaaatgatgcagtgtggctggctacccaaaaccacagcactctggtgacagagcgcagtgccgtgcccttcctgcctgttaacccggaatactcagccacgcggaatcaggggcgacaaaagctggcccgctttaatgcccgagagtttgccaccttgatcatcgacattctcagtgaggccaagcggagacagcagggcaagagcctgagcagccccacagacaacctcgagctgtctctgcggagccagagtgacctcgacgaccaacacgactacgacagcgtggcctctgacgaggacacagaccaggagcccctgcgcagcaccggcgccactcggagcaaccgggcccggagcatggactcctcggacttgtctgacggggctgtgacgctgcaggagtacctggagctgaagaaggccctggctacatcggaggcaaaggtgcagcagctcatgaaggtcaacagtagcctgagcgacgagctccggaggctgcagcgagaggagctagaggacgacgccatctattcagtgcacgtccctgctggcctttaccggagcaagctttcccgccacggcagtggagccgacagtgactatgagaacacgcaaagtggggacccactgctgggcttcgtgccctgctcagagaagatccatttggctgtgaccgagatggcctccctcttcccaaagaggccagccctggagccagtgcggagctcactgcggctgctcaacgccagcgcctaccggctgcagagtgagtgccggaagacagtgcccccagagcccggcgccccagtggacttccagctgctgactcagcaggtgatccagtgcgcctatgacatcgccaaggctgccaagcagctgccagtgggcagcccaggctggctctacccaggccatctccagcgccagcccccatgcagtcagcaccaggggctacgagaggaggtaactgttagagctacgaggaaggcagcactgtacgcagcaccctataagtctgacttcctgaaagcgctctccaaggggcagaatgttacggaggaggagtgcctggagaagatccgcctcttcctagtcaactacacggcgaccatcgatgtcatctacgagatgtacacccagatgaacgctgagcttaactacaaggtgtag

SEQ ID NO: 135063 - DNA, 2308 bp, Homo sapiens
atgtcccgaaaggggccgcgagcggaggtgtgtgcggactgcagcgccccggaccctggctgggcatccatcagcaggggtgtgctggtgtgtgacgagtgctgcagcgtgcaccggagcctgggacgccacatctccattgtcaagcaccttcgccacagcgcctggcctcccacgctgctgcagatgggtgcacacgcttgccagcaacggggccaactccatctgggagcactccctgctgggaccccgcacaagtgcagagcgggccggcgttaaagcaaacccccaaggacaaagttccaccccttcaagttagagtttcattcaggggccaagttaccagattgttgggattttgttgcacaagttttcctttgccgggacgatgatggagtcaccgccaaagacctcagcaagcaactacactcgagcgtgcggacaggcaacctggagacatgtctggcgcctgctctccctggggtgccccggccaactttttccaccccgagaaagggcaccacacctttgcacgtggatgccaaggcaggacagacactgcaggccgagctgtcttgtagtgtatggggctgaccctggctcccctgatgttaatggccgcacacccattgactatgcccaggcaggcggggcaccatgagctggcggaaaggctggttgagtgcccaatatgagcctcactgagcggctggccttctacctctgtggacgcaagccggatcacaagaatgggcattacatcatcccacagatggctgacagccttgacttatccgaattggccaaagctgctaagaagaagctgcaggcgctcagcaaccggctttttgaggaactcgccatggacgtgtatgacgaggtggatcgaagagaaaatgatgcagtgtggctggctacccaaaaccacagcactctggtgacagagcgcagtgctgtgcccttcctgcctgttaacccggaatactcagccacgcggaatcaggggcgacaaaagctggcccgctttaatgcccgagagtttgccaccttgatcatcgacattctcagtgaggccaagcggagacagcagggcaagagcctgagcagccccacaggcaacctcgagctgtctctgcggagccagagtgacctcgacgaccaacacgactacgacagcgtggcctctgacgaggacacagaccaggagcccctgcgcagcaccggcgccactcggagcaaccgggcccggagcatggactcctcggacttgtctgacggggctgtgacgcctgcaggagtacctggagctgaagaaggccctggctacatcggaggcaaaggtgcagcagctcatgaaggtcaacagtagcctgagcgacgagcttccggaggctgcagcgagagatccacaagctgcaggcggagaacctgcagctccggcagcctccagggccggtgcccacaccttcacttccccagtgaacgggcggaacacacacccatggcgccaggcgggagcacacaccgcagggatcgccaggccttttccatgtatgaacctggctctgccctgaagccctttgggggcccccctggggacgagctcactacgcggctgcagcctttccacagcactgagctagaggacgacgccatctattcagtgcacgtccctgctggcctttaccggatccggaaaggggtgtctgcctcagctgtgcccttcactccctcctccccgctgctgtcctgctcccaggagggaagccgccacacgagcaagctttcccgccacggcagtggagccgacagtgactatgagaacacgcaaagtggggacccactgctggggctggaagggaagaggtttctagagctgggcaaagaggaagacttccacccagagctggaaagcctggatggagacctagatcctgggcttcccagcacagaggatgtcatcttgaagacagagcaggtcaccaagaacattcaggaactgttgcgggcagcccaggagttcaagcatgacagcttcgtgccctgctcagagaagatccatttggctgtgaccgagatggcctccctcttcccaaagaggccagccctggagccagtgcggagctcactgcggctgctcaacgccagcgcctaccggctgcagagtgagtgccggaagacagtgcccccagagcccggcgccccagtggacttccagctgctgactcagcaggtgatccagtgcgcctatgacatcgccaaggctgccaagcagctggtcaccatcaccacccgagagaagaagcag

SEQ ID NO: 135064 - DNA, 3499 bp, Homo sapiens
gcggccgcgtcgccgctgaggatgtcccgaaaggggccgcgagcggaggtgtgtgcggactgcagcgccccggaccctggctgggcatccatcagcaggggtgtgctggtgtgtgacgagtgctgcagcgtgcaccggagcctgggacgccacatctccattgtcaagcaccttcgccacagcgcctggctctcccacgctgctgcagatggtgcacacgcttgccagcaacggggccaactccatctgggagcactccctgctggaccccgcacaagtgcagagcggccggcgtaaagccaacccccaagacaaagtccaccccatcaagtcagagttcatcagggccaagtaccagatgctgggcattttgtgcacaagctttccctgccgggaacgatgatgggagttaaccgccaaaggaccttcagcaaggcaattacattcgagctgcggacaggcaacctggagacatgtctgcgcctgctctccctgggtgcccaggccaacttcttccacccagagaagggcacccacacctctgcacgtggctgccaaggcaggacagacactgcaggccgagtatgcttgtagtgtatggggctgaccctggctcccctgatgttaatggccgcacacccattgactatgccaggcaggcggggcaccatgagctggcggaaaggctggttgagtgccaatatgagctcactgaccggctggccttctacctctgtggacgcaagccggatcacaagaatgggcattacatcatcccacagatggctgacagatctcggcaaaagtgcatgtctcagagccttgacttatccgaattggcccaaagctgcctaagaagaagctgcaggcgctcagcaaccggctttttgaggaactcgcccatggacgtgtatgacgaggtggatcgaagagaaaatgatgcagtgtggctggctacccaaaaccacagcactctggtgacagagcgcagtgccgtgcccttcctgcctgttaacccggaatactcagccacgcggaatcaggggcgacaaaagctggcccgctttaatgcccgagagtttgccaccttgatcatcgacattctcagtgaggccaagcggagacagcagggcaagagcctgagcagccccacagacaacctcgagctgtctctgcggagcacagagcgacctcgaggaccaacacgactactacagcgtggcctctgacgaggacacagtagcacgagcccctgcgcagcaccggcgccactcggagcaaccgggcccggagcatggactcctcggacttgtctgacggggctgtgacgctgcaggagtacctggagctgaagaaggccctggctacatcggaggcaaaggtgcagcagctcatgaaggtcaacagtagcctgagcgacgagctccggaggcttgcagcgagagcactttgcacccatagatccacaagctgcaggcggagaacctgcagctccggcagcctccaggggccggttgcccacacttccattccccagttgaacggggcgggaacacacacccttgggcgccaggcggggagaacaacaccgcagggatcgccaggccttttccatgtatgaaccctgctctgccctgaagccctttgggggcccccctggggacgagctcactacgcggctgcagcctttccacagcactgagctagaggacgacgccatctattcagtgcacgtccctgctggcctttaccggagcaagctttcccgccacggcagtggagccgacagtgactatgagaacacgcaaagtggggacccactgctggggctggaagggaagaggtttctagagctgggcaaagaggaagacttccacccagagctggaaagcctggatggagacctagatcctgggcttcccagcacagaggatgtcatcttgaagacagagcaggtcaccaagaacattcaggaactgttgcgggcaagccccaggagttcaagcatgacagcttcgtgccctgctcagagaagatccatttggctgtgaccgagatggcctccctcttcccaaagaggccagccctggagccagtgcggagctcactgcggctgctcaacgccagcggcttacgggttgcagagtgagtgccggaagccagtgcccccagagcccggcgccccagtggacttccagctgctgactcagcaggtgatccagtgcgcctatgacatcgccaaggctgccaagcagctggtcaccatcaccacccgagagaagaagcagtgacctctctccccacaccctcacctgcaccctaggacctcactggccataggagctgggccactccagacattaatccccaccccaacagagccactggcacaagtgcccttagtgctgccacactccctgggcagccaggtgccctggtgcccacccctgtcgagcccctaaggatggggaggttgggggggcaggagcttctgtcccccacattccatgcacctcccctctgtatattagcatcttcccccctccttagttgagcaggggcctgcaaggagtcactcccagccccttggctttttaggggcaccttcaggcaaagggggcaggttggggacactccaagtggggcagctctccgtacatgcgccccacccccatgagccagttcagccctactgggggctgaggcgggggcatccccttcctttgttacatagtctccatggatgtccctgccctgttaggccaccagccccttgctggtctcccttttaatgccatatggcccctgccttagggcacaggccccaacctgtgtgctgggggccccaagaggcggtccccagagaagcggagggagggcacccgcagcgccgacaacactttggagaggagggagaagcacgagaagagacgagacgtctctccggagcggaggcgagagcggtcacccacccgcaggagagacggctcccccagccggcggagacggtctctggagagactcctggagcagaggaggtcccccgagcgcaggagagggggctcgcccgagcgcagggccaagtccaccgaccggaggcgcgcacgctcccccgagcgcaggagagagcggtccctggacaaaaggaacagagaggacagagccagccaccgagaaagggaagaggcgaatctgaaacaggatgccggcagaagttccagacatcccccggagcagagaaggcgaccttacaaagaatgtagcaccgacctcagtatctgagacgctgagtcacattccaacctttaccgtgtcaaaggttctaagaggaaagtcacaaacctgaaattatttagtttcttacctaatgaagcatctgacacctgatgatcctatgaataacaacaaacattttatgcatttgaaatcttataagaaaaaatatatatgaaaagtattgtgcctgatgtatcatattaaagaaagtatttttaaatgc

SEQ ID NO: 135065 - DNA, 946 bp, Homo sapiens
atggatgcagctagaggccaatatcctaagctaattaacacagaaagaaaaccaaatactgcatgttctcacttgacttggctcttggatggcatttctggacctgctcaggtcaaagaggagcccactcctctgaaagccgcgttgttgccactctgccaccatgttcgaggtgcccctggtccagggctccatcctgaagaaggtgttggaggcactcaaggacctcatcaacgaggcctgctgggacatcagctcgagcggcgtgaacctgcagagcatggattcgtccacgtctccttgctgcagttcaccctgccgtctgagggctttgacacttaccgctgtgactgcaacctggccatgggcgtgaacctcactattatgtccaaaatactaaaatgtgctggcaatgaagatatcgttacactaaggattgaagataatgtgaataccttggtgctagtatttgaagcttcaaatcaggagaaggtttcagactatgaaattaagttgatggatttggatgttgaacaacttggaattgcagaacaagagtaccactatgtagtaaagatgctttctggtgaatttgcaagtatatgctgagatctcagccatattggagatgctgttgtaatttccggtgtaaaagatggaattatattttctgcaagtggagaccttggaaatagaaaacaaattgtcacagacaagtactgtcgataaagaggaggaagctgttaccatggagatgaatgaaccagttcaactaacttttgcactgaggtacctgaacttccttacaaaagccactccactctcttcaatggtgacactcaatatgtctgcagacatacaccttgttgtagactataaaattgctgatgtgggacacttaaagtactacttggctcccaagatggaggatgaagaaggaccttag

SEQ ID NO: 135066 - DNA, 1341 bp, Homo sapiens
  misc_feature (1)...(1341): n = a,t,c or g
aggaagggtnnnnaaggggnnnnnnaatcgtagaccactagctcggtgtgccggaattcgcgtagcagagtggtcgttgtctttctaggtctcagccggtcgtcgcgacgttcgcccgctcgctctgaggctcctgaagccgaaaccagctagactttcctccttcccgcctgcctgtagcggcgttgttgccactccgccaccatgttcgaggcgcgcctggtccagggctccatcctcaagaaggtgttggaggcactcaaggacctcatcaacgaggcctgctgggatattagctccagcggtgtaaacctgcagagcatggactcgtcccacgtctctttggtgcagctcaccctgcggtctgagggcttcgacacctaccgctgcgaccgcaacctggccatgggcgtgaacctcacctgttgtcccaaaatatctaaaaggccccggcaatggaatttccttacaccttgggcccggagtataacccggataccttggcgctagtatttgaagcacccaaccagggggaagtttcagactatgaaatgaaggtgatggatttagatgttgacaaacctggaattccaggaacggaagtccagcggtttagtaaagatgccctcctgtgaatttgcaccgtatatgccgggatcccagcccatattggagatgctgttgtaaatttcctgtgcaaaagacggagtgaaattttctgcaagtggagaacttggaaatggaaacattaaattgtcacagacaagtaatgtcgataaagaggaggaagctgttaccatagagatgaatgaaccagttcaactaacttttgcactgagggtacctgaacttctttacaaaagccactccactctcttcaacggtgacactcagtatgtctgcagatgtaccccttgttgtagagtataaaattgcggatatgggacacttaaaatactaccttggctcccaagatccgaggatgaagaaggatcttaggcattcttaaaattcaagaaaataaaactaagctctttgagaacttgcttcctaagatgccagcatatactgaagtcttttctgtcaccaaatttgtacctctaagtacatatgtagatattgttttctgtaaataacctatttttttctctattctctgcaatttgtttaaagaataaagtccaaagtcagatctggtctagttaacctagaagtatttttgtctcttagaaatacttgtgatttttataatacaaaagggtcttgactctaaatgcagttttaagaattgtttttgaatttaaataaagttacttgaatttcaaacatcaaaaaaaaaaa

SEQ ID NO: 135067 - DNA, 423 bp, Homo sapiens
agtccaaggtcttggagatgttctcctgttttattcttgaggtttgagcttagctagctgggctcttagcaggatggttttggtagttgatagatcagattaaatggtatttaatttgtgagcagtaagtgctcacaaaacagaaatcagtgtaaaaattggattttgtttgttgttgtcgtctttagaacaaccagaaattaagcaggttgatagtgtcttttagtttatttcattttagatcaacaggcggtccttcgggtcggagtggacatcggatggtggcctggaagagacaattgatcctgtttggtggcttccatgaaagtacacggttggtaccaagaacggaaaaatctttctcttctgaagcattaaggagtgggctttttatagaaagagcattctgaatacacaagaaat

SEQ ID NO: 135068 - DNA, 2253 bp, Homo sapiens
atggcccggcctcttctgctacctcgccctccttcagagctccttgctggaaccccgtctcccctgcctacaagccccagcgctttgccttatagccacagggtgagtatgttctgcaagtgggaactcaactgcgccatgaaagccagccttgtaaaacacaccggcaccccagggaggtttcgccacgttctcctgcacaactcaccgcgccgatttcactccttaatgaccgtgtttcaaacgctgccagggcgacgcttcatctttaggcagccaggggccagaaggagcctggatcctccactggccccctccctctccttcagcggccgtgacactttccccagcgtccactgccctcttgggacgggccatcagccacagaaacatcctcatcttcgggtgggcattgacagcaaggcccacagcccggtgaaaggaaggacagccctggccatacccagagccagcgccagggccttggccaggacacctgtcacagtaataaacatgtaccaggtacaggagcatccgtggatagggttcagggtcagccacaatgaaaatcctctctgttggccacagaggctgctccctgggccgccggtcctcacctgcccccgagccaggcacagcaaactgcctgctggagacagcacagaggaagtggccggcagcttcatcagttccaggaagcccaggcagcctggtcccccagggtgcaccgggcacagcagttcgcacggggccggagagcggcagctgaccacagcaactacagctggcccgacaccgggcacagtcatcagagatgccagaccagaggaaatacagcaatcaaagcaggcaaacctgttgctaaatgtgtttttgagagtaaaactccttggccaaatacttcaagacgctgatgattctcaaagaacaaagcacatccaaaccatagcagaaaggatggtccccaagagccctaggagggaacgtggccctactggtaccttgatttcagagttctgcttccagaacgaacagtcactctggagcaaggagcttccacgtgagaaaccccactaccctcagactgccagaaatccacagacatacgcatacatgtgtcggaaacaaaagtggcaccgacagttctctcaaaggagccgtgttctgcgcagacacccgcagcccctgtccaacatacagccagagctacacaaggccccactaattgctctaattgccttgccgccacctggtgcagatgcagccgcctttccaaacggagctgccgggcagggctgtaactcatacttcctgcttgaatcatgtctgcctcttacatcagccaccagcctctttttcatccagcatgggaggggacgatgggagccaggatggctgccagcgtttcgagataacgccagccatgcagggcctggaagggggagcatcacccaggcacctcacagagcacacatatgcaaagccacccggtccacaccccagcagacacgggagagaggcttcgcaccaccagctcccagtgatgatgctgcctgcctgcagcctggactgtccccaggccctggagacccaccttctcctctcagccagcaccctcggctttgcccaaccacagtaaagctccaaattccccaattctctgagtactttgatgcaaaactgccaaatggggaagtgattctgctgagagtccgaggcccccgagcccgctgccgaagacggagctccaagaccgaacctcgtaaagggcccagccgcacctctacccggaagcggctcgaactcggggccggaagtgactccatttctgtgcgccgagctccgccccacgagcacctgtttccgagcggagagcgcgggccgttttctttcctggtgtcccgtcgcggcttgggacccggcaagatgggcaagaagggcaagaaggagaagaagggccgcggcgcggagaagacggccgccaagatggagaagaaggtgtctaagcgctcgcggaaggaggagatccctaaacagcagcaaaacgaaaaataccaagtgcctcaattcgatcaatcaacgattaaaaatattgagtctgcaaaaggacttgatgtgtgggacagctggccgctgcaaaacgctgacggaacagtagctgaatacaacggctatcacgttgtgtttgctcttgcgggaagcccgaaagacgctgatgacacatcaatctacaggggctgtctccagctttga

SEQ ID NO: 135069 - DNA, 1713 bp, Homo sapiens
atgtgcccaaagtctgtcaatatccatgagacacagagcgtgcccaaagcctgtgtcaatatccacgaggcactgagcgtgcctgaagtctgtgtcagtatccatgaggcacagagcatgcctgaagtctgtgtcactacccctgcgaccacagtagcgtggccgaagtctgtgtcaatatctagacaaggagagtcggagaagctcagggcccagaggaacctgaggaggcgacaggacgaaacggccagtgggaccctcgacgggatccctgggcaggatgagctgcggagcactggggcagtgaatgaagtgtgggccacgctcccggtaacgggtcagtgccggttcctgatccgtcacaagggcgccaaggagaggaagatgccacttttatcaactaaacgtggccagccacgtggacaccctgctctggtggtctacgcctgctgcgactgtgtcctcgtcacccgcaccaatcagagccttcactggccccgtcaatgccagcattacgaatatccaggacagacctcaagcaagccccgttctcccccaatacaggatgaaagtgatggacggctgtggggccacagtctgtccacccccgtcatgtgcggctctgtgctgaggaggctccgcaaagctgcccatcatgcccaccctcacaatgcccatggtgacaccgagtccagaaggttgcgattggagaaagaggctgaggatcccatgcgtctgacagcagcgctgctgtctcttgtttttcgtggtccatgtttgggggttacatctgggcctgtcccttctctgtgtagcctgaaggcagttcccaggcttgtgtccctcacctctccgcagacgccctttccagatcctgttcaaatcctggccctactcacgggaacttggcctggacttgccaccgattattctatcaatggcactgcactgggcaccaggatccaagcagtggactgcgggacaggacctgtccctgcactcttcaggcaaatctctggagcacccactgggtgccacacactgcggatgggacgcagggtaccgcacagccccggtcctcagggacccggcggggacagcactggtgaaaaaccacggaagtacattgatgtgtcacttcaacaggggcctacgcaggggcctgccctgtgccaggccctgtcgttgagagttaagaaagacgtggacaagggcacacggcactcagacatgttcctgctgaagccagaggacggaagagaagacaagtgggtttggactcggatgaacccttcgggggtcaagcccaccccacggtctggcttttccgtggccatggccccgaatcaccagacactgttcttcgggggtgtctgtgacgaggaagaggaggagagcctgtcgggcgagttcttcaacgatctgtacttctacgacgccaccaggaaccgttggtttgagggacagctgaagggtcctgccttgtccgtgtacctgatctctgccatcagccaccagtccagccaggctgttgatgcagccgattcctgccaagctgatcggcctcagggaggatcagagccacccgctctccgttatggagatcaggcagtgaaaggcctggcacggaggcactggaaaaggccggagcccttcgcagtggggctggaaagctctcctgcagcttcacagcctgtgggcctccgttcctga

SEQ ID NO: 135070 - DNA, 522 bp, Homo sapiens
ttgatcgcagatcactagtccagagcggaggaattccggccacgtttctgtgttgattggtgtgttggtgtaagagcacaggagaaaaatggtttgagtttttcccccaacagtaggaaatttacctttaatttaaatcagttcagtttttaatgtcagggcttttcccaatgttacggaccctgacagctgctgttcttctaaccagggattacatctactacaacgacgtgtatgcctttaatctggacaccttcacatggagcaagctgtccccgtcagggacggggcccacacccagatcaggctgccagatgtccgtcactccccagggcggcatcgtcgtctatgggggctactcgaaacagagagttaagaaagacgtggacaagggcacacggcactcagacatgttcctgctgaagccagaggacggaagagaagacaagtgggtttggactcggatgaacccttcgggggtcaagcccaccccacggtctggcttttccgtggccatggccc

SEQ ID NO: 135071 - DNA, 2094 bp, Homo sapiens
atggacgcacccctgccccggctgcgcacagcttctctgctgagcatgtttcacagcaccagctctcctggcatccactgggggaaagcgaagacatctgtgcacaggaaaacctggaccgagagttggcagcagctttttaaattcacgacatcccacgctggagacaccccagatgcccttcaagggacagatgagcattttggaaacgacgaaactgaaggaatggagaacagctcagaggctgccagggcagcggtttcctcatctgtaaagcaagtgggcccctggaatgctggctccatcaagaaaggcatctcggagcgccggaaacaattctgcggccagaaacaagtttgcagcgctgtgatctcagcgagtgtgaccccagtccgaggcccccgagcccgctgccgaagacggagctccaagaccgaacctcgtaaagggcccagccgcacctctacccggaagcggctcgaactcggggccggaagtgactccatttctgtgcgccgagctccgccccacgagcacctgtttccgagcggagagcgcgggccgttttctttcctggtgtcccgtcgcggcttgggacccggcaagatgggcaagaagggcaagaaggagaagaagggccgcggcgcggagaagacggccgccaagatggagaagaaggtgtctaagcgctcgcggaaggaggagcccggggtctgcaggaggatccgtcctgaccttggggttgagtgttctgcggctgctgctcatggattccctaaccggggccagttttatggcctgccgtgcgccaggcacagctccctgggctttactcctcacgagcagtcacccaatgatgatgaggttcagccaaggtcaaagaccgctctaagtagcagcagcaaagctttcgcggaagacctggaagcgctcatagcccatttccagacactcgatgccaagaggactcagactgtggaacttccgtgccccccaccctcaccaaggaagtgtagaggcagccagtttgtggtgacagaggattctgtgaggaaggggacagcgctcaggttaaatgcctccctctcggttcatcctgagaaagatgagttaatcctttttggaggtgaatatttcaacggccaaaaaacttttttgtataacgagctctatgtctacaataccagaaaggacacctggaccaaagttgacatccccagtccacctccgaggcgctgtgctcaccaggcggtggtagtgcctcaaggtggcggacagctgtgggtctttggaggggagtttgcctctcccaacggagagcagttctaccactacaaggatctctgggtcctgcatttggccaccaagacctgggaacaagtcaagtaagaagccagatgagaagctgagctccgggcatggctcttctgtgcttgtgtgctgagcccgagtgctcggagcagacctcagaataccagggttcagaggaacttgggtcacagtcctggagcccagcctcgctgggtcctgggagaccacattttctctggacccttcatacagaagcctgggccgggtgtggggggtgccagctgcctggtgttgttctccaggttcctcttgttgttggccaccagcctctcgctgcctgtgttgcagctcttctcctgtggacttctgtttacatcattggaggcagctctggtgcccagcttgttggaaggggggccccatagcgatgtgtcattgactaaaggcacgttctttctgtgtcgagttggtgtagaaaccgtggagcggccgatgtgggcaactgttgcaccctcggagcccagcgcgagggtgggggtctgtggggagtcagccgcagccaccagcattgctgaatgtgtcagaatggtggtgcctcctgcaaacaaccttagcctctgttctcctgtcaccagggtccgggagcgtggcccacacttcttcactgccccagtgctccgcagctcatcctgcccagggatcccgtcgaggtcccactggccgtttcgtcctgtcgcctcctcaggttcctctgggcctgagcttctccgactctccttgtct

SEQ ID NO: 135072 - DNA, 3103 bp, Homo sapiens
ggaattcgctccgccccacgagcacctgtttccgagcggagagcgcgggccgttttctttcctggtgtcccgtcgcggcttgggacccggcaagatgggcaagaagggcaagaaggagaagaagggcctaaaccctgcatagcacggccggcacaacggagaaaaaggtggctaagcgctcgcggaaggaggaggaaaacctggaagcgctcatagcccatttccagacactcgacgcccataggactcagactgtggaacttccgtgccccccaccctcaccaagggtaaaagcctccctctcggttcatcctgagaaagatgagttaatccttttcggaggcgaatatttcaacggccaaaaaaacttttttgtataacgagctctatgtctacaataccagaaaggacacctggaccaaagttgacatccccagtccacctccgaggcgctgtgctcaccaggcggtggtagtgcctcaaggtggcggacagctgtgggtctttggaggggagtttgcctctcccaacggagagcagttctaccactacaaggatctctgggtcctgcatttggccaccaagacctgggaacaagtcaaatcaacaggcggtccttcgggtcggagtggacatcggatggtggcctggaagagacaattgatcctgtttggtggcttccatgaaagtacacgggattacatctactacaacgacgtgtatgcctttaatctggacaccttcacatggagcaagctgtccccgtcagggacggtgcccacacccagatcaggctgccagatgtccgtcactccccagggcggcatcgtccgtctatgggggctactcgaaacagatgccaccgcattcggggcagagccggggccggaagccagggagctgcctgctgctgctgctgctgctgctgctgctgctgctgctgctgctgctgtgtgtcctccccttagggtactccctgattgagctgagtagctcctaccgtctgcatggcaacgaaccagtaccagccacatttcacgggctcaacagccacatgggactagtcgccaccatattggacaatgtaaatccagaacattccatcagtgcagaaagctttattgggcaggcagcactggtctggagtaccttagaattggacgtagttaaaggaaagtttttccgtgagaccctcatgtccacagtgcttcccaagcctgagtgttacaagaaccacctggaaggtagctggctggcttctgccaacctcagcctggtcgcagctggcacctcctcaccaggtactaaaccagggtgtgcagaggcccgctcgatccatggggcagatcagcaaatggtagtgcaggatgccccatcatatgtgaatatcagccgctccgggtcctctgggaagctctggcctcttcaccagtcctgcgttccgagctctttggttttacatcacagtggcgccgtgcggcggcaagtagtccgtgttcggatgtgcttcatgcaggcggtggtagtgcctcaaggtggcggacagctgtgggtctttggaggggagtttgcctctcccaacggagagcagttctaccactacaaggatctctgggtcctgcatttggccaccaagacctgggaacaagtcaagccgggaatgttaaccagtcaaatgaagagtctgctgtgggtggggagggtgcagacagattccctgccctgggcccacctgctggaggaggacatgaccatagccttacagtgggacccggaaggtgctgtggtgtggggctttgctggttctgtcactcggatcgtgggtatctgttccaagggaatagggatgcactgtgggtacctggtcactttgggagtggccctggcccctctcttgggccggcagctgcggatggcagcccctacctcgtgtgcagctccagctgcatcccacactgcaggctcggtcgtacgcgggacatccgtggcagctgccctgggtctggattgtctgataaacagacacctcattcctcgaatgcttgctaatgaaagaaaaaccgtctttttagcagacaccccaccgtccccggtccctgctgtctgtgtctgtggatctgcctcttctgggtatttcataaaagcggaatcaaaacacgtggcctctgtgacgggctcttctttccgcgtggtgctgtcaggacgtgtcctgctgttgcgagtatcagcacttcactcccgtggccagatgaggtgctgtgttgctgtgaaagttcacggacagtgcatacatctttgtatgcaccggagcacttgggagatgatcggtactgtttggttggatgaagatatagatgtgtgtagcagtctgtgttgtggggtgccgcacccgggggaggggggggggcgacgcccagagcgacgggaaggttttccgaaaacacgcgtcaaagaggtgaagaaacaaaacgccactacagttaaagtccagtcaggcatcagacataacctggcatcgtaccgtccactgcagggtgttgcccccaaacactgcaagatcaagcctggaaactgggcccggccctgcagccgagttccttcaccctcatatgaactccgtaatctgatcccgtcgttgcagacataccggggcagaacgtggctcatctccccattcccacaggaagctgaagccccctctgcaaactggcccctggctaaggaaacttgccgggccatgcccccgggggactgcaacaaagaggagctggtttgcggtgacagcgttttcccggagccgcactccggcagggatttatcacacgttcttgtcgaaggccaccaggtgaccagtggacatgcgtggttacgccgggccgagtggtcgctggttcctgtgagaagagggcagagcggtggtcagagcccacgggagcagcatctccacgtggcactgactggcttggagaccacgcactgccctcctcagcaaccaggccccaacttccccctgcagttcacttcctgctatgcccgcaggacagtcctgagccgacagaagagcctgcctggtgacaagattctcaacgcagccaccaattag

SEQ ID NO: 135073 - DNA, 3027 bp, Homo sapiens
agtccgaggcccccgagcccgctgccgaagacggagctccaagaccgaacctcgtaaagggcccagccgcacctctacccggaagcggctcgaactcggggccggaagtgactccatttctgtgcgccgagctccgccccacgagcacctgtttccgagcggagagcgcgggccgttttctttcctggtgtcccgtcgcggcttgggacccggcaagatgggcaagaagggcaagaaggagaagaagggccgcggcgcggagaagacggccgccaagatggagaagaaggtgtctaagcgctcgcggaaggaggagcccggggtctgcaggaggatccgtcctgaccttggggttgagtgttctgcggctgctgctcatggattccctaaccggggccagttttatggcctgccgtgcgccaggcacagctccctgggctttactcctcacgagcaggaagacctggaagcgctcatagcccatttccagacactcgatgccaagaggactcagactgtggaagttccgtgccccccaccctcaccaaggaagtgtagaggcagccagtttgtggtgacagaggattctgtgaggaaggggacagcgctcaggttaaatgcctccctctcggttcatcctgagaaagatgagttaatcctttttggaggtgaatatttcaacggccaaaaaacttttttgtataacgagctctatgtctacaatatcagaaaggacacctggaccaaagttgatatccccagtccacctccgaggcgctgtgctcaccaggcggtggtagtgcctcaagttggcggacagctgtgggtctttggaggggagtttggcctctcccaacggagagcagttctaccactacaaggatctctgggtcctgcatttggccaccaagacctgggaacaagtcaaccgggaatggtaaccagtcaaatgaagagtctgctgtgggtggggagggtgcaaacagattccctgccctgggcccaaccgctggaggaggacatgaccatagccttacagtgggacccggaaggtgctgtggtgtggggctttgctggttctgtcactcggatcgtgggtatctgttccaagggaatagggatgcactgtgggtacctggtcactttgggagtggccctggcccctctcttgggccggcagctgcggatggcagcccctacctcgtgtgcagctccagctgcatcccacactgcaggctcggtcgtacgcgggacatccgtggcagctgccctgggtctggattgtctgataaacagacacctcattcctcgaatgcttgctaatgaaaaaaaaaccgtctttttagcagacaccccaccgtccccggtccctgctgtctgtgtctgtggatctgcctcttctgggtatttcataaaagcggaatcaaaacacgtggcctctgtgacgggctcttctttccgcgtggtgctgtcaggacgtgtcctgctgttgcgagtatcagcacttcactcccgtggccagatgaggtgctgggattacatctactacaacgacgtgtatgcctttaatctggacaccttcacatggagcaagctgtccccgtcagggacggggcccacacccagatcaggctgccagatgtccgtcactccccagggcggcatcgtcgtctatgggggctactcgaaacagagacaaggagagtcggagaagctcagggcccagaggaacctgaggaggcgacaggacgaaacggccagtgggaccctcgacgggatccctgggcaggatgagctgcggagcactggggcagtgaatgaagtgtgggccacgctcccggtaacgggtcagtgccggttcctgatccgtcacaagggcgccaaggagaggaagagagttaagaaagacgtggacaagggcacacggcactcagacatgttcctgctgaagccagaggacggaagagaagacaagtgggtttggactcggatgaacccttcgggggtcaagcccaccccacggtctggcttttccgtggccatggccccgaatcaccagacactgttcttcgggggtgtctgtgacgaggaagaggaggagagcctgtcgggcgagttcttcaacgatctgtacttctacgacgccaccaggaaccgttggtttgagggacagctgaagggacccaagtctgaaaagaagaaacgcaggcggggcagaaaagaggagcccgaaggtgggtagcaggccggcgtgtgggggagctggcacccaggggcctgtgcagctggtcaaggaggtggtggccgaggatggcaccgtggtcaccattaagcaggtgctcaccgcgccaggctcggcggggcagccccggtctgaggacgaagacagccttgaggaggccggcagccccgcacctgggccgtgtccacgctccaacgccatgctggctgtgaagcatggggtgctctacgtctatgggggcatgtttgaggccggcgaccgccaggtcaccctcagcgacctgcactgcctggacctgcacaggatggaggcgtggaaggccttggtggagatggacccagctgcgctgacgtgtatgtgcgttcattctgcttttgaagaaactcaggagtggctggaggagacgggacctcggaagaggacagtgaggaggttgagggcgccgagtggtggggtcgacgacgaagacagcggagaggagagcggtgcggaggactgagaagagccccctgccagggggcgcctggcaagtgcttgtgcccacgtccgcccaggacccagcccgtgttgagtgaagctcttggggcccagcgtgcgtcctgaccgcacaggagagagctgaaggtgggtggcccaggcccagggtgtgaactttctcccatggtttagtctcttgacgcggcactgggccggaagttcaactgagtgcagtgcaggtggattccctcagcagcctgtgtgttgtgtgaaataaattggacttgaaacaagaaaaaaaaaaaaaa

SEQ ID NO: 135074 - DNA, 477 bp, Homo sapiens
gacgggtacagacatgagatgcttccagccagcctcatccaggctcagcgggattacttcggggctcacactatgaactctgggccaaaccagggcagtttatccacccaactggacaggccatggtggcaccgtgtcatcctcgtcatacaatgcctttgccctattttctgttcagttttttaaaagtgttgtaagagactcctgaggaagacacacagtttatttgtaaagtagctctgtgagagccaccatgccctctgcccttgcctcttgggactgaccaggagctgctcatgtgcgtgagagtgggaaccatctccttgcggcagtggcttccgcgtgccccgtgtgctggtgcggttcccatcacgcagacaggaagggtgtttgcgcactctgatcaactggaacctctgtatcatgcggctgaattccctttttcctttactcaataaaagctacatcagactgaaa

SEQ ID NO: 135075 - DNA, 443 bp, Homo sapiens
gggagccgctgcgggtctttccctcactcgtcctccgcgcgtcgccgctcttgggttctgctctgtccgccgccatggcccaagctgacatcgcgctgatcggattggccgtcatgggccagaacttaattctgaacatgaatgaccacggctttgtggtaagcggcgtgggcgcgttgtcttctctctggttcccgggcgctttagccgaggccggcgataggtttgggagcttacgggtctcctggccgtgctttgctaatgtgctctgttgctgctcgtggcatttttgtatggaaaggagaagcaccctgtaggcgtgggcgggccgatcccgaacttagtcctgcggagtgtgcctgtgggtccgtgaggttcacagcccgaatgaacgaattagtgtcttaagtagagaagaagggtgcgggaggagaacccttgct

SEQ ID NO: 135076 - DNA, 804 bp, Homo sapiens
gctgatcggattggccgtcatgggccagaacttaattctgaacatgaatgaccacggctttgtggactgtctccaaagttgatgatttcttggccaatgaggcaaagggaaccaaagtggtgggtgcccagtccctgaaagagatggtctccaagctgaagaagccccggcggatcatcctcctggtgaaggctgggcaagctgtggatgatttcatcgagaaattgagacggtgccgagacctcaaggccaagggaattttatttgtggggagcggagtcagtggtggagaggaaggggcccggtatggcccatcgctcatgccaggagggaacaaagaagcgtggccccacatcaagaccatcttccaaggcattgctgcaaaagtgggaactggagaaccctgctgtgactgggtgggagatgagggagcaggccacttcgtgaagatggtgcacaacgggatagagtatggggacatgcagctgatctgtgaggcataccacctgatgaaagacgtgctgggcatggcgcaggacgagatggccctttgccctattttctgttcagttttttaaaagtgttgtaagagactcctgaggaagacacacagtttatttgtaaagtagctctgtgagagccaccatgccctctgcccttgcctcttgggactgaccaggagctgctcatgtgcgtgagagtgggaaccatctccttgcggcagtggcttccgcgtgccccgtgtgctggtgcggttcccatcacgcagacaggaagggtgtttgcgcactctgatcaactgga

SEQ ID NO: 135077 - DNA, 2202 bp, Homo sapiens
atgcttacgccaatcttggcacgaggttctggagggagccgctgcgggtctttccctcactcgtcctccgcgcgtcgccgctcttcggttctgctctgtccgccgccatggcccaagctgacatcgcgctgatcgtttttgttcgtcatgggccacaacttaattctgaacatgaaggaccatggctttgaggtctgtgcttttaataggactgtctccaaagttgatgatttcttggccaatgaggcaaagggaaccaaagtggtgggtgcccagtccctgaaagagatggtctccaagctgaataagcccccgcgggatcaatacctcctctgtggaaggctgggcaagctgtggatgatttcatcgagaaattggtaccattgttggatactggtgacatcatcatttgacggaggaaattctgaatattaggggacaccacaagacggttgccgagacctcaaggccaagggaattttatttgaggggagcaggagtcagtgctggagaggaaggggacccggtatggcccaatcgctcatgccaggagggaacaaaggaagcgtggccccacatcaagaccatcttccaaggcattgcttgcaaaagtgggaactggagaaccctgctgttgactgggtgggagatgagggagcaggccacttcgtgaagatggtgcacaacgggatagagtatggggacatgcagctgatctgtgaggcataccacctgatgaaagacgtgctgggcatggcgcaggacgagatggcccaggcctttgaggattggaataagacagagctagactcattcctgattgaaatcacagccaatattctcaagttccaagataccgatggcaaacacctgctgccaaagattcaggggacaagcgcgggggcaagaaggggcaacaggggaagtgggaccggccattctccggccctgggaaatacggcgtacccgtacaccctcattaggagaagctgtcttttgctcggtgcttatcatctcttgaaggatgagagaatttcaagctagcaaaaagctgaagggtccccagaaagttccagtttgatggtgattaagaaatcatttcctgggaggacattcggaaggcactctacgcttccaagatcatctcttacgctcaaggctttatgctgctaaggcatgcagctcaccgagtttggctggactctcaattatgggtggcatcgccctgatgtggagagggggctgcatcattagaagtgtattcctaggaaagataaaggatgcatttgatcgaaacccgggaacttcagaacctcctactggaccgacttctttaaagttcagctgtttgaaaactgccagggactcctggcgtgcgggcagtcagcactggggtccagggctgggcatttcccatgcccctgttttaccgactgcccctctccatttagacggggacaagccatgagatgcttccagcccagccttcatccaggcttcagcggggattactttcgggggctcacaccctatgaaactcttgggccaaaccaggggcagttttattccacaccaattggacaggcccatggtggcaccgtgtcatcctcgtcataccaatgccttgatcatgctgctcctgtcaccctccacgattccacagtaccaggacattccattggcctcaatggcactgcccacctggccctttgccctattttctgttcagttttttttaaaagtgttgtaagagactcctgaggaagacacacagtttatttgtaaagtagctctgtgagagccaccaatgccctctgcccttgcctttttgggacttgaccaggagctgctcatgtgcgtgagagtgggaaccatcttccttgcggcagctggcttccgcggtgcccccgtgtgctggtgcggttcccatcacgcagacaggaagggttgtttgggcactcttgatcaactgggaacctcttacaacacttttaaaaaactgaacagaaaatagggcaaagggcgaggtggcagtgccatgaggcacatggaatgtcctggtctgtggaatcgtggagggtgacaggagcagcatgatcaggcattgtatgacgaggatgacacggtgccaccatggcctgtcccgttggtgtggataaactgccctggtttggccaagagttcataggtgtgagccccgaa

SEQ ID NO: 135078 - DNA, 888 bp, Homo sapiens
atggatcctgaacacgccaaacctgagtcatccgaggcaccttcagggaacttgaaacaaccggagactgccgcagccctggcaagtagcggcagcgtagtgagttctgtacccaaggcacagcgcaacatctcagcgaagaccgcaccccggaagcaccccgcagtctcaattcgcagtgcgcagtccgcagccgccgcacgtccccaaggcagtgagggcaccgcaccctcaaggaaagccaccacacgcccacccccaaagcccacactcccaccccccacgccctctgcacacactgaatccaaactcttaaatgagatggcgatcaaagagcgcgtggagggccgagccaaagtcccgtacaaattcagggacagcctcaaacgtttctccttctcgcccactggaatgttgaagatcctgagactggtgagcggagagctgatcttggccctgattgcattcatctgcatagagaccatcatggcatgctccccgtgtgaaggcctctacttttttgagtttgtgagctgcagtgcgtttgtggtgactggcgtcttgctgattatgttcagtctcaacctgcacatgaggatcccccagatcaactggaatctgacagatttggtcaacactggactcagcgctttccttttctttattgcttcaatcgtactggctgctttaaaccatagagccggagcagaaattgctgccgtgatatttggcttcttggcgactgcggcatatgcagtgaacacattcctggcagtgcagaaatggagagtcagcgtccgccagcagagcaccaatgactacatccgagcccgcacggagtccagggatgtggacagtcgccctgagatccagcgcctggacacgtga

SEQ ID NO: 135079 - DNA, 5130 bp, Homo sapiens; identical to SEQ ID NO: 116418

SEQ ID NO: 135080 - DNA, 2241 bp, Homo sapiens; identical to SEQ ID NO: 117145

SEQ ID NO: 135081 - DNA, 181 bp, Homo sapiens
atggaggagaaggaggagaggaaaaggagaaggaagaggaagaggaggagggaagagggaagagatggggaaagaaaaagaatggagaagcaaaaggagaaccaggatcctaaagatccacctacgacctcaggtcctcagaccgaccagcccaagaaacatctcaccaatttcaaatccg

SEQ ID NO: 135082 - DNA, 408 bp, Homo sapiens; identical to SEQ ID NO: 114500
  misc_feature (1)...(408): n = a,t,c or g

SEQ ID NO: 135083 - DNA, 667 bp, Homo sapiens; identical to SEQ ID NO: 117149
  misc_feature (1)...(667): n = a,t,c or g

SEQ ID NO: 135084 - DNA, 419 bp, Homo sapiens; identical to SEQ ID NO: 132733
  misc_feature (1)...(419): n = a,t,c or g

SEQ ID NO: 135085 - DNA, 443 bp, Homo sapiens; identical to SEQ ID NO: 113129
  misc_feature (1)...(443): n = a,t,c or g

SEQ ID NO: 135086 - DNA, 436 bp, Homo sapiens; identical to SEQ ID NO: 129176
  misc_feature (1)...(436): n = a,t,c or g

SEQ ID NO: 135087 - DNA, 717 bp, Homo sapiens
atgcccctccagccactagcgactccgtttacttcccctggaagcccatcagttgctcaagtgacaaccaacaccggagagccagggttcgcccaacaggagtacgcggagacaccccagacgacagcgcgtcccccccacccccaccccgccctccgggcgctccaggccagcgtccaccagaccccacgcctgggggactgcttgggctctagcgagagtgccacggctctgcacggcagcggggagccgaacaagttagccccgccggggcgccctacggaacgcggtgggcttttcaagtgctcagtccctctgcggacagtgcgaggctgccgggccgggctccgggggaccgagactgtaccttccagccttcagcgccagcccgcgggagacgtaggatggatcaacaacaaaagcaccacagccctagacagaacgccgactgacacccagcggaccaggcgaccccggccgccaaaacagaaacaaagaggcagagcgctcaaggagcggcccagagactccgacagcgcgcgcgaaggcccactgaaggcggtcgcgggcctgtttggtggtctcttcacacggacgtgcatgaaatttggtgccgtgactcggatcgggggacctcccttgggagatcaatcccctgtcctcctgttctttgctccacgagaaagatccacctacgacctcaggtcctcagactga

SEQ ID NO: 135088 - DNA, 908 bp, Homo sapiens
aaggcggaggtttcagtgaccgagatcgcaccatcgcactccagcctgggcaacaaatatggatgtggggaataggcaagcaggtaggtggatgtggctggctgcgtggaaagaacagggtggtgggggcagccaaggatcaatcaggcactggtgagaagttctacttcatcccgaaggcaatgggagccatggagggctctggacagaggagaacattgccagacccaggtgctcacaggaacccttctgggggctacagcgcaacagattgtgaagggagccggcctgcaccaggtgaaataaacagccatgcttctcacacaaagcctgtttggtggttcttcacacagacgcgcatgaaatttggtgccgtgactcggatcgggggcctcccttgggaggtcaatcccctgtcctcctgctctttgctccgtgagaagatccacctaccacctcaggtcctcagtccaaccagcccaggaaacacccaccaatttcaaatccggagcttgtacacgtgccggaaatctggccactgggccaaggaatgcccgctgcccggattcctcctaagccgcgtcccatctgtgtgggaccccactgaaaatcgactgttcaactcacctggcagccactcccagagcccctggaactctggccaaggctctctgactgactccttcccagatcttctcggcttagcggctgagactgacgctgcccgatcgcctcggaagccccgtagaccatcacggacccgagcttcgggtaactctcacagtggaagcggctgctgctgctttaatactttagaggccctcaaaatcacaaactttatcagtcctccaggcccaagttactctttagctgcagttgtcctccaaaaccaccgaggccttgactga

SEQ ID NO: 135089 - DNA, 1101 bp, Homo sapiens
atgggggctgtctgtgaagccttgcagcagtacagcccaggtaatttgctgagcctaactggtgtcaggggggcttccgaggcgatcaggcagtgtcagtcttcagccgctaagctgagaagatctgggaaggagtcagtcagagagccttgggccagagttccaggggctctgggagtggctgccagccttggctgtgatgagaggaaagagcatgagcacatgaatctggccatcagagcctgcctgcaaccaggtgaaataaacagccatgttgctcacacaaagcctgtttggtggtctcttcacatggacgtgcatgaaatttggtgctgtgactcggatcgggggacctcccttgggagatcaatcccctgtcctcctgttctttgctccgtgagaaagatccacctacgacctcaggtcctccgaccgaccagcccaagaaacatctcaccaatttcaaatccgggagagacaaaggagacacgttttatccgtggacccaaaactccggcgccggtcacggactgggaaggcagccttcccttggtgtttaatcattgcagggacgcctctctgattatacacccacgtttcaagggtgtcagaccacgcagggatgcctgccttggtccttcacccttagcggcaagtcccacttttctggggaaggggcaacggctgaagactgacactgcccgattgcctcggaagccccctagaccatcaaggacgctgagcttcagcacagctcccaggattctgtccatagtggtgccaggaagtgggcacactttggcctttctggatgtgacaagacaccgtctttaccgggaaagcaagccagttgtgggggaagaagttgactattcagaatggctatctgatgtgggtaaaagtgagtggtcattctccacttgtgcttcctctacctctgtcaacaagcatgacacggggaggaggctgttaggcaagaggggaggaggaatggaatgcagcaagggcctctgcaattttataactatgacaaagaatatacgctctcttgctcaaatgaccatttggcagtatctctcaccttgccgagagccagtatag

SEQ ID NO: 135090 - DNA, 438 bp, Homo sapiens
atgaaacccagctgtctgaatttagttcttattccaccaattcatagttgtgtgactttggccccacccttatctcccttcactgactcttttcggactcagcccacctgcacgcaggtgattaaaagctttattgctcacacaaagcctgtttggtggtctcttcacacggacgcgcataaaatttggtgccgtgactcggatcgggggacctcccttgggagatcaatcccctgtcctcctgctctttgctccgtgagaaagatccacctacgacctcaggtcctcggaccgatcagctcaagaaacatctcaccaatttcaaatccgagacaaaagggacatgttttatccatgaacccaaaactccggcaccggtcacggactgggaaggcagccttcccttggtgtttaatcattgcagggacgcctctctga

SEQ ID NO: 135091 - DNA, 483 bp, Homo sapiens
atggcagaggcaatggcaaaattgggatctgagagaaaaaaagagcagggattaattcaggaactgaaacaaaatcagtctctggaactctggtatgagaacaggaaaggcaaaatcaagactggagaatcaggtgatggagagcctgacgcgagtgaaatttggtgccatgactcagatcgggggacctcccttgggagatcaatcccctgtcctcctgctctttgctccatgagaaagatccacctacaacctcaggtcctcagaccgaccagcccaagaaacatctcaccaatttcaaatccgagacaaaggagacacattttatccatggacccaaaactccggcgccggtcatggacttgggtaggcagccttcccttggtgtttaatcattgcagggacgcctctctgattattcacccaggtttcagaggtgtcagaccacgcagggacgtctgccttggtccttcacccttagcg

SEQ ID NO: 135092 - DNA, 915 bp, Homo sapiens; identical to SEQ ID NO: 133946

SEQ ID NO: 135093 - DNA, 1596 bp, Homo sapiens
atgaataatgatccttacattcctgcatctgcttttggggctcgccctgttaaaaccacagaagctcccccactgagcaccttgagacccctgcccctgcccaccaaagaacaaccccctttgactgtaattttccattaccttcccaaatcctataaaacggccccacccctatctccctttgctgactctcttttcggactcagcccgcctgcacccaatgaaataaacagccatgttgctcacacaaagcctgtttggtggtctcttcacacggacgcgtatgaaatttggtgccgtgactcggatcgggggacctcccttgggagatcaatcccctgtcctcctgttctttgctccgtgagaaagatccacctacgacctcaggtcctcagacccaccagcccaaggaacatctcaccaattttaaatcagacaaaggagacatgttttatccgtggacccaaaactccagtgccggtcacggactgggaaggcagccttcccttggtgtttaataactgcagggacacctctctgattatacacccacgtttcaagggtgtcagaccacgcagggatgcctgccttggtccttcacccttagcggcaagtcccgcttttctggggaaggggcaagctgctcctcgccaggccgagctaggtcccaattcttcctcagcctctgctcctccaccctataatctttttatcacctcccctcctcacacctggtccggcttacagtttcgttctgtgactagccctcccccacctgcccagcaatttactcttaaaaaggtggctggagccaaaggcatagtcaagaccatcacagacgccgagcttcgggtaactctcacagtggaaggccgagacagtttaactaaattatctgcttccctgacgattcctggactacagccacatctcattgccgtccttctccccaacccaaagcctccttcgcgtcttcctctcatatccccctaccttaacccacaagtatgggacatctctactccttccctggcaactgatcacatgcccattaccatcccattaaaacctaatcacccttaccccactcaacgccaatatccaatccctcagcacgctttaaaaggattaaagcctgttatcactcgcctgctacagcatgggcttctaaaacctataaactctccttaccattcccccattttacctgtcctaaaaccagacaaggcttacaagttagttcagaatctgcgccttatcaaccaaattgttttgcctatccaccccatggtgccaaacccatatactctcctatcctcaatacctccctccacaacccattattctgttctggatctcaaacatgctttctttactattcctttgcacccttcatcccagcctctcttcgctttcacttggactgaccctgacacccatcaggctcagcaaattacctgggctgtactgccacaagccttcacagatagcccccattacttcagtcaagcccaaatttcatcctcatctgttacctatctcggcataattctcataaaaacacacgtgctctccctgctgttcgtgtttgactaa

SEQ ID NO: 135094 - DNA, 2206 bp, Homo sapiens; identical to SEQ ID NO: 129196

SEQ ID NO: 135095 - DNA, 831 bp, Homo sapiens
atgacgattaaggcatgtgctgaaagcactgatggaggacctgcacgaaggcaccttacacatgagttccgcttccgctctcttcccacaataaaaaaaaccaatgcttctgagtacctgggttgcccagcgctttatgtgaagacgacaaccagacaagccagacgacaagccagacgactcgggcaaagacccaaaccagacttccccaaattcctaagcctcctgggcacagagatcattgagatgcagtcgagttcatcctccgctccatgtccaggagcacgatttatggaatttgatgatatgaaggaaaacattcatcaaagtgacatcctcagatacctgtccctggacattagagaaagtgaaatatccaaaactggtgaagttacaaattccttcagaaattcaaaaacatcaaaagccaaagttgccattgtagggttcagccacagacctcaggacaacttcatttgtgagcagaagtcctggagttctttgggcatcgagtgggcccgacatgcaaggaagaggcctgtttggtggtctcttcacacggacgcgcatgaaatttggtgcatgactcggatcgggggacctcccttaggagatcaatcccctgtcctccgctctttgctccgtgagaaagatccacctaccatctcaggtcctcagacaaccagcccaagaaacatctcaccaatttcaaatccgattgcaatccgatataagttccggttcggcttaaatcgctatgaggaggtctctagggactatcggtgtgctgtcagaaccgtgcagaccatccagatatatagtggatcgtag

SEQ ID NO: 135096 - DNA, 534 bp, Homo sapiens
agaatggctgtcttagtacttcgcctgacagttgtcctgggactgcttgtcttattcctgaccctgctatgcagacgacaaaccagacaagccagacgacaagccagacgactcgggcaaagacccaaagccagacttccccaaattcctaagcctcctgggcacagagatcattgagaatgcagtcgagttcatcctccgctccatgtccaaggagcacaggatttatggaatttgatgataatgaaggaaaacattcatcaaagtgacatcctcaggacacacccatgtggctcctggacaatccaagagcagccaaatcctgcttttccagtttggctccacaagtcctccaggacagagccctcaaagcaactcccaacgagttctcaggattcaggctctggcttcaaccaaacagaactcattttgaacaccctgactgcatttttgcttttagaaagttagaataaatatggcgctttgggatcacatagttgatggagaggaaaaaaaaaaaaaaaaaaaaaaaaa

SEQ ID NO: 135097 - DNA, 1191 bp, Homo sapiens
  misc_feature (1)...(1191): n = a,t,c or g
atggaaagaataggaagaaaaggaggaagaggaaaagatggaggagaaggaggagaggaaaaggagaaggaagaggaagaggaggagggaagagggaagagatggggaaagaaaaagaatggagaagcaaaaggagaaccaggatcctactcagcccacctgcacccaggtgaaataaacagccatgttgctcacacaaagcctgtttggtggtctcttcacacggacgcgcatgaaatttggtgccatgactcctatcgggggacctcccttgggagatcaatcccctgtccttctgctctttgctccttgagaaagatccacctacgacctcaggtcctcagaccgaccagcccaagaaacatctcaccaatttcaaatccggctgctcctcgccagaccgagctaggtcccaattcttcctcagcctccgctcctccaccctataatccttttatcgcctcccctcctcacacctggtccggcttacagtttccttccatgactagccctccccctcctgcccagcaatttactcttaaaaaggtggctggagctaaaggcacagtcaagaccatcacggacatcgagcttcaggtaactctcacagtggaagcccgcctgcgcccaggtgaaataaacagctttactgctctcacacaaagcctgtttggtggtctcttcacacggacgcgcatgaaatttggtgctgtgactcggattggggggacctcccattgggagaatcaatcccctgtcctcctgctctttgctccgtgagaaagatccacctatgacctcaggtcctcagaccaaccagcccaagaaacatctcatcaatttcaaatccggaccccactggaaatcggactgttcaactcacctggcagccactcccagagcccctggaactctggcccaaggctctctgactgactccttcccagatttactcggcttagcggctgaagaccgatgctgcccgatcgcctcggttgaagccccctagaccatcacggatgccgagcttcgggtaactctcacagtggaagaggccaggctaacagggactgctgatggggaaataagaattatcaaggatgaatcctatatctgggggcttgagcaaatacgttcaagtcctgacactggtacctgtgaatgtgatcttatctggnaagagagactttt

SEQ ID NO: 135098 - DNA, 685 bp, Homo sapiens
tggcctgacattcctgccttcttccactgtgagagttacccgaagctcggcgtgcgtgatggtctagggggcttccgaggcaatcaggcagtgtgagtcttcagccgctaagccgagaagatctgggaaggagtcagtcagagaaccttgggccagagttccaggggctctgggagtggcttgcccaaggtgagttgaacaagtccgaattttcaagtggggtcccacacagatgggacgcggcttaggaggaatcccgggctgcgggcgttccttggcccagtggccagatttccagcaagtgtagcaagctccggatttgaaattggtgagaatgtttcttgggctggtcggtctgaggacccgatgtcgtaggtggatctttctcacggagcaaagagcaggaggacgagggattgatctcccaagggaggtcccccgatccgagtcacggcaccaaatttcatgcgcgtccgtgtgaagagaccaccaaacaggctttgtgtgagcaataaagctgtttatttcacctgggagcaggtgggctgagtcccagctcccttcagtcagtggccgagagatgttcagggacagctgtggctgggacctgatgatccaccagccctggggcaaggcacagtcaggcacattgattccaggctttggtaactgggggatgttggtg

SEQ ID NO: 135099 - DNA, 718 bp, Homo sapiens
ggcgaagccagctgctggaggtgccgagaatctgagtttcggcaagcagccagaatattttaaaaatgactacaccaaacaagacacctcctggtgctgaccccaagcagttggaaaggactggaacagtacgggaaattgggtcacaagctgtttggtcactctcatcttgcaaaccaggatttggagtggatcagttacgagatgacaatctagaaacttattggcaatcagatggttcccagcctcatttagtgaacatccaattcagcaacttgagttggtggaaccaagtggcttggattcatgttcccttaacttgacaatcataaggaggccacttcgtacattcatgatacagattgctgttctagccaatcaccagaatggaagagacacccatatgagacaaattaaaatatacacaccagtagaagagagctccattggtaaatttcctagatgtacaactatagatttcatgatgtatcgttcaataaggtgcctttaaaatgagacgaaaatcattaaacgtatctttgttttatcctgtatttaaataatatatcatgtacctttattgaacaaggcatccgttatatctaattttgtatatgtttaaaaatattttattgtaactttgacaaataaatttggggtcatattatctttattttctttaacatgtaataaagctcacatattttacattactaaa

SEQ ID NO: 135100 - DNA, 896 bp, Homo sapiens
atgacgtcattgagctgcgacccttgttcaacgccgttggcgaagccagctgctggaggtgccgagaatctgagtttcggcaagcagccaggtctggaaactaatattttaaaaatgactacaccaaacaagacacctcctggtgctgaccccaagcagttggaaaggactggaacagtacgggaaattgggtcacaagctgtttggtcactctcatcttgcaataccatgattcgtagtggaacacactagaatgaacaatctagaaacttattggcaatcagatggttcccagcctcatttagtgaacatccaattcagaagaaaaacaatgagtgaagacattatttttttatgcatactacacattttgatgaaagtctatctctcttcaagatctcagtcagagtaggaaataattttcacaaccttcaagaaattcggcaacttgagttgggtggaaccaagtggctggattcatgttcccttaactgacaatcataagaagccaactcgtacattcatgatacagattgctgttctagccaatcaccagaatggaagagacacccatatgagacaaattaaaatatacacaccagtagaagagagctccattggtaaatttccctagatgtacaactatagatttcatgatgtatcgttcaataaaggtgactttaaaatgagacgaaaatcattaaacgtatctttgttttatcctgtatttaaataatatatcatgtacctttattgaacaaggcatccgttatatctaattttgtatatgtttaaaaatattttattgtaactttgacaaataaatttggggtcatattatctttattttcttcaacatgtaataaagctcacatattttacattactaaaaaaaa

SEQ ID NO: 135101 - DNA, 484 bp, Homo sapiens
atgcagatggaactagctggaacttgtagagaccaagtccgaatcaggtgcctgggaatgcagattgttaaactggcagagaagaagcggatagtattgaaggagtcaatatttgctgtgctcacaagcgtcttgacaaaggatgactggtggaatcttctgttgaaggccatatactccttatgtgacctatcccgatttcaagaggctgagttgcttgtagattcctcattggaatattactcattttatgatgacaggcaaaaacgcaaagaactagaatactttggtctgtctgctgcattctggacaaaaattcagaaaggcatacaactatatcagtttctctctcggtttgaaactgctttcttagagcttctatgcgttcagatgcaattctgcttccactttggactcttcagtcatccggtctctgttttgaagaagagaggtgataagtcacctttagaaatcattttaggag

SEQ ID NO: 135102 - DNA, 3547 bp, Homo sapiens
tttcgtctggaaggcgctgctcttccggttctctgtcccggttcctggggttgcacagacagaccctgtaaacatgtcagggttcagtccggaactcatcgactacttggaagggaaaatctcctttgaggagttcgaacggcggagagaagagagaaaaacccgcgagaagaaaagtcttcaggaaaaaggcaagttatcagctgaagaaaatcccgatgactctgaagttccatcatcatcaggaattaactctaccaaatcccaagacaaagatgtcaatgaaggagaaacatcagatggagtgaggaagtcagttcacaaggtctttgcttccatgcttggagagaatgaagatgatgaggaggaagaggaagaagaggaggaggtggaggaggaggaagaaacacctgagcaacccactgcgggcgatgtatttgtattggagatggttctcaatcgtgaaaccaagaaaatgatgaaagagaaaaggcctcggagtaaacttcccagagctctgagaggtctcatgggtgaagccaacattcgttttgctcgaggagaacgtgaagaggcgatattgatgtgcatggaaatcataagacaagctcctctggcttatgagccattctctactctagccatgatatatgaggaccaaggtgacatggaaaaatcattgcagtttgagttgattgctgcgcatttaaatcccagtgacacagaagaatgggttagactggcagaaatgtctctggaacaagacaatattaagcaggctattttttgctatacaaaagctcttaaatatgaacctactaatgtccgttatctgtgggagcgatcaagcctttatgaacagatgggtgatcataaaatggccatggatggttataggcgtattttaaaccttttgtctccatctgatggcgaacgttttatgcagctggctagagatatggcaaagagttactatgaagccaatgatgttacttctgctattaacataattgatgaagctttctcaaagcaccagggcctagtctccatggaagatgttaacatagcagctgaactatatatttctaacaaacagtatgacaaagctttggagataattacagatttttctggaattgtgctggaaaaaaaaacttcagaagaaggcacctcagaagagaataaagctcctgagaatgttacctgcactatacctgatggcgtgccaatagatatcacagtgaagttgatggtctgccttgtacatctcaacattcttgaaccacttaatcctctcttgacaacactagtagaacagaatcctgaagatatgggagacctatacctagatgttgctgaagcttttctggatgttggtgaatataattctgcacttcccctcctcagtgctcttgtttgctctgaaagatacaaccttgcagtagtttggcttcgtcatgcagaatgtttaaaggccttaggctatatggagcgagctgctgaaagctatggcaaggtggttgatctggccccactccatttggatgcaaggatttcactttctacccttcagcagcagctgggccagcctgagaaagctctggaagctctggaaccaatgtatgatccagatactttagcacaggatgcaaatgctgcacagcgggaactggaagttattgcttcatcgttctactctgttgttttcacaagggcaaaatgtatgggttatgtgggatacctttacttactatgttaggccatggcttttttaaagggtaggcaatggaatcgaggcccaagtttgtttgatatccagttccaggtctgggagagaggcatctttatcttattaaagtatcgagagacaaaatatcagacagcaatgaccaagagtcagcaaattgtgactgcaaaagcgatattttgctgtgctcacaagcgtcttgacaaaggatgactggtggaatcttctgttgaaggccatatactccttatgtgacctatcccgatttcaagaggctgagttgcttgtagattcctcattggaatattactcattttatgatgacaggcaaaaacgcaaagaactagaatactttggtctgtctgctgcaattctggacaaaaatttcagaaaggcatacaactatatcaggataatggtaatggaaaatgtcaataaaccccagctctggaacattttcaatcaagttaccatgcactcccaagatgtacgacatcatcgcttctgtctccgtttgatgctgaaaaacccagaaaatcatgccctatgtgtcttaaatggacacaatgcatttgtatctggtagttttaagcatgcgcttggacagtatgtgcaagcctttcgcactcaccctgacgaacctctctatagcttctgtataggcctaacctttattcatatggcatctcagaagtatgtgttacggagacatgctcttattgtacagggcttttcctttcttaatcgatacctcagttttacgtgggccctgccaggaatcattctacaatttggggccgtggccttcatcagttgggggctgattcatcttgcaattccacttattatccaggaagggcccggggagctccctccacttgtggttaggaggggtattaggaacttggaccagttagacttacggaggagtttattgcctacaacttgttctctcatctattcagagcagtggggaattaccggaatgggctcaaacgcttttgtatacctattggttctatattaaagcacccgcaactgagaacagagcaatggcagctgccgtgtgaggacccagtgtcctcctgtcctcagggcttaattaatttgtaactcccaaaatagaaatgacaatttcagaattacctaacaaacagtgtatttatttttaatatgtgataatgatcttgtggtatatatgcaaaattattcctacaaaaatttgtatattggtctgtcattttcctttcacattctatagtgaattgttcccaatgttgaaatggacgtgtaagcctttgagctagcttggagtcgaatacactatttttcactcacaccatttattcatctttgtatttaatacctatagctctgtcaatatcacatgaggcagtttttcaaatacgtataaacagaggttgcttattattaaaggaaagacaaagtgggactctttatgatgtcatgacccatgataactaagcacctaagaaaattatttaaactagttatcgtggtaggcagaaagacaaataatttagttttttacttttcaccagcatgtatcttagctaccttaaactgaaacatgggaggctgggcttaattcaaaatatattgctccaaggcaaataaaaaaatgctttatctatatttgtggctttctgatgaaaaaatagagaagagcttgttcaataacaggacatggtttccatttcaagatcacaagtaatataagactgggcaagtagtacgtatggaataaaggacatactgctgattgataaagtaaaaaaa

SEQ ID NO: 135103 - DNA, 4350 bp, Homo sapiens
tcctctacgcccccgagcatgcccgggtctcattcgatgtgtgcggctccgcgaacgaaactacccgacctttttgacctttccgttgccccctcgtcctccgacgccaatcttccggatatggtggctggggtggcctctacaccttgaatgtacccccatgacagtaacaaggcctgggtccccatgaggggccgacgacctacagaccttgcacgcgttctacggggccgttcgggaccgcgagatggaggatgatagtttagttcccccagccgggcctgggagccggcggaacgatatgggagctgtattatccagcgatactgtgagaaaagattcgtgtctaaatacctggcaacaattggtattgactatggagtcacaaaggtacacgtccgagactgagaaatcaaagttaacatctttgatatggctggacatcccttcttctatgaggttcgaaatgagttttacaaggacacacagggtgtgattactggtctatgatgttgggcagaaagactcctttgacgcccttgatgcgtggctggcagaaatgaagcaagagcttgggacctcatgggaaacatgggaaaatattatatttgtagtttgtgccaacaagattgattgtaccaaacatcgctgtgtaggatggaaagtggaaggacgtctttggggctggaagcaaaagggttcctgttacttttgaaactttcaggcacaaactgggaggagggctttattgaggtgtttccagaccttttatatatccatagttgatttatgtgaaaatggcgggaaacgccctaccaccaatagcagtgctagtttcaccaaagaacaagcagatgccattcgcagaattcgaaatagtaaagacagttgggacatgctgggagtcaaacctggggcctcaagggatgaagtcaataaagcgtatcggaaacttgctgtgcttcttcaccctgacaaatgtgtagcacctggcagtgaagatgccttcaaagcagttgtgaatgctcggacagccctcctgaaaaacatcaagtagaaagtacagaaaaaagccacatgtgggactcaaatgcaaacagactttccctagaggtgaaataaccaacggggaggttttcttcccaaaaatctcactgctcttttcattcatgtgttggcatttgtatatcagtaattcaggtacccatttcatagacattttactgagaaatgacctgcatttgtatgaagtgaactgagcgtcacaccctgtacttcatttcatatttctagataattctgaatttttttctcattcgtcagctctgtaattatagtatcacttagacatttcacttggggaaatccacaaggttcctggagggagggaagagaggacaaaaggaccctttcactttttcttttttacggaattcatcatcagagaagaaaataacaaaaatggaagcaaacaacatcagaacccctgtaagtttggtgtgaccttacagacaagttgctgcttttacaatgagttccttaggtggtattttaacccatcgatctaataatgatgaactcctgggccaacccctttgggaagttttgtaaaaaatgaaggtgaataacagttcctgaaattgagcaatccccttttatgaatattcactctgttccctcttctgcagcccacccagtgggagagacaagcccagtccctaagagaaaaggtggtggcagccacaaattctaggtacactggctgctgccctatcctgtcccctggatctgaggcctttcccttgccatagaaatggttgctggtagcagtagagagcactgtgcacctgggaatgaggaatcaggccccaagacagaagtacttggaggagccagctgcagtagtatccgcctgtagtcccagctactcaggaggctgagacaggaggattgcttaagcccaggagctcaagtcccacctgggcaacatagtaagatcttgtctcttaaagaaaaaaaaaaaaggtacttagaggtcgcacttaaagattatgcacatcagcagaggaaaggccagccaagcttggggcaagcttgatgcagtaggagagactccttatgaggcttagcccttgtcttactgccagcctttgccacaggcaggtgagaaaggcagggccactcctcagcaaagttggcctcttctacacttcctcaccagtgttgtttcttccttttttcccctcttccccttcccgtcttgtgttttttctgaaccccacatctgccatcatttctctcctctagagtccctggcttctggccactgcctcctccctcttctaagccttggcctgaatctggttgatcagaggcaagtgtggatcctttgggtggcagtcaggggagatctcagggcctctgttgggaggaatctctgtaattcctgcttgggctccaaatttctgaagagtaatatttttaaactatagcttacaaaatacattctctgaccacagtctcctccttgatatacaagggatggatgaagttcatgtattaggactggcactccttacggtgcttatagaactagtctcaccacttgactcattacgtcgtcattcttgttacatcactcatacttttagctgcaaccacactaattcacatttttatatactttcaattagctgtactaattggggcttgaaagtatataaaatcttcctgtcctgtgaattttaaaaagctatcccatatcgattgccaaagagcatctaccttacctcctaagaagaaaagccactttcttccaatccaagcccactgcagccttgtggattttccacacagcagcttttcactgtatgcctgtacttgggctgcactgagcttgtcttcaggaaaccagagcgttgctttatcatcgcacttttcatcttggtaatatcaaaacaactttttaaatgaactgattgatatatgttatttcttgcgaggttttcctctggcctttaactggcttctgaggctacagaactccaacccagagttcttcgggacctaaattttgcttaaggaaggcctttatcatgctgaaagcactcagacatgtctgtcctcacagcagaatgtagaagtcatatgaatgagggatcgtgcacggtagcgtcagcccgaattgacacgacaactctgaatgtgtggcccactatgaaagctggtgccagttttcatcactgttattaaatactagattgggaacctcattcagccgtattgcacagatgagcaattacagcagagaaaattcattagtgctcccactcatatccttatgtgtgagttggtgaaatttagcctgagcttgattcttaggtcttgagactcagtttccaacaccttcattattaatgttaagaatggccatataccacttcatttacgtaaaaggaataaaataagcaagttaagcttcagggtcctagaatttttctgatttctataatccttcagcagaatattaagaaataaagcatgatctgcaatggaaaggtttttttggcactaacttcatgcagaatttcacagacatctatgcattaatttaaattcttggtgcaaatgtgtgctttgtagttcaaccttattaaaaattcttcagccagttaggatttcaaaatacattagtgagagtaacagctagcagaataattacaatggctaaaacgtttttatagagaatcttgtttttcaaaaaagaataaaaagtttgaatagctattattaaagaaaagccatgtcttcaacatctgagtcaccaagaagtaacactttttaaacttgttagaaatccctggaggcatttccaaattccatcttctaacctaccttaggcacttttaaaatacagcctccttcgggtccctctggttcccccttcaggcctccttttggaaatggatatctcagctgtccaatatttctttggacttccagccattgttattttatttctctatatcaatgtgtccttagttttcttagcctgttaatttaaaaatcccagacttgggggtcattgtgttgcttacccaagagaaaaatgttacagttttatagattgcacatcattctttaaggcatacttttacctcaggaaacttactctagtatgttctcatatattgaattctcaactaagtaactatttctttatacctataaactagtacctaattcactgttagttaaatgagctatagataaggcagctaaattttctgaaagatagccagagtaagtaagcagccactgcaagctctgaatcagttttttaaaaaaaag

SEQ ID NO: 135104 - DNA, 807 bp, Homo sapiens; identical to SEQ ID NO: 126247

SEQ ID NO: 135105 - DNA, 1803 bp, Homo sapiens
  misc_feature (1)...(1803): n = a,t,c or g
tttttttttttttttttttaatggtagttcttagttttattataaccttgtattttctggcaaaaatataaatctaaaatgcatgatctctgggcacacagctcaagtaacacccttgatgatgacctaagcagcataaatttggccgatttatttaaatgcacaggaggttgcagccgcatttattaaaaaaatattatcctttggaaattcctttcttgaagattggctcccagggcggttggtctttctgtttttactgcaattgcacttcctttggcagggcagccaggcgctccgggtgctcacaggccatgggacaagtccaagttcccttcaagaaccaagcggggcaatgggcggacaagagccgcacccgttgaaagcccgcctgttaatttccaatcgggtgggtcctggaagacgacacgggctgggggaaatggggtcaccgggaaactccacggcgggccaaacgcccaatccaaattttgccctgcgggaaactcgctcttcaaccttttcttccacaaacttctttctggaagcgttgggatttaagcgtcttccgcccagctcccaaggtgctgtccccggacctgcagggtagctgagcgggttggagatgtcattctccgacaaagggtgacaccccggcgatgtagtcaggggcgaacacgttggttttcctgccctggcccttttgggaagagtccgccagctgagggaagcgctgatcctcggtgagatgggggttgatggcgtatttgccccctttgggagtgggaagcgagtaccggaggccgcgggggttcagcaccttggggttgcgggagaagtgcatgtgcagggtgccgtcgtcgctgacggtcacggacactttcttcagggtcttgttcccacagtgtgagcagaacactcgggttcatgtcaagacgttgtcttgaaacagccatggcagcgcaaagatgtagctcccgggcctcacgaatcagcatgccgttcaccgccagcacgtgcagccccatctgcagcagaacattcgtgcatggcgaagtctggtggtcaggcaagccaaacccgcacgtcctcggggacgtcaaaactgctcaagctcctgctggatctgcttgatgttactgggggttcatccagccacccccgtcgtcatcgctgtcatcttttctgtcttcaaacccgttttcttcctcctcctcctcctcacttggaacgtcctcacctctgtcaatcagcagctcctgcagttcatgatcggatgttgggcaaagggtttctccagaacatgaaggaactaaattccaggttctcaggctcacaagctgagtgtcctttttctgtttcttgtgggggttttaggcttgtagggcaagattggaaaccaagaaatgtgcagagggtgtttctggggtgctgaatcgatgagctcacctttaacctttcttgtggttcttgttttaggtgagaacacccccaacaaactctgctttccaactggtatgtggagtgcaagcacttggatgtccgtggcagagaggctggggtagtctcctgttttctttgaaaactcagtcaccaaccggcacgtattccgggtaagggctccttgaaccgcaggntcgtaggggcaggacagcgagccgcctgcgtgtggccttgtcccgaatctcaggtgacccacctcccggatggtgtaaatgttcttcccgatgtcctgcagagccgcatgccgcaggaaagccccagcatccgccacaacgtgctccactggagccatgttggctg

SEQ ID NO: 135106 - DNA, 381 bp, Homo sapiens
cctttttttcttttttgatggtgttccctgagcggttgctgcgggtgatggatactcttctgatactggctcttcgtgctataatttcttttctcaccaagagcaggtgccctttcagaagggaaaacgccaacgccgacgccttctccaacaaaagatggcctcggactcaagagtgcggctccagggcaatgcagccccaacctaaagatttagaggcctcccgtttcgctggcccccagagccgcccaccgcgactgcacttccccaccgataaaaggtggtttccagggtacctccctcagatggcggcggcggctcccgacggcttcctaaccagaatccctcgcgggcggcggctctcgccagcgcggcacgaaa

SEQ ID NO: 135107 - DNA, 3147 bp, Homo sapiens
atggcaaagatcagtgccagtagagcagagaaagttttggagcatccaggagagagagagaagggcagagagatggcatctccctggaatcattccatccttgccctggcagctgtggtggtcattataagcatggtcctcctgggaagaagcatccaggcaagcagaaaagaaaagatgcagccaccagaaaaagaaactccagaagtcctgcatttggatgaggccaaggatcacaacagcctaaacaacctaagagaaactttgctctcagaaaagccaaacttggcccaggtggaacttgagttaaaagagagagatgtgctgtcagttttccttccggatgtaccagaaactgagagctacatctccgtcgtgaacatggccctgccaccattcttcggccagggtcgcccaggcccaccgcccccgcagccgccgcctcttgctcttttcggctgtccgccaccgccgctgccctccccggctttcccgccgcctctcccccagcggcccggcccttttccgggggcctccgcccccttccttcagcctccgctggctctgcagccccgagcctccgcgcaggcctcccgcggcggaggcggcgctggcgccttctacccggtgccaccaccgccgctgcctcctccgccgccccagtgtcggcccttcccggggaccgacgccggcgagcggccgcggccaccgcctcccggcccggggccgccctggagcccgcggtggcctgaggcgccgccgccgccggccgacgtgctcggggatgcggccctccaacgcctgcgcgaccggcagtggctggaggcggtgttcgggaccccgcggcgggcaggctgtccggtgccccagcgcacgcatgccgggcccagccttggcgaagtgcgcgcgcgattgctccgggctctgcgcctggtgcggcggctgcgcggcctgagccaggccctgcgcgaggccgaagccgacggcgcggcctgggtcctgctgtactcccagaccgcgccgctgcgcgcggaactggccgagcggctacagccgttgacccaggctgcctatgtgggcgaggcgcggaggaggctggagagggtccggcgccgccggctgcggcttcgcgagagggcccgggaacgcgaggccgagcgggaggcagaggccgcgcgggcagtggaacgcgagcaggagattgaccgctggagggtgaagtgtgtgcaggaggtggaggagaagaagcggtttttctgtgagattctcacagatgaattggtgctgtgggaaccatctggcagaccccagccacaacagctgcaaatccttacagccatgtctaccagcactttctatgacaaggagctgaagacggcaagggaaaacaaagaagaagagttaatcgacaaactggaggtggtcacaatgccttccccatcaccaaaaggactgccagtgaagcaatatgctgtgcagtctcagcttcccgtatatgagtggccggatgtgggatctggagaatatgatgttggagtagtggcttcgtttggccgacttttgaatgaggctcttattcttaaatttccctactccgcacttggcggctcaggctccccggcgccactcaccagacttgccagccccgcggcgccccaggatggccaggttgacctcgaggggcgcgctctgaggcccgctgcccgcgcggggttttccaaacaccgaggacatggcgacgccctggacggccacgcaggtctgcggccggaactccatgctccactgactgttgttgcagatgggcttttctccaagttcaggaaaagcctggtctccaataaagtttctgtatcatctcattttgtcggctttcttatgaagcacgacttcagcctggagaggacggcactcttctgggtggaggccgccggccagggacccagcccgtaccagtgcggtgacccggggacagcgtcagcccctccagcctggctcttgctagtcagccccgaacatgggctggcgcctgcgcccaccacaatcagagacccggaggccggacaccaggagaggccggaggaggagggtgaggacgaggcagaagcctcctctggcagcgaggaagagccggcccccagcagcctccaaccgggctccccggcgagccccggccccggccgtcgcctgtgctcgctggacgtgctacgcggcgtgcggttggagctggcaggggcgcggcggcggctctccgaggggaagctggtctcccggccccgcgccctcctgcatggcctccgcggccaccgcgcgctgagcctgtgcccgagccctgcgcagtcccccaggtctgcatcacccccggggcccgcgccccagcaccccgccgcccccgcgtcgcccccgcggccctccacggcaggcgccatccccccgctgcggagccacaagcctacggtcgcgatatacataacaacaaagcgcttaccctattttccaattgtaaactttctatttttgatcgctcagttgccaaaacttcaatacaacaaaaatgtggccctgaccgtgaagtttctgaccaagaggtttatcagtgaatatgaccccaacttgggaatggtctgccgaaaaccgaccgacccggttgattggccaccacttgtcctgggactgctcactttgatgaagcagttccattcccggtacaccgagcagttcctggcgctgattggccagtttatctgctccacggtggagcagtgtacaaggcaagtcaccaaggcagagggtgtggctttggcaggcaggtttgggtgcctgtttttcgaggtctctgcctgtttggactttgagcacgtgcagcatgttttccacgaggcagtgcgagaggcacggcgggagctggagaagagccccctgaccccccccctcttcatctccgaggagagggccctgccccaccaggccccgctcaccgcgcggcatgggctggccagctgcaccttcaacacgctctccaccatcaacctgaaggagatgcccactgtggcccaggccaagctggtcaccgtgaagtcatcccgggcccagagcaagcgcaaggcgcctaccctgactctcctgaagggcttcaagatcttctga

SEQ ID NO: 135108 - DNA, 2586 bp, Homo sapiens
atgcctgagaaagcagggcgactaccgcacccggatatggaaattccaggacgggttgagcaacgtgttggttgtacaattgaacaaattaatcatatgcgtgatgtgtttgggacgcgattgctacgtgctgaagacgtatttccaccggtgatcggggttgctgcccataaaggtggcgtttacaaaacctcaatttctgttcatcttgctcacgatctggctctgaatgggctacgtgttttgctcgtggaaggtaaactgaccaccgatccacacctgatgctccgactggacattgaaactgttgctcatgactatgatgtcatagttgttgacagcgcgcctaacctgtgtatcggcacgattaatgtcgcatgtgctgctgatgtgctgattgttcccacgcctgctgacttgtttgactacacctgcgcactgcaccttttcgatatgcttcgagatctgctcaagaacgggatcgccaaaaaatcattttactgggcaagaaaaacatctcattcctttgtcgtgaatatccttgctcaggctctttatgaattattttctgccacagatgcagaaggagcctctccccatggccaccagtgctccaggcctgcagtgagtactgcctggctgctgctggtgttcactcaaggctccagggctcttcagtcagctggtggtgaatgctgccagacctgggtctctcccttcagtacaatgggctcccctctcacccaggacggatccaaaaatgctgtccaggttgccaagcttactcatgctatttccatttttactgaaggcatcttaatgatgaaaacgactttggttggcatcatcaaggtggatccaaagcagttgctggaagatggaataaggaaagagcttgtgaagcgcgttgcctttgccctgcataggggactgatattcaaccctcgagccaagccaagtgaattgatgcccaagctgaaagagttgggagcgaccatggatggattccatcgttcttttgaatacatacaggactatgtcaacatttatggtctgaagatttggcaggaagaagtatctcgtatcataaattacaacgtggagcaagagtgtaataactttctaagaacgaagattcaagattggcaaagcatgtaccagtccactcatattccaatacccaagtttacccctgtggatgagtctgtaacgtttattggtcgactctgcagagaaatcctgcggatcacagacccaaacccctattccagtcacgggggtcctgcacttgtcaactcatattctgaccctttagggcaagggtccctaacccctgcgctgcagactgataccggtctgtcactcgtgaggaacctgaccgcacagcaagaggaactccatgctccactgactgttgttgcagatgggcttttctccaagttcaggaaaagcctggtctccaataaagtttctgtatcatctcattttgttggctttcttatgaagaatgcaccacagtttaaagcaaatcatgctgaacttattttagctaacccgagtccagttctcatctaccagatttcatccagtgaaactcgagtacttgttgacattagaggagaaatgccaaggaatttaagagaatacatggttgaaaaaatttacccacaaatacctgccacttacgcctttcgagtggagtttagtccatctacattgaatgttattattgcagaaggagcctctccccatggccaccagtgctccaggcctgcagtgagtactgcctggctgctgctggtgttcactcaaggctccagggctcttcagtcagctggtggtgaatgctgccagacctgggtctctcccttcagtacaatgggctcccctctcacccaggacggatccaaaaatgctgtccagggatgctctaaaataaaatcttcattacctctcttcataggtgttcttcttttgggagacgcatataatatgaggcatccacttactggtggaggaatgactgttgcttttaaagatataaaactatggagaaaactgctaaagggtatccctgacctttatgatgatgcagctattttcgaggccaaaaaatcattttactgggcaagaaaaacatctcattcctttgtcgtgaatatccttgctcaggctctttatgaattattttctgccacagatgagcatatacggccttctaaagaaccttgttccagtcctgcaaagtatcgtcacctagctagcactgtaactgtgacttcagaaggtcattctgccattctattaagccagctgcttcaggatgatgggaaacaagctgctactctgactggacggccaccatattttgggtctcctggaatcaatgtcagttcagagccagttgtcagtagttccctgaaagttctgattatttctctttccccaatgcgcagttaccctagtaaaaggccggagttcttaaagcagctcctgaagatgtcccttgaaattatgtctagggcagcaaaaggaaaagtcaaagtaattcttaaaatgattcaacccaaggtgaatctcagttga

SEQ ID NO: 135109 - DNA, 3089 bp, Homo sapiens
  misc_feature (1)...(3089): n = a,t,c or g
cggacttctcgtcctgggacactgtttactggagtctggccggctctccgtgctcctcttggtacctcattttggggagaaccttaaacccactcgagcagataatctccgccttgaccggtgccaccaaagaagccttggaaccaccttttatcggtggggaagtgcagtcgcggtgggcggctctgggggccagcgaaacgggaggcctctaaatctttaggtggggcccttttggggcccaaccttttggggncccccccncctgagaagccgcactcttgagtccgaggccatcttttgttggagaaggcgtcggcgttggcgttttcccgaggttgggctgtacagtgtctccgtccgcgggaaaaagaagcctctgaatcccgcgccggcccgcagcccccgctcgcttccggccgctgctcgccgtcgcccagaggctaggccacgtttcccccagtgccgaggggtttcttgtgacccctcccctccaactcccaattcccttctgaaagggcacctgctcttggtgagaaaagaaattatagcacgaagagccagtatcagaagagtatccatcacccgcagcaaccgctcagggaacaccatcaaaaaagaaaaaaagggaatatctggatttcctgggcgaggaggagcgagtctgctcgggagctgttccagcaggcgatttttaaatactgctttctacgccctatacaacttggcttcacatacttttacactaactttatatgatttttaaaaactggtctgatcggacttctcgtcctgggacactgtttactggagtctggccaggctctccgtgctccgtcttggtacctcattttggggagaaccttaaacccactcgagcagataatctccgccgttggaccggtgccaccaaagaagccttggaaccatgtgggacttttctgggcattgccacctttcaccctatttttataagaagttcgggggacttcatcactttgggccaacagggaggtcctggttggtgcgtgctgggtgttcctctcgctggggccgggggcttctcctaccgctgtcgccaccagaaacgggggtctcctcgggcgccagcagagcggctcccagttcagccctcttctcggatattctctcaggcctgcctttcattggcttcttctgggccaaatcccccccttgaatcagaaaataaggagcagctccgaggccaggaggcgcagaaaaggaaccaatatttcagaaacaagcttaataggaacagctgcctggtacatcaacatcttctcagaatgacccagaagttatcatcgtgggagctggcgtgcttggctctgctttgggcagctgtgcttttccagagatggaagaaaggtgacagtcattgagagagactttaaaagagcctgacagaattagttgggagaattcctgcagccgggtggttattcagtttctcaaagaccttggtcttggagatacagtggaaggtcttgatgcccaggttgtaaatggttacatgattcatgatcaggaaagcaaatcagaggttcagattccttaccctctgttcagaaaacaatcaagtgcagagtgggaggagctttccctcacgggaaggttcatcatggagtctcccggaaagcagctatgggcagagcccaatgcaaagtttattccaaggtgttgtgtttacagttattagaggaagatgatgttgtgatgggagttcagtacaaggataaagagactggagatatcaaggaactccatgctccacatgactgttgttgcagatgggcttttctccaagttcaggaaaagcctggtctccaataaagtttctgtatcatctcattttgttggctttcttatgaagaatgcaccacagtttaaagcaaatcatgcctgaacttattttaggctaaccccgagtccagttctcatctaccaggattttcatccagtggaaactcgagtacttgttggacattagaggagaaattgccaaggggattttaaagagaattacatgggttgaaaaaaattttaccccacaaaataccctggattcacctggaaaagaaccattcttagaagccactgacaattctcactctgaggtccatgccagcaagctttctttcttctttcataagtgaagaaacgaggtgttcttcttttgggagacgcatataatatgaggcatccacttactggtggaggaatgactgttgcttttaaagatataaaactatgggagaaaactgctaaaagggtatccctgacctttatgatgatgcagctatttttcgaggccaaaaaattcatttttactgtgcatagaaaaacattctcattccttttgtcgtgaatatccttggctcaggctctttatgaattaatttcttgcaacagatgatttccctgcatcacctaagaaaaaccctgttttttttatttcaaacttgggtggcgaatgtgttgcgggtcctgttgggctgctttctggtattgtctcctaaccctctaagttttaattgggacacttctttgcctgttgcaatctatgcccgtgtattttgcctttaagtcagaaccttggattacaaaaccctcgcgccctcctcagtagtggtgctgtattgtacaaaggcgtgtcctgtaatatttccctctaatttactccagaaatggaagtatagggtcccattaagccttaaagggggaacccatttgtgaaatgaatattgggaaccttacccaagtccctaagagacttttggaagaggatatatatagccatagtacccatacccacttataaaagtggaaactccttggacccaagatttggattaatttgtttttgaagttttttgtatataaatatgtaaatacatgctttaatttgcaatttaaaatgaaggggttaaataagttagacatttaaaagaaatgattgttaccataaattagtgctaatgctgaggagaactacagtttttcttttgaatttagtatttgagatgagttgttgggacatgcaaataaaatgaagaatgaaaaaaaaa

SEQ ID NO: 135110 - DNA, 417 bp, Homo sapiens
  misc_feature (1)...(417): n = a,t,c or g
nnnnnnnnnnnnnnnnnnnnnnnnnccttccaggtctttattgaccccaggcacaagttgccgtgaggggtggcgaccctaagggggtgagtggggtcccccaccgaggtgaaccctgatggcggctgtttgcccagggccaggcctttccaggcaggcggagggccaggcctaggtccagcagcagcttgggtggcaggagggtcaccagctcaggatgccagggcagtacttgtcaatgagcccctggtagtagggccgcagcttgtccacgtccggcaggtccgggcacttggtgtaaaggtcgaacttgttgaactcccgcacccagggcagcatggccaggtcctgctggctgcacagctgctggtagtcgcggcctcagggggcagtgagaacttgttaaacttcatcacc

SEQ ID NO: 135111 - DNA, 441 bp, Homo sapiens
cccacgcgtccgggcttctcctacaagaaaatgacagtcatggaggccgtggacctgctggatgggctggtggatgagtcggacccggacgtagatttccccaactccttccatgccttccagacagcggagggcatccggaaggcccacccagacaaggactggttccacctcgtcgggctcctgcacgacctggggaaggtcctggccctgttcggggagccccagtgggctgtcgtcggcgacaccttccccgtcggatgccgtccgcaggcctccgtggttttctgcgactccaccttccaggacaaccctgacctccaggatcctcgatacagcacagagctcgggatgtatcagccccactgtgggctcgacagggtcctcatgtcctggggccatgatgagtacatgtaccaggtgatgaagtttaacacagtc

SEQ ID NO: 135112 - DNA, 1910 bp, Homo sapiens
  misc_feature (1)...(1910): n = a,t,c or g
gttgttttctatgaatgtattattttagctattggggtattttttaaggggacggagcccagaggacttggtgactgttttgagcatgtgggggtgagctgggtgactcgtcccccaggctctgacacaggagctgggaggatgggcagatgtttaccacggccagtgtggtgggacacacacacctgaaagcctgggacttggcctccaccctgctggcaccatccctcggcctgggccacgccctgctgcagtaacacccagtggggcttcagaagcacaacatccttccaggtctttattgacgccaggcacaagttgccgtgaggggtggcgaccctaagggggtgagtggggtcccccaccgaggtgaanccctgatggcggctgtttgcccagggccaggcctctccaggcaggcggagggccaggcctaggtccagcagcagctttgggtggcaggaagggtcaccagctcaggatgccagggcagtacttgtcaatgagcccctggtagtagggccgcagcttgtccacgtccggcaggtccgggcacttggtgtagaggtcgaacttgctgcagcagggaggggcnggtgagcccccgtgaaaaaacccccaaggccccccacccaaccccctctttcactcccacaacacccctcggcgggtagcggggggcgttacttgaactcccgcacccagggcagcatggccaggtcctgctggctgcacagctgcttggtagtcgcggcccgtgtgccaggggtagaaaggagtggaccccgattcatgtagaaagcctcaggggggcagtgagaaacttgttaaacttcatcacctggtacatgtactcatcatggccccaggacatgaggaccctgtcgagcccacagtggggctgatacatcccgagctctgtgctgtatcgaggatcctggaggtcagggttgtcctggaaggtggagtcgcagaaaaccacggaggcctgcggacggcatccgacggggaaggtgtcgccgacgacagcccatgcagaaggacaggagggacgggcggccatggggggagtgggggaaggtgtcaccgatgactgcccactgcagagggacaggagggacgggcggccatggggggagtgggggaagatgttgccgatgactgcccactggggctccccgaacagggccaggaccttcccccagttcgtgcagaagccgtacgaggtggacccagtccttgtctgggtgggccttccggatgccctccgctgtctgtaaggcatgaagggagttggggaaatttacgtccgggtccgactcatccaccagcccatccagcaggtccacggcctccatgactgtcattttcttgtaggagaagcccccaaactgggcatgcttgctcctgacgaagtccactgtctggtgcgtgtgcatgagcttgtaggtggtgaagacacggtccaggaggggacctgacgtgtagttccggaagctggccttgtctttggccacctctgggtccacatcaggtcggtagaccagggaagggtctgggcctcccaggtcctcatctgcaaagcgaaagtcagcagacgtctgcttccggggtacaggggacaccacgcctgagcggcacccatggccacccttgaggggtggaagtggctttgggaggagactgagtccacagggagcatggaagtcggcagccgctggctcttgcccagctggacggaggaggagggctggccagtgccacgtagcaagagggcgggagtggctggccaccaggaacagcaatcagcagagcctctctgcatggggtctgggtactcaccaccgtcacattcatcctgagagggaggcggcgctcaggtggcaaagcacaggctggcgagtgtgtcc

SEQ ID NO: 135113 - DNA, 2652 bp, Homo sapiens
atggagctgaaaaccaaggctagagaactacgagaagaatgcagaagcctccggagccgatgcaatcaactggaagaaaggctatcagtgacggaagatgaaatgaatgaaataaagcaagaagggaagtttagagaaaaaagaataaaaagaaacgaacaaagcctccaagaaatatgggactatgtgaaaagaccaaatccccatgatacagataacctgtgtctaggtccctctacctttctggaaggatcagtatcagagttcacctggagcaccagatggctggcaggagcaaagaaagacgacactcaaaatctgctcaagaatttggagtctaatgcgcagaccccctcggaaactggctccccatcaaggaggaggaagagagaagtgcagatgtcgaaggacaaggaagctgttgatgtcccaagttcttatcctgcgtccaagaagaatgaagcacgcagacaagtggaggctttggctgaacttggggcttgtatgggcttcagaggggaggaagtgtatgccagttggtccatggatggccatgaatggcctggaaaaggcaccacaagttcccactctggtccgtgggaccggcagctgggcccccagcctacagatcctccctccctgaaggagggcctgaagagtggtatcctgtggcatgggtatagcacagtgtcttcaattgtccactggtttagggacacttctgttgtttccagagcctgcactgctcgcctggtgcctaatggcctcacagaatgtgaggaggaggagaaagagctgagactggcatcgtacctggcgaggatggccatggtgcccggggccacgcttcgccggctcctgagtgtggtactgcccacagcctcacagcctcagctgctggccctgctggattcggccaccgagagacatgtggaccacgcagctgagagcgatggcggagcggagcaggccgacgtgggcaggcggagaaaaggaaaaaagaaaacactttcagcaacagtttggggtctgacacgtgggataacatttggtgcgatttccaaccctccaagcctggagctacaatcagccctaactgctgcacaggaatgtgagccgccttccaacagcaatatcacagcattcgccctgaaggccaaagtcatctaccccatcaatcagaagttccggcctctggccgatggctcctccaacccgtctctgcatgaaaacttaaagcaggctgttttgccacaccagccggtagaggcctctccttccagcagtctggggagcctgagccagggtgagaaggacgactgcagctcctcatccagcgtccactcggccaccagcgatgacaggtttctcagccgcaccttcctccgggtgaacgccttccctgaagtgctggcctgcgagagtgtagacgttgacctgtgtatctacagccttcacttaaaagacctgctgcatttggacacggcactgaggcaggaaaagcatatggtaggtggagatgttcgcattccctccttttcatggggacaggagctgggagacaaggactctgtgtgcacccctccagaggtcatttcagtacagcagggtccaaggcacccatcacaactcattggcatcagctatctggtgtctgggtcgagtgaagcacagacagcccgcatatggctgcttgttaacaacaccaagacaacctcgtcagccaacctctcggagctgctcttgctggacagcattgctggtctcaccatttgggactctgtgggaaacaggacctcggaaggattccaggcttttagcaagaagtttctgcaagggtacctggatgaagaccaaatggaaatgctattggagcgggctcagacagaagtcttttcaatcaagcagaagttggacaatgacttaaagcaggaaaagaaaaagctccaccaaaaattaataactaagagaagacgagagttgctacaaaagcacagggagcagcgtagggagcaggcgtccgtcggcgaggccttccgaacggttgaggatgccggccagtacctgcaccagaagaggagcctgatggaggagcacggtgccaccctggaggagctgcaggagcgtctggaccaggccgccctggacgatctcaggaccctgaccctttcgctgtttgaaaaggccaccgacgagctgcggcgcctgcagaactcagccatgacccaggagctgctcaagcgtggggtgccctggctcttcctgcagcagatcctggaggagcacggcaaggagatggctgcacgggccgagcagctggagggggaggagagggacagggaccaggagggtgtccagagcgtgaggcagagactgaaggatgacgctcctgaggccgtgacagaggagcaggcagagctgcgacgctgggagcacctgatcttcatgaagctctgctcctcagtcttctccctgtctgaagaggagctgctcaggatgaggcaggaggtccatggctgctttgctcagatggacaggagcttggccctccccaagatccgggcccgagttctgctgcagcaatttcagactgcgtggcgagaagcagagttcgtgaagctggaccaggccgtggctgcccctgagctgcag

SEQ ID NO: 135114 - DNA, 3093 bp, Homo sapiens
atggccctcgggcgccccatgccctgggtcctcccggggcccgcccccctcgtctggcccgcgcgcgccccgaggcctctggccgatggctcctccaacccgtctctgcatgaaaacttaaagcaggctgttttgccacaccagccggtagaggcctctccttccagcagtctggggagcctgagccagggtgagaaggacgactgcagctcctcatccagcgtccactcggccaccagcgatgacaggtttctcagccgcaccttcctccgggtgaacgccttccctgaagtgctggcctgcgagagtgagataattcctgttctgcgagagtgcagaaaggataagagagatgtgtatgatacacctagcaatgtcatagttggctgtgaatatgtgatggctgctgtcatcctcattatcacaaccaccaccaaaatcatcatcatcttcattatcaccaccagttttattttgtatcaccatcaccaccactattactatcacagttctcttcttcatcatgtcattgttgtcatcaccataaacaccatcatctttgctattgtcaccactgacatcatcattctttgtctttaccaccatcatcatcatcctcatgaccgctgtcatcaccaacaccatcaccatcctcatgtcctcattaccatcatcatgagcatcatttttatcattgttgtaattattggcattctcattactaccatcaccgccatcatcatcttcattaccaccataatcatcatcaccatccttattgccatcaccaccaccaatgttgcagggcaggcaagctccagaatagggtttagcctgggaggatcccattttgatcagcagggttgtgatcagaaaacaagtcctgccagtctcctacctcaccttatcctcaccatcattgtcatcattattctcgttactactatcaccagcctcttattcatcatcccctgccatcattttcattatcatcatcattgttattgtcatcattttcattactgccatcgtcatcgcatcattgttgtgatagtcttcatcagcaccaccatcatcaccatcttcatcagcaccaccatcaccacctttatcatctttcctgctacctctaccttcaccttcattagagtcctcattgtcatcgtcatcgtccttgttcctaccactgatttggaggaactagaaaagggacttcaggtcaaactgtcaaacacagaaatgtcgggggctggtgactctgagtacatcaccctggctgatgtggaaaagaaggagagagaatactctgaacagctaatcgataatatggaagctttctggaaacagatggcaaatatccagcactttcttgtggaccagtttaagtgttccagctccaaagcccgacagctgatgatgactctgacggaaagaatgattgcagccgaagggctattgtgcgattctcaggagctgcaggctctggacgccctggagaggacgatggggcgggcgcacatggcaaaagtgattgagtttctgaagctgcaagtccaggaggagaccaggtgccggctggctgccatctcccacggcctggagctgctggctggtgaggggaagctgtccgggcggcagaaggaggagctgctcacgcagcagcacaaggccttctggcaggaggcagagcgcttcagccgggagtttgtccagcgaggcaaagacctggtcacggcgtctctggctcaccaggtggagggaacggcaaaactcacgctggcccaagaggaggaacagagaagcttcctggctgaggcccagccgactgctgacccggaaaagtttctcgaggcttttcatgaggtcctggagaggcagaggctgatgcagtgtgacctggaggaagaggagaatgtcagagccaccgaggctgtggttgcactctgccaggagcaggctaaaatcctccattgccgattggagagctggctgcgccctcctggctgggcgtccttgggccagagcctggactgttctgagctctggtttccttctctgtgcaatggagactgggagcccatttactttaaaggctgggtgtgccgaggagagcaggtccaaggcccagacctggcacatgggaatacagctcccaaggtgaaatatggtgtcccatggggcaagaagccgccactgataatcagggggcagcttaaaattgtgcgtgtgaattactataggacactgatggaggcggcagtggagagcgtctacgtgaccagcgctggtgtcagccgcctggtgcaggcgtattaccagcaaatcggaaggatcatggaggaccacgaggagagaaaactgcagcacctgaagaccctgcagggtgagaggatggaaaattacaaactgcggaaaaagcaagaactcagcaacccttcgtcgggcagcaggacggcaggtggcgctcatgagacctcccaggcggtccaccagaggatgctgtcccagcagaagaggttcctggcccagttcccagtgcaccagcagatgcgtctgcacgcccagcagcagcaggcaggagtcatggaccttctggaagcccagctggagacccagctacaggaccctgagcccctggagggcaagtgtggcctgtgtggatccctacagcagctgcagcatgctaagcagggccaggccctgagcagctggtcaggcctcatctatggagctgacagagaattgagcattcccctgtgtgcgcatggccaccaggaggcttccggtgtaatggaagctgaacagaacttcatctccgagctggcagccttggcccgagtgccccttgctgaaagcaaactgttgcctgctaagcgtgggctgctagagaagcccctaaggactaaaaggaagaagcccctgccccaggaaagaggggacctgggggtgcccaacaatgaggaccttgcctccggggaccagacctcaggctcactcaggtatgactgggccccggacctgttgcctgtggctgggtttgtgctgagaggcagcgaggacggagaggacagcggcatctctaggctcttctga

SEQ ID NO: 135115 - DNA, 328 bp, Homo sapiens; identical to SEQ ID NO: 126749

SEQ ID NO: 135116 - DNA, 2073 bp, Homo sapiens
ccgtcctgcgcggttgttctctggagcagcgttcttttatctccgtccgccttctctcctacctaagtgcgtgccgccacccgatggaagattcgatggacatggacatgagccccctgaggccccagaactatcttttcggttgtgaactaaaggccgacaaagattatcactttaaggtggataatgatgaaaatgagcaccagttatctttaagaacggtcagtttaggggctggtgcaaaggatgagttgcacattgttgaagcagaggcaatgaattacgaaggcagtccaattaaagtaacactggcaactttgaaaatgtctgtacagccaacggtttcccttgggggctttgaaataacaccaccagtggtcttaaggttgaagtgtggttcagggccagtgcatattagtggacagcacttagtagctgtggaggaagatgcagagtcagaagatgaagaggaggaggatgtgaacagggttttatttatgaaaccgaaaggcaggggcctcaagcatatgttcggggatttggtgtgcagttggaaattggcagccattgagacccagagcagcagttctgaagagatagtgcccagccctccctcgccaccccctctaccccgcatctacaagccttgctttgtctgtcaggacaagtcctcaggctaccactatggggtcagcgcctgtgagggctgcaagggcttcttccgccgcagcatccagaagaacatggtgtacacgtgtcaccgggacaagaactgcatcatcaacaaggtgacccggaaccgctgccagtactgccgactgcagaagtgctttgaagtgggcatgtccaaggagtctgtgagaaacgaccgaaacaagaagaagaaggaggtgcccaagcccgagtgctctgagagctacacgctgacgccggaggtgggggagctcattgagaaggtgcgtaaagcgcaccaggaaaccttccctgccctctgccagctgggcaaatacactacgaacaacagctcagaacaacgtgtctctctggacattgacctctgggacaagttcagtgaactctccaccaagtgcatcattaagactgtggagttcgccaagcagctgcccggcttcaccaccctcaccatcgccgaccagatcaccctcctcaaggctgcctgcctggacatcctgatcctgcggatctgcacgcggtacacgcccgagcaggacaccatgaccttctcggacgggctgaccctgaaccggacccagatgcacaacgctggcttcggccccctcaccgacctggtctttgccttcgccaaccagctgctgcccctggagatggatgatgcggagacggggctgctcagcgccatctgcctcatctgcggagaccgccaggacctggagcagccggaccgggtggacatgctgcaggagccgctgctggaggcgctaaaggtctacgtgcggaagcggaggcccagccgcccccacatgttccccaagatgctaatgaagattactgacctgcgaagcatcagcgccaagggggctgagcgggtgatcacgctgaagatggagatcccgggctccatgccgcctctcatccaggaaatgttggagaactcagagggcctggacactctgagcggacagccggggggtggggggcgggacgggggtggcctggcccccccgccaggcagctgtagccccagcctcagccccagctccaacagaagcagcccggccacccactccccgtgaccgcccacgccacatggacacagccctcgccctccgccccggcttttctctgcctttctaccgaccatgtgaccccgcaccagccctgcccccacctgccctgcccgggagtactggggaccttccctgggggacggggagggaggaggcagcgactccttggacagaggcctgggccctcagtggactgcctgctcccacagcctgggctgacgtcagaggccgaggccaggaactgagtgaggcccctggtcctgggtctcaggatgggtcctgggggcctcgtgttcatcaagac

SEQ ID NO: 135117 - DNA, 1944 bp, Homo sapiens; identical to SEQ ID NO: 133012

SEQ ID NO: 135118 - DNA, 2585 bp, Homo sapiens
gtgattccgtcctgcgcggttgttctctggagcagcgttcttttatctccgtccgccttctctcctacctaagtgcgtgccgccacccgatggaagattcgatggacatggacatgagccccctgaggccccagaactatcttttcggttgtgaactaaaggccgacaaagattatcactttaaggtggataatgatgaaaatgagcaccagttatctttaagaacggtcagtttaggggctggtgcaaaggatgagttgcacattgttgaagcagaggcaatgaattacgaaggcagtccaattaaagtaacactggcaactttgaaaatgtcctgtacagccaacggtttcccttgggggctttgaaataacaccaccagtggtcttaaggttgaagtgtggttcagggccagtgcatattagtggacagcacttagtagtgtaccgccggaagcaccaggagctgcaagccatgcagatggagctgcagagccctgagtacaagctgagcaagctccgcacctcgaccatcatgaccgactacaaccccaactactgctttgctggcaagacctcctccatcagtgacctgaaggaggtgccacggaaaaacatcaccctcattcggggtctgggccatggagcctttggggaggtgtatgaaggccaggtgtccggaatgcccaacgacccaagccccctgcaagtggctgtgaagacgctgcctgaagtgtgctctgaacaggacgaactggatttcctcatggaagccctgatcatcagcaaattcaaccaccagaacattgttcgctgcattggggtgagcctgcaatccctgccccggttcatcctgctggagctcatggcggggggagacctcaagtccttcctccgagagacccgccctcgcccgagccagccctcctccctggccatgctggaccttctgcacgtggctcgggacattgcctgtggctgtcagtatttggaggaaaaccacttcatccaccgagacattgctgccagaaactgcctcttgacctgtccaggccctggaagagtggccaagattggagacttcgggatggcccgagacatctacagggcgagctactatagaaagggaggctgtgccatgctgccagttaagtggatgcccccagaggccttcatggaaggaatattcacttctaaaacagacacatggtcctttggagtgctgctatgggaaatcttttctcttggatatatgccataccccagcaaaagcaaccaggaagttctggagtttgtcaccagtggaggccggatggacccacccaagaactgccctgggcctgtataccggataatgactcagtgctggcaacatcagcctgaagacaggcccaactttgccatcattttggagaggattgaatactgcacccaggacccggatgtaatcaacaccgctttgccgatagaatatggtccacttgtggaagaggaagagaaagtgcctgtgaggcccaaggaccctgagggggttcctcctctcctggtctctcaacaggcaaaacgggaggaggagcgcagcccagctgccccaccacctctgcctaccacctcctctggcaaggctgcaaagaaacccacagctgcagaggtctctgttcgagtccctagagggccggccgtggaagggggacacgtgaatatggcattctctcagtccaaccctccttcggagttgcacagggtccacggatccagaaataagcccaccagcttgtggaacccaacgtacggctcctggtttacagagaaacccaccaaaaagaataatcctatagcaaagaaggagccacacgagaggggtaacctggggctggagggaagctgtactgtcccacctaacgttgcaactgggagacttccgggggcctcactgctcctagagccctcttcgctgactgccaatatgaaggaggtacctctgttcaggctacgtcacttcccttgtgggaatgtcaattacggctaccagcaacagggcttgcccttagaagccgctactgcccctggagctggtcattacgaggataccattctgaaaagcaagaatagcatgaaccagcctgggccctgagctcggtcgcacactcacttctcttccttgggatccctaagaccgtggaggagagagaggcaatcaatggctcctttcacaaaccagagaccaaatgtcacgttttgttttgtgccaacctattttgaagtaccaccaaaaaagctgtattttgaaaatgctttagaaaggttttgagcatgggttcatcctattctttcgaaagaagaaaatatcataaaaatgagtgataaatacaaggccagatgtggttgcataaggtttttatgcatgtttgttgtatacttccttatgcttcttttaaattgtgtgtgctctgcttcaatgtagtcagaattagctgcttctatgtttcatagttggggtcatagatgtttccttgccttgttgatgtggacatgagccatttgaggggagagggaacggaaataaaggagttatttgtaatgact

SEQ ID NO: 135119 - DNA, 1592 bp, Homo sapiens
cacccctataaggagaaatctatgacgttgcacgcaagtgtaaagttgggcccctccaagggtcctttaaaacggctgcgccctttttgttttcttttcaatagaaaccgtgctactttattaaaatactgagtttttatttcacatgtattatttttgtctcccacaccattttccatgtctcccccaccgcctactacttatgtccctatccataacattcccatacatacttaaaacccaagcataagggtggagttcccatctttaaaaaactaaacaggcattttgggacaacacaattccttggcaaatagaacctggacaacatttatcaaaccccgggtaggggaaagttctcactctgcaattataaaaaggacagcccgatatcaactggtacaagaaatgggaattaagacgggaaaattttttaaccaaattgggtttaaaactattttcctaaaagagacttccctccacttgccagaagatcttggaattaggccctccttgggtcaagtccatccgggaagcaattccttcacataatttgatggaatttgggcttccactttggggaagaggaaccacctttttcctatacttggcttgcaatttttgcctttaatggtctctacagaaactagggtccctttgggtggttttaggagagttttttcctggtttcttgaaaggattcttgtcccttttgatacttgggtgtgaatgatggtttttggagtcttttcccattctgattttgactttcgctgcatttttgggctggagtattcccgtaaaaaattcctaacgggcggcttttcctttcagcttccctcatcaccaaaaatcatcatcatcatcatcaatcatcttcatcatcatcattatcatcatcatcctcttcatcattcggtcatcatctttccatcaagcaagcaaagtttttacttttttttctggggaaaccttgctaccaaccttccaaggggcagaccggctttccaagatatactttaaggagtttcacaatccttccttccttcttcaatcttctggactctggcatcttccctcccacagctaactaaagtgcttgtccacttaatatgccactggcccctgaaacccacactttcaaccctttaaggacccacctggttggtgttattttcaaaaagcccccccaaggggaaaacccgttgggctggtacagaccattttcaaaagttgcccaggtggttacttttaaattgggactgccctccgtaaattcaattgcctctgccttcaacaaatgtgcaactcatccttttgcaccaagcccctaaactgacccgttcttaaagataactggtgctcattttcatcatttatccaccttaaagtgataatctttgtcggcctttaggttcacaaccgaaaagatagttctggggcctcaggggggctcatgtccaatgtccatcgaatcttccatcgggtgaccggggggcacgccacttaggtaggagagaacggcggaccggagataggaagaacgctggctccagagaacaaccgcgcaggacggaatcacaccagggccc

SEQ ID NO: 135120 - DNA, 1585 bp, Homo sapiens
tttttttttttttttttttccaggaccagcatgctccatctggggaggtgctcactcaatgtttattgaacagcgaataccagaaaagacagtccctggagctctatatgtggaaaaataaccccttctggaacaaaaaaaaaaattgtggtcccatgtggttttaaatctgtttaaagaaaggaacaacttaaggcaacatggctggttgatctttgcgtcaataagacacgggtgaagctccatggtggaactcctccttgtctgtaggtttccagggctgggcacagacggtgacgggcagaatgtttgggggtcccagtggatcttcccaacaacttcctccagggcacggatttccacccagggcccagggctggcccgttcctctcctttctcggccagtcttgcgcttgcggcttgccacggtttcacaccagaggggatgggggttagggagggcgcaggcagccagggccacacattgttcttttccgcgcttcgatgaggaaagtaccccgttcatttccccactggggaaccccaagagtttttcacgatcccagtaaagggatcccatttttttcttccataacccaacaaccagtactgcatgggtttacttttatctggagttttatggcaggaagtactagtgagtagatgcccgttctatacatcatgaagtcctgagttcacctcaaaaggcaaagctcaaccaggttggagagggccacagccctccaccatcggctttctcgtcatagattgtgatgttggcttacatccttgacaaaagccgatggcctttccaggttggaactttgcaataaccatccttgcccctggtaagggtaaggtgtcttcaccccatgaacccccttgttgtaacaggatatactcgaaaaccctggctggggagacccccttggcaagccgtgattaattgaagtccctgggcgcaagtcccacccagctgcctgttcccgcccaaggaacagcatctttcccggttgcgaatggcgaatcgcagactccccagggccccagtggtggagaaagtcccagctaaactgccgcaggcaccctgatttttcacaggtgagacaaaatttccttttttccgccagtccacggaaggtgggtagggaccagtacctcgaaggtagttgccttttgggggctgagcaattctgagggctctgcccagagatacttgtgttttatgtcaccaaagctcatgtctgaaaattggttcagtgccattttaaatgtgtggttcccatggttgtgggcgtttatcttcctccagttgctggcaaacgtctgcagcctgtggtggtactcctccgtactgtaggtcttgcggtgcttagacatccatgacttgaagtgaagcttctctaaggagttcacggacagttcggcggcaccgcagacggggactcccaggagccaggccccggcgcagagcagcggcagcgtggcccacataacagcgctggcggcttggctcttgcgctcagggtccgcggaggtggcggcccagagcgtcaactcggacgcgagggtcgaccaggaattc

SEQ ID NO: 135121 - DNA, 1065 bp, Homo sapiens
ggctcctgctcccgggaggcggcgctgcgtggagcatcggggcagctccgttctccggacgcaggtaagagctcccggcgcctttgcaccccgctggccgatgccatgtgcagaatggcacctaccttcagcgagtgctgcagaactgcccctggcccatgagctgtccggggagcaggtaaatgaggtggagaaggaactgatggcattccaggatgagcagcagatttttggacaccaagagctgtgtttccaagcatggcgctaaagaggatgggctggcccagaaccatcctgagaaccaggcccagagacagctcaagggacagaagcattcagggcccccacagcagcacatgaacgtgaacatcagtctcaggatataccccaattccggaaacacaaatgtgcgaaaatgtagcctctgactcaaaggaacatggttggtgcccactcttgtcacctgcccagtgctgtctcttgaccctcgagccatagagctgcatcaccagggccaacaggacccagggcagcctggggtgggccaaaggaggagagggaacacctgccattctgtttatctgagcatgggtgacagagaagaggtagcacagagctgccctgtgcctcagtttccctacctggaaagtggaggtgaattggaggtgatactagcacccactcacagttacccaccttcctccatcctgggtgagattagccccctgtgcctgggcaagtcacaggcccttgaggagggtatgctggggatgcaggctcagcacgagtgaaggccgttcatgctgtttgacccagatacattgcctctcctctgggcctctgtgtcctacgctgagggcagtaggggtccctgctggggctacagtggtgggcaggggggcctgaggaggcaaggatcacatgctaccatgcggcggatggcgcttcggcccacagccttctcaggtgggtcctgggatagcttcttgaggtccccctgggcgcggctgaaggtgctggaggccaaggtgggtgagcagctccctcctgggtggttgttccctg

SEQ ID NO: 135122 - DNA, 1633 bp, Homo sapiens
ttggggtccattgcaacccgaggcgagactagagttcccaagcgagaagggaagaggcagtgggtgcacgtggaaggcggacagagggctggaaacaagacgctccagaatcaggagcttcccctcaggaaatagcatcctgtgtccccgcactgcagttgtctggtctctccagcagtttggtacttccggctgctgcaatgcgtgtggtggtgattggagcaggagtcatcgggctgtccaccgccctctgcatccatgagcgctaccactcagtcctgcagccactgcacataaaggtctacgcggaccgcttcaccccactcaccaccaccgacgtggctgccggcctctggcagccctacctttctgaccccaacaacccacaggaggcggactggagccaacagacctttgactatctcctgagccatgtccattctcccaacgctgaaaacctgggcctgttcctaatctcgggctacaacctcttccatgaagccattccggacccttcctggaaggacacagttctgggatttcggaagctgacccccagagagctggatatgttcccagattacggctatggctggttccacacaagcctaattctggagggaaagaactatctacagtggctgactgaaaggttaactgagaggggagtgaagttcttccagcggaaagtggagtcttttgaggaggtggcaagagaaggcgcagacgtgattgtcaactgcactggggtatgggctggggcgctacaacgagaccccctgctgcagccaggccgggggcagatcatgaaggtggacgccccttggatgaagcacttcattctcacccatgacccagagagaggcatctacaattccccgtacatcatcccagggacccagacagttactcttggaggcatcttccagttgggaaactggagtgaactaaacaatatccaggaccacaacaccatttgggaaggctgctgcagactggagcccacactgaagaatgcaagaattattggtgaagcaactggcttccggccagtacgcccccagattcggctagaaagagaacagcttcgcactggaccttcaaacacagaggtcatccacaactatggccatggaggctacgggctcaccatccactggggatgtgccctggaggcagccaagctctttgggagaatcctggaagaaaagaaattgtccagaatgccaccatcccacctctgaagactccagtgactgctgcctccccccacaagaactcccttctcccctcagccaatgaatcaatgtgctccttcataagccattgcttctccctcacttctttcctcaaagaagcatgaggtgagagaaagccacaaagtcagtgcctggagaagggttcagcccaacatggggcccctctcatcactgaaatccctctaccttctctgggtctggcattataaagaacagctgaggctgtcattccatgagtcttcagaagaaaggacagctcagaaagtcaaagaggccaactgcccagagccacagaaaatggaggataattgaggctaagtaacctgattacaagttgtactaacatattaaaggttctgaaaagtcctgcaaaa

SEQ ID NO: 135123 - DNA, 1374 bp, Homo sapiens
atgcatcttgatctcccttgtggtttcagcaaggaagcagatgagttggagatgaagcccccagcccctgggaaattggacccacttcttgctccaaaggctattggggtgacacaagattcaatcagtgaatatgtcccaaggactagctccgtgtcctggcgggctgaatgtttcaggctatatgcattccccagccgcctgtatgtgtctgccctgcaggtgcttcacaaggcctgcgaagtggcccggaggcacaactacttccccgggggtgtagctctcatctgggctacctactatgaggagcttgcatcagttccgagcagagcttgcatcaacgagtggaacgccatgcaggacctggagtctacgcggcccgactcccccgcgctatttgtggacaagcccactgaaggggaaaggaccgagcgcctcatcaaagccaagctccgaagcatcatgatgagccaggatctagaaaatgtgacttccaaagagattcgtaatgaattagagaaacagatgaattgtaacttgaaggaactcaaggaatttatagacaatgagatgctacttatcttgggacagatggacaagccctcccttatcttcgatcatctttatctcggctctgaatggaatgcatccaatctggaggaactgcagggctcaggggttgattacattttaaatgttaccagagaaatcgataatttttttcctggcttatttgcatatcataacatccgagtctacgatgaagagaccacagacctcctcgcccactggaatgaagcgtatcattttataaacaaagcgaagaggaaccattccaagtgcctggtgcattgcaaaatgggcgtgagtcgctcggcctccacagtcatagcctatgcaatgaaggaattcggctggcctctggaaaaagcatataactatgtaaagcagaagcgcagcatcacgcgccccaacgcgggctttatgaggcagctgtctgagtatgaaggcatcttggatgcaaggacccagacagttactcttggaggcatcttccagttgggaaactggagtgaactaaacaatatccaggaccacaacaccatttgggaaggctgctgcagactggagcccacactgaagaatgcaagaattattggtgaacgaactggcttccggccagtacgcccccagattcggctagaaagagaacagcttcgcactggaccttcaaacacagaggtcatccacaactatggccatggaggctacgggctcaccatccactggggatgtgccctggaggcagccaagctctttgggagaatcctggaagaaaagaaattgtccagaatgccaccatcccacctctga

SEQ ID NO: 135124 - DNA, 400 bp, Homo sapiens; identical to SEQ ID NO: 86157

SEQ ID NO: 135125 - DNA, 1992 bp, Homo sapiens
atggacgatatcccgcaagaggcccggcagtaccggcataaccaagcctatgcctacagcatccagggtgacggtgccgaggatgacgatgagcgcattgttagatttcatacacgagactcagagagcagcactttctatagcgcacatccttcccctaccccccagacatctccatctgtggccagacggatggtgtggggtgcagagaccttgactttcccatgcgatcggtggcttgccacctctgaggatgacaaaaagaccattcgagaactggttccatatgacatcttcactgagaaatacatgaaagatgggtccttacggcaagtctacaaggaagtagaagagcctctggacagtaagtgtggtgtggccaccctcatcaccatgggaaggctccaggaccctggtcctcctgagcacatgccctgtgccaggctaagcctcttcacccaggaaaccccccagcttgaggcggccgacgtgggcgaggtctataagctccggctcgggcacacgggcgagggctttgggcccagctggttcgtggacaccgtgtggctgcggcacctggtggtgcgggaggtggacctcacgccggaggaggaggcccggaagaagaaggagaaggacaagctgcggcagctgctcaagaaggagcggctgaaggccaagctgcagaggaagaagaagaagaggaagggcagcgacgaagaggacgagggggaggaagaggagtcgtcctcatcagaggagtcctcgtcagaggaggaggagatggaagaagaggaggaagaggaggagtttgggccggggatgcaggaggtgattgagcagcacaagttcgaagcccaccgctggctggcccggggcaaggaggacaacgaacttgtcgtggagttggtgccagctggcaagccgggtcctgagcagtccatacgccaccacaccttggttaattgccagaactggctggaagcgcaggttccagcccccttctctgagagtatgcgaacttcattccagatgaccctgatgaacactctgaacaaagacaagtacaacttcaattgcaaccgctggctggatgccaatgaggatgacaatgagatagtgagggaaatgactgcagaaggcccaacagtgcgcaggatcatgggcaaacttagacctgcttgcagcctgctgtcgactctaaagatcccgtgcaaattctgggaaaagtgtttccgggctgagagaaaagcccctagagcagccccctatatgggccactgcttcaaatgccttctggaaacacagccctggcaaaactctaggcggggttccaagctctactgttaccagcgtctgggccctactctctctgcctccaatgccctcatcacaccctggaccaaggttaggcgcgctgtcaataactatgacatcatagtcatgagcaacagtttcaatggccagtcggagcatcaggtgtggatcgaagatccccaaaaaaataagcacaagttttatccggcctttattcacattcttgcccgcctgatgaatgctcatccggagttccgtatggcaatgaaagacgtgaataccacgacgatttccggcagtttctacacatatattcgcaagatgtggcgtgttacggagaaaacctggcctattatccctaaagggtttattgagaatatgtgtttcgtctcatccaatccctgggtgagtgtcaccagttttgatttaaacgtggccaatatggacaacttcttcgcccccgttttcaccatgggcaaatattatacgcaaggcgacaaggtgctgatgccgctggcgattcagcttgaggcggccgacgtgggcgaggtctataagctccggctcgggcacacgggcgatggctttgggcccagctggttcgtggacaccgacatgccctactaccggtcccagtttaagaagtgtgctgtagtgggcaacggagcatcttga

SEQ ID NO: 135126 - DNA, 4188 bp, Homo sapiens
atggctgtgaggcttcttcaccacctggaaagatggggtgatttagacagtgatgggaaggaggagcaggacatcctaggattggtgagtaaacccatgcccagccccaagccccttcttcatgtcttgaggaacctaaacctcccgagtgaaaagaagtcacagaggtccatcgctccccagatcccaattgagggcagcttggttcagtgccaaccccgtgtgcttcctgcgcccttgatcatggccaagaggaaatcacacctgcctaacttcacggggctgtggtggacatcagaggagatggacaatagacagaggatggttgggaaaatgggaaacttaagtcatgcaaggctaactgagcctgctgagattcatggggcagaaaccttaagcaagttcctctgggcctccttcagcctgctggatgtcccctgcgcacactccccaagtcgccagaggaaaaggccaacagcccccgtgggcaccatcttccaagacgcccttccaggccccagcccaggttctgcaccagctgtgccagatgccataggagaggagactggcacagccaaaaggcagcagagagaccatccagtcttccattttatagcagaggaaaccaaggcagagacacgaagatggagaagaaggcagaggagctatttgaccttgggcaagtcacttgaccctgaagtcctctgcctgcttatctacaaaatggaaatcacggaagcccttacctcaggtcctcacacatcccgtgtcctggacaccagcctccctgttctatcctcggatccatctgatgccaaagccagtgttccttcctccccacacacagcagtcagaagtaacagatttgatgtacgcacggccaaatggaggagcttaaaacagagccgagagaagaaagtcagctggccgcactgcccctgtatcaaggccacctgcaagtggaatcagagagagtcagaatttgaccatgtgaaggccccccgccaaggagatgtcaaccctgttcagggagaaactgtctccatgtgtcctgattggtttatttcttcttggagtcagatgcaggcaggaattgttcagctcattcctcagcggaatgaaagagacagggaggacttcctggagggctcagctgcacacagcggcacacccaggcatgtttcaaggaaaggacagcaggaggaagcagcagcatccgggggaatgtcccgctcagtggcccaacaagagcagcagcaccagacttatgccagccttgagctcggggtcaaggagccctgtgtctgtgcttccaggtttagcccatgccctggggctggacagcagtccaagggaggctgggaagagcacgagaacaaagagggccagagcagagagggcagccatggggggagaggagagttgcatgaagccacaaagaaggcaaggaagcgctgtggtcaggcaggggtgcacccgccagcgaggagcaggggacctgcctccttggcgttgggcctggcaggtggctgggagcggatggtgagggcagatgtcaggcagctccaggctctggcccctctagcccagaatccttaccctgatgggacacataaggataggatcttcacagggaacattcctggggcagggacggatgccaaggtgtacatcaccatctatggagacctcggggacactggggagcgataccttggcaagtcagagaaccggaccaacaagttcgagagaggaacgacagacaccttcaccatctatgccattgacctgggggccctgaccaagattcggattcgccacgacaacacaggcaacagagcaggctggttcctggacagaatagacattactgacatgaacaacgagatcacagcttgttttttctggagggtggaagtggtgtgtgtatcatggggtgtgaagaggaagggcagcgacgaagaggacgagggggaggaagaggagtcgtcctcatcagaggagtcctcgtcagaggaggaggagatggaagaagaggaggaagaggaggagtttgggccggggatgcaggaggtgattgagcagcacaagttcgaagcccaccgctggctggcccggggcaaggaggacaacgaacttgtcgtggagttggtgccagctggcaagccgggtcctgagcgaaacacctatgaggttcaggtggtcacggggaatgtgcccaaggccggcactgatgctaacgtctacctaaccatctacggcgaggagtatggagacacgggcgaacgacccctgaagaagtcagacaagtccaacaaatttgagcaggggcagagcctcagggctcttcctggcttccagcttggttaccaaggggttttaattagacaaattgatgactgtgactatgttgcccaggtaactaagacccttaatcttccagaaatgtctgagtctccagaaggctctgatgagagaatgcaaagccccttatctggggtacttctcctctcctatggcatctggcacagctggtgcagaacctgggctggggcctggaagggcgtcttggaagatggtgcccacgggggctgttggccttttcctctggcgacttggggagtgtgcgcaggggacatccagcaggctgaaggaggcccagaggaacttgccccagttgttccttacgagatcaccctctacaccagtgatgtctttgctgctgggacagatgccaacatcttcatcatcatctatggctgcgatgccgtgtgcacccagcagaagtatctgtgtaccaacaagagggaacagaagcagttctttgagaggaagtctgcctgccgcttcatcgtagaggtacttgggctcagcaggctgtccagggatggagtagcagtgtatgagggtgtctggctcaatgaggctccttccagctctgatgttccagacacttatgactctggcccaggtcctagttcagccaggactgtcttccctgggcaccggcagttagtggtggtttattcgaaggaattagaaggtaataatgagtttcaggtagcagcgagaaagcagagtgtacacttcactcaaggggagcctcctgaaaccagaggcaaccatgttgtgttacaagatatgggggggaacaaaaaagttattccctactatgtgtcagtcaccactgggaagcacaaggacgcggccactgacagccgagccttcatctttctcatcggggaggatgatgaacgtagtaagcgcatctggttggactacccccgagggaagaggggcttcagccgtggctctgtggaggagttctacgtcgcaggcttggatgtgggcatcatcaagaaaatagagctgggccatgacggggcctcccctgagagctgctggctggtggaagagttgtgtttggcagtgcccacccagggcaccaagtacatgttgaactgtaactgctggctggccaaggacagaggcgacggcatcacctcccgtgtcttcgacctcttggatgccatggtggtgaacattggggtgaaggcctgcacagaatacttcaaacctcacagtgtcctggcagagattctagatgctgccagaaaagcatgcaacccccaccaggacaatgatgggaacatgaccgctgtgattaatagctccggtttggagggtgcagagaccttgactttcccatgcgatcggtggcttgccacctctgaggatgacaaaaagaccattcgagaactggttccatatgacatcttcactgagaaatacatgaaagatgggtccttacggcaagtctacaaggaagtagaagagcctctggacagaagcctttggatcctgcagaaacacactcaggaccattatcaggatccacagtcgtccttgaacagtggtgtggacatgaaggaaagctgtgggtttcctgcttgtttggaggagtctatcagagccaatttagaagtaacctcgccaggagagctggtggtcagcgggaaggtgtctgcctgtcaggcagggcctggccagatgcaccccacacctcgagactgctctccaccggcccagaacaagagctgggaacagtcaccccttttcatgaccctctgcggcatcaacgggagcacagagaagatgcagctggacaaaaagaaagccagaccatga

SEQ ID NO: 135127 - DNA, 570 bp, Homo sapiens
attcggcactccggaaggatagaaaatttctcttccaggacaaatggatggtacacctattacacctcttaaagatgggtttacagaggtccagctgtcctcagttaatcccccgtctttgtcaccaccaggaactacaggaattgaacagagtctgactggactttctattagctcaactccaccagctgtcagtagtgttctcagtacaggtgtaccaacagtaccgttattgccaccacaagtaaaccagtccctcacttctgtgccaccaatgaatccagctactacattaccaggtctgatgcctttaccagcaggactgcccaacctccccaacctcaacctcaacctcccagcaccacacatcatgccaggggttggcttaccagaacttgtaaacccaggtctgccacctcttccttccatgcgtccccgaaacttacctggcattgcacctgtgcccctgccatccgagttcctcactcactgtggatgtgacgccccccactgccaaggcccccaccaccgttgaggacagagtcggcgactccaccccagtcagcgaga

SEQ ID NO: 135128 - DNA, 2636 bp, Homo sapiens
ctacacttgctttgctgccggcctggatcccacacttgacaaggttgaggcaggtgtggagcagtgaggggtatgtgaacgagtgagcacaggttcttgcctctttgcacagccaggcacactggctgctgtggcagggtgggcagctccaggcactggcacaggcgctggctccatgtgacgctgcagctggacccgatataccacaagcggcttccactgggctcggccacaactgtgttccacaccagagtgggtgctagggatagggagaggccagggagtgggagcaggcacttctgagcttgtgggggaaggaggcttcctgagccctttacattgcatcacataggaatccacataatacctggttgacgcaacatcagtccaactgaccacaaagcaactaggggtttcagagggagtacacgtaaggggcaaaagcagcaacggaatacgacaacggaataagcatgaatacgacctggctacacacccggagaacagagagcttggtgtgtgttgagttcgctcctgttcatcagcagccctttccccgcctctggccaccagggggacctgcaaccaagtatgtgttctttcaggcgagcgggaacgcgtctgcataaatctagtccaatccagggccccgtagcaaggcgccaaagctgggggaagcgcatttctgttctctcgcgagcacgacgcggtgcctcccagtcctcctccggccctccctctccgccctcccggcccgcgagcgctcgggccccttccagtggctcgcggcaggtggcgctgtctgcggcgtcgcagcggcccgggctgcagcagagacgatctcccggcgggctgtgcggcccggctctccggcggcagcgagtgccacgtcccaagtgctacgcggaggattagagcaggcggtgcgctgggggcgggagcagcgcggagcccggctcggccacaccgatcgcccgccgccatgggctcctcgcaaagcgtcgagatcccgggcgggggcaccgagggctaccacgttctgcgggtacaagaaaattccccaggacacagagctggtttggagcctttctttgattttattgtttctattaatggttcaagattaaataaagacaatgacactcttaaggatctgctgaaagcaaacgttgaaaagcctgtaaagatgcttatctatagcagcaaaacattggaactgcgagagacctcagtcacaccaagtaacctgtggggcggccagggcttattgggagtgagcattcgtttctgcagctttgatggggcaaatgaaaatgtttggcatgtgctggaggtggaatcaaattctcctgcagcactggcaggtcttagaccacacagtgattatataattggagcagatacagtcattgaatgagtctgaagatctattcagccttatcgaaacacatgaagcaaaaccattgaaactgtatgtgtacaacacagacactgataactgtcgagaagtgattattacaccaaattctgcatggggtggagaaggcagggattgggtctgggtgggtcgccatcttgaaaatctggatgggcagagatctagcaaaggaagctcagcaggaggccagagggaaaaccaagcttcaagaaatcgaacacagtcagccatgtcaggtagtgcagagaagtcaggtgaaaggagtgaaaaaaaccatgtcctgggcgagagcaatttcagagacttgccaggggacaaacaaactgcaggaactacaggaattgaacagagtctgactggactttctattagctcaactccaccagctgtcagtagtgttctcagtacaggtgtaccaacagtaccgttattgccaccacaagtaaaccagtccctcacttctgtgccaccaatgaatccagctactacattaccaggtctgatgcctttaccagcaggactgcccaacctccccaacctcaacctcaacctcccagcaccacacatcatgccaggggttggcttaccagaacttgtaaacccaggtctgccacctcttccttccatgcctccccgaaacttacctggcattgcacctctccccctgccatccgagttcctcccgtcattccccttggttccagagagctcttctgcagcaagctcaggagagctgctgtcttccctcccgcccaccagcaacgcaccctccgaccctgccacaactactgcaaaggcagacgctgcctcctcactcactgtggatgtgacgccccccactgccaaggcccccaccaccgttgaggacagagtcggcgactccaccccagtcagcgagaagcctgtttctgcggctgtggatgccaatgcttctgaggaggacgtggctgaggtggcagcaccctcacatcaccctcatgtcactcacccctggccgccctgctggacactcgaggtcaacgccagcccagcactctcccaggaggcccagtaccagccagttttgggagtagatccgtttctggggccagaaaagccagtttcagtctttaacagtggtagatttggtaccaggttccagaaacacgatgtaagagagagtttccctgacagtgggccactctccgtggccttgtag

SEQ ID NO: 135129 - DNA, 2533 bp, Homo sapiens
  misc_feature (1)...(2533): n = a,t,c or g
acagctttttttgttttttttttttcttatacctaaaacagggatatctgcatttaatttcattcagtaaatcaattccagttaacttaccatctcttaaaaatgggagaaagcaaacataggacgtgaaaagttaaagatgcgtgacatactggagagtaataagacatactggagagtagtaagtgcacacgtggcaattaagggttgtaaatttaagatgtaaacacaaggaaaaaaagtaaaaattactgtaactttattgcctgtatcctatgcctttcccccagtaatagcctanaaatacctacaagggaggcccccacccccaaaagaagaaaaagtgcccaccttctggtttaaaactgtggcaccttgatttctttttgaaatgtcactttataaggtgtatgtagaaagcaaccagcagccgtttacaaaatgtttgtctgagttgattctgagagctccaaaacaagggatccgcgtataggctgaagaaaaaagacggttcaggttaaccagtgcgccgctgtaggaacttttaacacaagtcttccaggtggaatttcctgtgtaaaccctaagtaagaagatgcgactcacggaggaccaaaaggtaaaaatctcttttaccggtttacaagtttaagtgagggtgggtctgcattctccgcaaaacgactttacaaaggtacaaggaaatgttgcgtgtgaggtattaggcatagaatatttcattttccttaccggaagggagcagcacggggacaggaaacctagtggacgccccgccaccacctttcccgaagatgcacaccccccagggaacgggcagtgcaaagcctgggcagcaagccacccttacaattctttttggttgtttaaaatacaagggctttctgacatcctcaccctaggcgtgtgagccccactcaacctgggcagggntacaacccacgtcctcgtttagttttcccccttgggaatttttttacagggatgcctgacagatacgggtacaaactagtatgaaattaatgatagtttgcgtttccagaaacggcccccgtggttaaatataccacccccatttccaaagaaaggttcaaagttaagggtgactcagaagcattggcatcccacagccgcaagaaaacaggcttctcgctgaactggggtggaatcgcccgactctgtccctcaacggtggtgggggccttggcaggtggggggcgtcacatccacagtgagtgaggaggcagcgtctgcctttgcagtagttgtggcagggtcagagggtgcgttgctggtgggcgggagggaagacagcagctctcctgagcttgctgcagaagagctctctggaaccaaggggaatgacgggaggaactcggatggccagggggaagaggtgcaatgcccaggtaagtttcggggaggcatggaaggaagaggtggcaaaaccccgggtttaacaaattcctggtaaagcccaacccccggccatgaatgtgtggtgcctgggaaggttgaaggttgaaggttggggaaggttgggcagtccctgcctggtaaaaggcatcagacccggtaaatgtaagtagctggattccattggtggcacagaagtgagggactggtttacttgtggtggcaataactggtactgttggtacacctgtactgagaacactactgacagctggtgggagttgagctaatagaaagtccagtcagactctgttcaattcctgtagttcctggtggtgacaaagacgggggattaactgaggacagctggacctctgtaaacccatctttaagaggtgtaataggtgtaccagccatttgtcctggaagagaaattttctttccttcctcaaatgggcgtgtaggtattcgatgcaaataaccatatccaatgccacatcctaggctgccttctccaccccatgcagaatttggtgtaataatcacttctcgaccgttactcacgtgtctgtgttgtacacatacagtttcaatggttttgcttcatgtgtttcgataaggctgaatagatcttcagactcattcatgactgtatctgctccaattatataatcactgtgtggtctaagacctgccagtgctgcaggagaatttgattccacctccagcacatgccaaacattttcatttgccccatcaaagctgcagaaacgaatgctcactcccaataagccctggccgccccacaggttacttggtgtgactgaggtctctcgcagttccaatgttttgctgctatagataagcatctttacaggcttttcaacgtttgctttcagcagatccttaagagtgtcattgtctttatttaatcttgaaccattaatagaaacaataaaatcaaagaaaggctccaaaccagctctgtgtcctggggaattttcttgtacctccttcaggtagccaggtcgtattcatgcttattccgttgtcgtattccgttgctgcttttgccccttacgtgtactccctctgaaac

SEQ ID NO: 135130 - DNA, 1693 bp, Homo sapiens
gagactgggtctcgctctgtcgcccaagctggaatgcagaacaacactgtgtcaaaataaataagtaaataaaaggggatttaattttaaaaattaaataatatataaaaataaaagtgatctgagaaagacatattgtaacatattgggctcatatccggctcagcagcacagttctagaaatttaagacaaattctgaggttggtatagaaatacttaccagtcaaaagcacagcctaaggccttcacacaccataaaatcagtgaaactaattgcggttcttcagcatctgcggagcactggctaccagtaaggagaaagttggggatgcagataatcagtgcaccctgagaggacagtgcacctcccgccgtagcctgagagggatcggcccgattggccacgctccttcaaaccaccactttcccccgaaaaagggacgaaagcctcagcccgtagccaagaggcgagcgcggccggtgcccccggggctgccaggggccccgaagcaggcggcgctgactcccggacgccgcccgctcacacccgccgcctttgcacccaaggcctcgcgcgaccagcagaccctgccagaacattgccccaatgccctccacctggaaacttccccagtccttggaccaggccagctgggcctctttatccctgaaagcctgccactttctcttttggttccatctggaaaaagaacgtgtatgggcatcatagccaacaggaagatgagcccctgctttgtgcaagtctctgagcccgcatggagggagcatgggggctcagaacagttctttctggggcaaggttggtccttcagcgtcaagattcctgggccacttattaatagaaggcaccaggacacagaaattacaaagttcaagggttttagtgaggccacgactcagggagcccttgagagccaagctggcatcccactgctgtgcacacccagcctgggcacacagtatgaccctgcccaggcatctgcctgcggccgtctggtgaatgaccagaaacagaaccgaaagctctgtaaagtgctctcaagcagcgtccgttccgaggggctgagcacctactacctgcaagcccagcacaggcgcttcacacccccttcctaccccatggcaatgcctgagagctatagatggatctgtttcctcatccgtaaaatgggggtaagaacagtccttagcccatctgagttttgtgaggactaccgagtgaagatgtgtcaggacttagacccctgcctggcagctagcagctctccaacctctgtacctctccccgaacgcaggcccccctgcccgcaccccaacacttcaagacctcctaggagtgacctggctggggtctctctaggtcaggagttccctacccatctacggctgctgcacaccccaaccgtgcccgtggccctccacacctctgcccacactgtccccaatgccagcaacgcccctgcaactccccactgcctagaaaacctgtattcttccttccagtctcagctcagacttctttcctctcaaagtgcctctggactgccctgtctggcttttcataataggggtgacaccagcacctcacagtgttgtggtgaggatgaagtaagaaaaacacaaactgcctgggaagctgcttctgtcatcatcgccatgaggatgctctga

SEQ ID NO: 135131 - DNA, 2994 bp, Homo sapiens
gcatggtcgactacacgcccaaataagaagccacctctaagcaaaatagctatatgtataaacggagggcgaatatatacaagtatatatatatgtatattacagacgcacaggtttacacccggtgaactttttctttttctttttctttttcctttttttttaagaaaaactagtgacattggagagaaggacgcttcctctctatcttttggcgcattagtgaagggggtattctattttgttaaagcgcccaaggggaccgggaaccttggagagaagagtggggaggaaagaggaagggtgggtggggggcagagggcgagtcggcggcggcgagggcaagctctttcttgcggcacgatgccgtctctgctggtgctcactttctccccgtgcgtactactcggctgggcgttgctggccggcggcaccggtggcggtggcgttggcggcggcggcggtggcgcgggcataggcggcggacgccaggagagagaggcgctgccgccacagaagatcgaggtgctggtgttactgccccaggatgactcgtacttgttttcactcacccgggtgcggccggccatcgagtatgctctgcgcagcgtggagggcaacgggactgggaggcggcttctgccgccgggcactcgcttccaggtggcttacgaggattcagactgtgggaaccgtgcgctcttcagcttggtggaccgcgtggcggcggcgcggggcgccaagccagaccttatcctggggccagtgtgcgagtatgcagcagcgccagtggcccggcttgcatcgcactgggacctgcccatgctgtcggctggggcgctggccgctggcttccagcacaaggactctgagtactcgcacctcacgcgcgtggcgcccgcctacgccaagatgggcgagatgatgctcgccctgttccgccaccaccactggagccgcgctgcactggtctacagcgacgacaagctggagcggaactgctacttcaccctcgagggggtccacgaggtcttccaggaggagggtttgcacacgtccatctacagtttcgacgagaccaaagacttggatctggaagacatcgtgcgcaatatccaggccagtgagagagtggtgatcatgtgtgcgagcagtgacaccatccggagcatcatgctggtggcgcacaggcatggcatgaccagtggagactacgccttcttcaacattgagctcttcaacagctcttcctatggagatggctcatggaagagaggagacaaacacgactttgaagctaagcaagcatactcgtccctccagacagtcactctactgaggacagtgaaacctgagtttgagaagttttccatggaggtgaaaagttcagttgagaaacaagggctcaatatggaggattacgttaacatgtttgttgaaggattccacgatgccatcctcctctacgtcttggctctacatgaagtactcagagctggttacagcaaaaaggatggagggaaaattatacagcagacttggaacagaacatttgaaggtatcgccgggcaggtgtccatagatgccaacggagaccgatatggggatttctctgtgattgccatgactgatgtggaggcgggcacccaggaggttattggtgattattttggaaaagaaggtcgttttgaaatgcggccgaatgtcaaatatccttggggccctttaaaactgagaatagatgaaaacccgaattgtagagcatacaaacagctctccctgcaaatcatccaggtggcctagaagaatcggccagttgacaaggaattgtcgtgggggctttactaggagctggcttgctaatggccttctactttttcaggaagaaatacagaataaccattgaagaggcgaacccaggcaagaagaaagtgaccctgggaaaacctcgggaaattacgggaaggaatcccttcggatcccattttttcagtagcttaaaagaaagcccccccccactttttttttttctgcttgagatttctttaaagagaatagacggggtttaaagacatccaaatgaaccagaagggggcgttcttgaagaatttcataatttaaagcagttagtaatttcattttaaaatttctgtagaagctcaagaatttatgattaatcaccatctgcctccaggcctttcatctcatgacaaacaaatataataatgatatcgtgtcactctgttaaatgttccatactgtttcaagcccatatgattagatttatgtttttaaaatctgttgtctccatatcttgatggcttttgggagcatttcacacaaggatataaaatgcggttttcttaaatgaaatgttttgtagctagaataaaatcatttttacaagtacagcattcttggaaagaatttaacacccaaaaaggggaaaatgtaatgaaaaatctcaaggttggaaatacagccttactctctctagagctggaggacaggtttgtggttgaggacttctctgtccgatgtctacattcaggttctgacttcatatcttgaaaaaggatttcctccctgtctttttcagtgtctcataaacgctactctggattgttgtaaatattagtgagatgggaggatttacagaagaaaagcaagtcaaaaatatttaactttttgatgtaaaaaaaaaaagccctatttcgcactaacattttattttacaagtattttaatcttatattttggtattagaaaaatttgtctattttttcattttgaagattaaatgttgcttacattttaaaagcatgggtgaagtgtacaacaaaccaataatgataaaaaatacttctctttttctccctgtttccctttttcccttggccacagccaaatgctaattgctgctttaattacagagatgtgtaaatgtattcagattacaaactctacaggaatacatcaacaccttaactctaa

SEQ ID NO: 135132 - DNA, 733 bp, Homo sapiens
  misc_feature (1)...(733): n = a,t,c or g
tttcgttgacattctgcgcacgctctaccacgagcacatcatcaagtacaagggctgctgcgaggaccaaggtgggcgggacccggcgagtcctagagactcgagggggcgtggctagagcgtgggtgtggccttgtgggcggggccagtctggcctagccaattagagactctcaaccccaggctgcagtacgcggttcttggcatctgggtgagcgtggctgggctgcctccttcccatctgggggagtgctaccctattgggcccagaatgaacggaagccaccaccagctccctccaagtaaggaatggggttctgattgggtccatcccacctgagacctgggtctagtgtgcgcgggtcttggccttccctcccgaccttggaggggctctgctgggctcaaggtaggcggtccccggcccgccctctatcgtcccccaccggggccgcccctctccgcggcaggcgagaagtcgctgcagctggtcatggagtacgtgcccctgggcagcctccgagattacttgccccggcacaagcatcggcttggcccagctgctgctcttcgcccagcagatctgcgaggttggtcggcnccgcccctgcttctggagcttgccccttcctcttcagcttgggctggcctgagcgatccggtgcagtctgctctcacgctccgcccctgctcgtttgcccaggctgtcttgtccttgcactgaccctgtatt

SEQ ID NO: 135133 - DNA, 1026 bp, Homo sapiens
atgttgtccaggctggtcttgaactcccgggctcaagtgatcttcccgcctcggcctcccaaacaggaaaaagttttcttacctctagaatcggatcctggggtagctgtggctggctttgtgactcccaagtgtgggcctgctggggaaaggatcggggtcaggcctttacccaccgcaactcttccagatcttgctgacgtcttgactgtgaacccggactcaccggcgtcggaccctacggttttccacaagcgctatttgaaaaagatccgagatctgggcgagggtcacttcggcaaggtcagcttgtactgctacgatccgaccaacgacggcactggcgagatggtggcggtgaaagccctcaaggcagactgcggcccccagcaccgctcgggctggaagcaggagattgacattctgcgcacgctctaccacgagcacatcatcaagtacaagggctgctgcgaggaccaaggcgagaagtcgctgcagctggtcatggagtacgtgcccctgggcagcctccgagactacctgccccggcacagcatcgggctggcccagctgctgctcttcgcccagcagatctgcgagggcatggcctatctgcacgcgcagcactacatccaccgagacctagccgcgcgcaacgtgctgctggacaacgacaggctggtcaagatcggggactttggcctagccaaggccgtgcccgaaggccacgagtactaccgcgtgcgcgaggatggggacagccccgtgttctggtatgccccagagtgcctgaaggagtataagttctactatgcgtcagatgtctggtccttcggggtgaccctgtatgagctgctgacgcactgtgactccagccagagcccccccacggtctatcatctcatgaagaactgctgggagacagaggcgtcctttcgcccaaccttcgagaacctcatacccattctgaagacagtccatgagaagtaccaaggccaggccccttcagtgttcagcgtgtgctga

SEQ ID NO: 135134 - DNA, 4294 bp, Homo sapiens
gttcgagcttgtgttcccccggaagggtgagtctggacgcgggcgcggaaggagcgcggccggaggtcctcaggaagaagccgcggggactggctgcgcttgacaggctgcacttggatgggagcacctggtgcctcgggactgctccgatgcccgggtctgtgctgaatgtgtaatatgcggaactatattgaaacattacaaccatcttttgatggcaacaccctgaggaccttcccttttccagatggggaaactgaggcccagaattgctaagtggcttgcttgagttgacacagggagctccaggactcaccctcagctgagccacctgccgggagcatgcctctgcgccactgggggatggccaggggcagtaagcccgttggggatggagcccagcccatggctgccatgggaggccctgaaggtgcttctgcactgggctggtccaggcggcggggagccctgggtcactttcagtgagtcatcgctgacagctgaggaagtctgcatccacattgcacataaagttggtatcactcctccttgcttcaatctctttgccctcttcgatgctcaggcccaagtctggttgcccccaaaccacatcctagagatccccagagatgcaagcctgatgctatattttccgccataggttttattcccgggaactggcatggcatgaatcctcgggaaccggctgtgtaccgttgtgggcccccaggaaccgaggcatcctcagatcagacagcacaggggatgcaactcctggacccagcctcatttgagtacctctttgagcagggcaagcatgagtttgtgaatgacgtggcatcactgtgggagctgtcgaccgaggaggagatccaccactttaagaatgagagcctgggcatggcctttctgcacctctgtcacctcgctctccgccatggcatccccctggaggaggtggccaagaagaccagcttcaaggactgcatcccgcgctccttccgccggcatatccggcagcacagcgccctgacccggctgcgccttcggaacgtcttccgcaggttcctgcgggacttccagccgggccgactctcccagcagatggtcatggtcaaatacctagccacactcgagcggctggcaccccgcttcggcacagagcgtgtgcccgtgtgccacctgaggctgctggcccaggccgagggggagccctgctacatccgggacagtggggtggcccctacagaccctggccctgagtctgctgctgggcccccaacccacgaggtgctggtgacaggcactggtggcatccagtggtggccagtagaggaggaggtgaacaaggaggagggttctagtggcagcagtggcaggaacccccaagccagcctgtttgggaagaaggccaaggctcacaaggcagtcggccagccggcagacaggccgcgggagccactgtgggcctacttctgtgacttccgggacatcacccacgtggtgctgaaagagcactgtgtcagcatccaccggcaggacaacaagtgcctggagctgagcttgccttcccgggctgcggcgctgtccttcgtgtcgctggtggacggctatttccgcctgacggccgactccagccactacctgtgccacgaggtggctcccccacggctggtgatgagcatccgggatgggatccacggacccctgctggagccatttgtgcaggccaagctgcggcccgaggacggcctgtacctcattcactggagcaccagccacccctaccgcctgatcctcacagtggcccagcgtagccaggcaccagacggcatgcagagcttgcggctccgaaagttccccattgagcagcaggacggggccttcgtgctggagggctggggccggtccttccccagcgttcgggaacttggggctgccttgcagggctgcttgctgagggccggggatgactgcttctctctgcgtcgctgttgcctgccccaaccaggagaaacctccaatctcatcatcatgcggggtttcttgttccagccccaggacactcaacctcagccagctcagcttccaccgggttgaccagaaggagatcacccagctgtcccacttgggccagggcacaaggaccaacgtgtatgagggccgcctgcgagtggagggcagcggggaccctgaggagggcaagatggatgacgaggaccccctcgtgcctggcagggaccgtgggcaggagctacgagtggtgctcatagtgctgcaccctagtcaccatgacatcgccctggccttctacgagacagccagcctcatgagccaggtctcccacacgcacctggccttcgtgcatggcgtttgtgtgcgcggccctgaaaatatcatggggacagagtacgtggagcacggacccctggatgtgtggctgcggagggagcggggccatgtgcccatggcttggaagatggtggtggcccagcagctggccagcgccctcagctacctggagaacaagaacctggttcatggtaatgtgtgtggccggaacatcctgctggcccggctggggttggcagaaggcaccagccccttcatcaagctgagtgatcctggcgtggagcctgtgcgccctctccagggaggagcgggtggagaggatcccctggctggcccccgaatgcctaccaggtggggcctccagcttaagctccgccatggacaagtgggggtttggcccctccctcctggagatctgctttgacggagaggcctctgtgaagagccgcagtccctccgagaaggagcatttctaccagaggcagcaccggctgcccgagccctcctgcccacagctggccacactcaccagccagtgtctgacctatgagccaacccagaggccatcattccgcaccatcctgcgtgacctcacccggctgcagccccacaatcttgctgacgtcttgactgtgaacccggactcaccggcgtcggaccctacggttttccacaagcgctatttgaaaaagatccgagatctgggcgagggtcacttcggcaaggtcagcttgtactgctacgatccgaccaacgacggcactggcgagatggtggcggtgaaagccctcaaggcagactgcggcccccagcaccgctcgggctggaagcaggagattgacattctgcgcacgctctaccacgagcacatcatcaagtacaagggctgctgcgaggaccaaggcgagaagtcgctgcagctgggcatggagtacgtgcccctgggcagcctccgagactacctgccccgtcacagcatcgggctggcccagctgctgctcttcgcccagcagatctgcgagggcatggcctatctgcacgcgcagcactacatccaccgagacctagccgcgcgacaacgtgatgctggacaacgacaggctggctcaagatcggggactttggcctagccaaggccgtgcccgaaggccacgagtactaccgcgtggggcgaggcatggggacagccccgtgttctgggtatgccccagagtgcctgaaggagtactaagttctactatgcgtcagatgtctggtcccttcggggtgagcctgtatgatctgctgacgcacatgtgactccagcccagagccccccccacgatattcccttgaggctcataggcattgctcagggtcagatgacagttctgagacttcactgagtttgctggaaacgaaggggaaaaggctgccacggcccgacaaatgtccctgtgaaggtctatcatctcaatgaaagaactgctgggagacagaggcgtccttttcgccccaaaccttcgagaaccttcatacccattctgaaagaaagtcccatgagaaagtacccaaaggcccaggcccccttcaagtgttcaaacgtgtgctgagggcacaaatgggaagccctgccctgggaaggactggaccgagcaagtgggctgccagcaggagccttcttgctccctggctccaaggaatgaaacccaagaggggggatgtcagcctcacccacaccgtgtgccttacttcctgtctagagaccccacctttgtgaaacttatttttctttcttgggccgtgagcctaaccatgatctttgagggacccaacatttggtaggggcactaaatccagccctttaaaaatcccccagcttccaaacttgaggcccaccatctccaccatctggtaataaactcatgttttctctgaaaaaaaaaaaaaaagggcggccgct

SEQ ID NO: 135135 - DNA, 819 bp, Homo sapiens
atgccctccctccaggccctgctgcccgggagcccagcacccaccctggtggggagcagacagcacgtgctcctgccgcaagcagcactttctgggcttctgggcttccagctgcagtccccgctagcccctcccggcccctggccattacagcccattgcaggctgggaggctaaacaggaggccggggtcaccgaccagggttggttcactgctgggccctgtggacttgttctcatgctttgtcagtgtcgatgtcgaaagcccaaagtgtttcccaagtcctgctaccttgcccgtgtgagcgtgttgttggccgtgtgctgtgtgtacgtggaactctgtcccgtggtctcacactcagcccgtgtgagcgtgttgttggccgtgtgctgtgtgtacgtggaactctgtcccgtggtgtcacactcagcccgtgtgagcgtgttggccgtgtgctgcggctgcagcaagcagaccttcgcatcaacacagcagacaccaaaaaccagtgagagccccgctctctaccgcccggccccagcactcgctagctttcctgacacctggaactgtgcacctggcaccaagcggaaaataaactccaagcagccagtagccccgatgatgagtaaagaatgtcaattcctggcaggtcccagaatcttaagataccttagggacctcaagaagagaggaattcccctaaatctgtacttattgcaggcaaagtctgatggcaagtctttgcgatggcttcctagcctcaagaggcttttaaaagcccaatctcagattccttataaaaagttccagtag

SEQ ID NO: 135136 - DNA, 911 bp, Homo sapiens
ctactggaactttttataaggaatctgagattgggcttttaaaagcctcttgaggctaggaagccatcgcaaagacttgccatcagactttgcctgcaataagtacagatttaggggaattcctctcttcttgaggtccctaaggtatcttaagattctgggacctgccaggaattgacattctttactcatctgtaagggaaccacgtatgtgaggtaccaggccagcttttttccaaggggctttattggaccatgcagtcaaccctaactcctttagtcgtatctgaaaatagggcacaattgaaaacattggttatattaccaagtctttgactggaatgtcctattttcaattgtgcccatcggggctactggcctgcttggaagtttaattttccggcttggttgcccaggtgcacaggttccaggtgtcaggaaaagcttagcgagtgctggggccgggccggtaggagagcggggctctcactgggtttttggtgtcttcctgtgtggatgcgaaaggtctgctttgctgcagccgccctaagttaacagggtggggggtgggaggtggggaggggggcgagggatgcggagtggggagaggggcggggaggggctctggtggactagcgcctccgcaggccgtggggctcggtggtaaccgctcaggtcaggacgggggcccagcgctgtgctgtggtggactgatccgccgtgcttgctcctcgcgggatgccgaggcagtccaaaagggggcatgctgcgtgaaggcctgggcagtttcccgattgtctgcgggtggcagatacttggtgcttgagtggatcgtgctgttccgaaaaagaagtggcccccgaatgtgccgggtatcctttgtgaaacctgggggtgcgaatgtcctcccc

SEQ ID NO: 135137 - DNA, 1236 bp, Homo sapiens
atggatgggagtgggggctaccggaaggagaaaagacccactgttttctgtcttcattccagccccccggaagccagcagtcaaaaaagaagtgaaggaagaggagccagggctccaggaaaggagggagctgctgagggacccctggatccatctggtacaatcctgccaagaacaactatcatcccgtggaagatgcctgctggaaccgggccagaaggttcttacctggctgtggcccggacgtttgagaagatcgaggaggtgtctgctgctccggatggtggagacgctgagcaacttgctgcgctccgtggtggcctgtcgcctccagacctcctccctgtcctctacctcagcctcaaccacctgggccaccccagcagggcctggagcttggcgtgggtgatggtgtccttccaaggcagtggcccaggccacagctcttcacccaggcgcccatgggacccagctctggacatgaccttgtcccgcctgtgctttaaatcccatccgcgccctgatgacaccggcccagatgtctccccgagtgtggtcatgctcgttcatccaccgctttcctggctccacgtgcattttgctgacttcctacagccagcgtggctgggggcacgttccccaagcctttctaccaagtggtccacagccaagaagatagacatcatcaaaggcctctttgtgcctgccgccactcagaagcccggttcatcgctagggcagctgagatgggaggtgctggtgcacctacttgtgcccctccccgtctatgctagtgggcaggatcattactgcctggctcagtttcctcatcgtcacatggggctgtgtgatatctggggtcccttccaggctctgaagatcttctggtttttgaggagagggtctacatacatcaaggtcgaggagatcgagaagggaggaggcaagattggggaggtccctgagcggacggctgcgccttgggctggagagcagtcggtgctggctgccctctcccaggcagtgagcctcacgccccgggccaagggatcccctgaaaccaatgttggcccatcccacccggggcatcagcgaggtccgaaacgctttgaggaggcagctttcacctgcgaatacaaatatgacgggagagggcacaggtatggggagtgggacatgtcccttccacagacaggaaacgtcaaagagcaggggtgtggggtcactgaggcctga

SEQ ID NO: 135138 - DNA, 822 bp, Homo sapiens
atgcagcaagatccacgccctggaaggcgggaggtgaagatcttcagcaggaatcaggaagacaacactgggaagtaccggacatcatcagccgcatccccaagattaaactcccatcggtcaatccttcatcctggacaccgaagccgtggcttgggaccgggaaaagaagagatccagccattccaagtgctcaccacccgcaaacgcaaggaggtggatgcgtctgagatccaggtgcagctgctccgggagaactttgtggagacagaggcgagtttgtcttcgccacctccctggacaccaaggacatcgagcagatcccgagttcctggagcagtcagtgaaagactcctgcgaggggcgatggtgaagaccctggatgttgatgccacctacgagatcgccaagagacgcacaactggctcaagtgttgtatatgccctaagcaatatggcaacaggacctgaatgcccgcacaagagttttcaacttggaactggcttcagtgatgaggagctggaggagcataccagagcctcaaggcgctggtgctgcccagcccacgcccttactgcggatagatggcgctgtgattcccgaccactggctggaccccagcgcgtgtgggaggtggatagtgacaaggcatctcccttcgcttccctcggtttattcgagtccgtgaagacaagcgccggagcaggccaccaccagtgctcaggtggcctgtttgtaccggaagcaaagtcagatcagaaccaacaaggcgaggactcaggctctgaccctgaagatacctacaagccctcgccctcctag

SEQ ID NO: 135139 - DNA, 387 bp, Homo sapiens
tccacagccaagaagatagacatcatcaaaggcctctttgtgcctgccgccactcagaagcccggttcatcgctagggcagctgagatgggaggtgctggtgcacctacttgtgcccctccccgtctatgctagtgggcaggatcattactgcctggctcagtttcctcatcgtcacatggggctgtgtgatatctggggtcccttccaggctctgaagatcttctggtttttgaggagagggtctacatacatcaaggtcgaggagatcgagaagggaggaggcaagattggggaggtccctgagcggacggctgcgccttgggctggagagcagtcggtgctggctgccctctcccaggcagtgagcctcacgccccgggccaag

SEQ ID NO: 135140 - DNA, 367 bp, Homo sapiens; identical to SEQ ID NO: 109714

SEQ ID NO: 135141 - DNA, 1260 bp, Homo sapiens
atgaagaagaaaatgatgatccacgccctggaaggcggggaggtgaagatcttcagcaggaatcaggaagacaacactgggaagtacccggacatcatcagccgcatcccccaaggtgggcgtctgcctcacacttgcactctgccagggtctgtgattaaactcccatcggtcacatccttcatcctggacaccgaagccgtggcttgggaccgggaaaagaagcagatccagccattccaagtgctcaccacccgcaaacgcaaggaggtggatgcgtctgagatccaggtgcaggtgtgtttgtacgccttcgacctcatctacctcaatggagagtccctggtacgtgagcccctttcccggcgccggcagctgctccgggagaactttgtggagacagagggcgagtttgtcttcgccacctccctggacaccaaggacatcgagcagatcgccgagttcctggagcagtcagtgaaagactcctgcgaggggctgatggtgaagaccctggatgttgatgccacctacgagatcgccaagagatcgcacaactggctcaagctgaagaaggactaccttgatggcgtgggtgacaccctggacctggtggtgatcggcgcctacctgggccgggggaagcgggccggccggtacgggggcttcctgctggcctcctaccgaccgaggacagtgaaggagctgcaggccatatgcaagcttggaactggcttcagtgacgaggagctggaggagcatcaccagagcctcaaggcgctggtgctgcccagcccacgcccttacgtgcggatagatggcgctgtgattcccgaccactggctggaccccagcgctgtgtgggaggtgaagtgcgctgacctctccctctctcccatctaccctgctgcgcggggcctgaagtcagtaatgcctactactggtgagtatatggagcacaaatcagacgaaggaaacaccccgcagcctgcacatgctcagatggagctctgggcccgcgggttctactgcgcaggccctcacactcagcaaagggacttggacgcgaaagcgctggtggcgctcagccggctgggagttgtagctttctggctgctacagcaggagatacaggtggccaatgggagagagctgtcttttgaagaaatccatcgcacgaaaagcaggcgagagaggggaaacctgacattgtttgagcccctgcagtcagctgccatcaaagcctttgacttcgcatga

SEQ ID NO: 135142 - DNA, 3178 bp, Homo sapiens
tttcgtcgcgaacttgggactgcagaggcgcgcctggcggatctgagtgtgttgcccgggcagcggcgcgcgggaccaacgcaaggagcagctgacagacgaagaaaagtgctggacaggaagggagaattctgacgccaacatgcagcgaagtatcatgtcatttttccaccccaagaaagagggtaaagcaaagaagcctgagaaggaggcatccaatagcagcagagagacggagccccctccaaaggcggcactgaaggagtggaatggagtggtgtccgagagtgactctccggtgaagaggccagggaggaaggcggcccgggtcctgtgcagcgaaggggaagaggaggatgaagcccttagccctgctaaaggccagaagcctgcccttgactgctcacaggtctccccgccccgtcctgccacatctcctgagaaacaatgcttccctctctgacacctctcccatggacagttccccatcagggattccgaagcgtcgcacagctcggaagcagctcccgaaacggaccattcaggaagtcctggaagagcagagtgaggacgaggacagagaagccaagaggaagaaggaggaggaagaagaggagaccccgaaagaaagcctcacagaggctgaagtggcaacagagaaggaaggagaagacggggaccagcccaccacgcctcccaagcccctaaagacctccaaagcagagaccccgacggaaagcgtttcagagcctgaggtggccacgaagcaggaactgcaggaggaggaagagcagaccaagcctccccgcagagctcccaagacgctcagcagcttcttcaccccccggaagccagcagtcaaaaaagaagtgaaggaagaggagccaggggctccaggaaaggagggagctgctgagggacccctggatccatctggttacaatcctgccaagaacaactatcatcccgtggaagatgcctgctggaaaccgggccagaaggttccttacctggctgtggcccggacgtttgagaagatcgaggaggtgtctgctcggctccggatggtggagacgctgagcaacttgctgcgctccgtggtggccctgtcgcctccagacctcctccctgtcctctacctcagcctcaaccaccttgggccaccccagcagggcctggagcttggcgtgggtgatggtgtccttctcaaggcagtggcccaggccacaggtcggcagctggagtccgtccgggctgaggcagccgagaaaggcgacgtggggctggtggccgagaacagccgcaggcacccagaggctcatgctgccaccacctccgctcactgcctccggggtcttcagcaagttccgcgacatcgccaggctcactggcagtgcttccacagccaagaagatagacatcatcaaaggcctctttgtggcctgccgccactcagaagcccggttcatcgctaggtccctgagcggacggctgcgccttgggctggcagagcagtcggtgctggctgccctctcccaggcagtgagcctcacgcccccgggccaagaattcccaccagccatggtggatgctgggaagggcaagacagcagaggccagaaagacgtggctggaggagcaaggcatgatcctgaagcagacgttctgcgaggttcccgacctggaccgaattatccccgtgctgctggagcacggcctggaacgtctcccggagcactgcaagctgagcccaggggattcccctgaaaccaatgttggcccatcccacccggggcatcagcgaggtcctgaaacgctttgaggaggcagctttcacctgcgaatacaaatatgacgggcagagggcacagatccacgccctgggaaggcggggaggtgaagatctttcagcaggaatcaggaagacaacactggggaagtacccggacattcatcagccgcatccccaagatttaaattcccttcggttcacatcctttcatcctggggacacccgaagccgtggctttgggggacccggggaaaagaagcagttcccagccttttccaagttgtttaaccaccccgcaaacgcaaggaggtggatgcgtctgagatccaggtgcaggtgtgtttgtacgccttcgacctcatctacctcaatggagagtccctggtacgtgagcccctttcccggcgccggcagctgctccgggagaactttgtggagacagagggcgagtttgtcttcgccacctccctggacaccaaggacatcgagcagatcgccgagttcctggagcagtcagtgaaagactcctgcgaggggctgatggtgaagaccctggatgttgatgccacctacgagatcgccaagagatcgcacaactggctcaagctgaagaaggactaccttgatggcgtgggtgacaccctggacctggtggtgatcggcgcctacctgggccgggggaagcgggccggccggtacgggggcttcctgctggcctcctacgacgaggacagtgaggagctgcagccccatatgcaagcttggaactggccttcagtgatgaggagctggaggagcatcaccagagccctcaaggcgcgtggtgctgccccagccccagccccttacgtgcgggatagatggccgctgtgattcccggacccacttgcctggacccccagcgcttgtgtgggaggtgaagtgcgctgacctctccctctctcccatcctaccctcgtgcgcggggcctggtggaataagtgaccaagggccatctccccttcgcttcccctcggtttattcgagtcccgtgaagacaagccagccggaagcaggcccacccacccagtgtctcaggtggccctgtttgtacccggaagcaaagtcaagatttcaagaaccaacaaaggcgaggacttcaggctcttgaccctgaaagataccttactaaagccctcggccctccctagggccctgggtacagggcaatgaagttggacggaccccaagggttattattgcctttgctttttagcaaatctgctgtggcaggctgtggattttgagagtccaggggaggggtgtgtgtgtgagggggtggcttactccggagtctgggattcatcctcgtcatttctttcaataaataatatatcggataaaaaaa

SEQ ID NO: 135143 - DNA, 403 bp, Homo sapiens
cccggagccgaaacaccggtaggagcggggaggtgggtactacacaaccgtctccagccttggtctgagtggactgtcctgcagggtgaagttgaacaaattgctatgatgaaaccaaaaggccagactgaacacgatgagggtatgcttgaatatttagaagatataattggttgtggacggctaaatgaacctattaaagtcttgtgtcggagagttgaaatattaaatgaacacagaggagagaagttaaacagggtaaagatggtggaaaaggaaaaggatgccttataaggagagaaaaacatagctatcgaatttcttaccttggaaaatgaaatatttagaaaaaagaatcatgtttgtcaatattatatttatgagttgcagaaacgaattgctg

SEQ ID NO: 135144 - DNA, 637 bp, Homo sapiens
  misc_feature (1)...(637): n = a,t,c or g
ttacagggtgaagttgaacaaantgctatgatgaaacaaaaggcccagactgaacacgatgaggttaaacagggtaaagatggtggaaaaggaaaagnatgccttagaaggagagaaaaacatagctatcgaatttcttaccttgganaatgaaatatttagaanaaagaatcatgtttgtcaatattatatttatgagttgcagaaacgaattgctgaaatggaaactcaaaaggaaaaaattcatgaagataccaaagaaattaatgagaagagcaatatactatcaaatgaaatgaaagctaagaataaagatgtaaaagatacagaaaagaaactgaataaaattacaaaatttattgaggagaataaagaaaaatttacacagctagatttggaagatgttcaagttagagaaaagttaaaacatgccacgagtaaagccaaaaaactggagaaacaacttcaaaaagataaagaaaaggttgaagaatttaaaagtatacctgccaagagtaacaatatcattaatgaaacaacaaccagaaacaatgccctcgagaaggaaaaagagaaagaagaaaaaaaattaaaggaagttatggatagccttaaacaggaaacacaagggcttcag

SEQ ID NO: 135145 - DNA, 4902 bp, Homo sapiens
atgactgtaacccagtcttttccagctacacccggagccccgctgccgccagggagacagaaaatgatgctccacgaagcacacagcttcaaaacaggaaagatgggatccagtgatggctacaacttccaaacccttttctcaccaggtccagaggtgaagggatttacctcaagttccaggaaagcggtggcgattgctctcaaatacctggtcttgttaagaaaccagtcctgccttcttgccactcgtgtctttcgatggctcccttcccgaagtcccgctgcctctaagcggagtgttaagcggggctctcggaagccggtggaccgagatttccccggagaggaagggccgccgccgccgtcccctgacggcgccagcagcgacgcggagcctgagccgccgtccggccgcacggagagcccagccaccgccgcaggaacaccagtgtattcagtagcgtggggccctgattcagaaaaggttctttatacagcaggcaagcagctaatcattaaacctcttcaaccaaatgctaaagttttgcagtggaaagctcatgatggcattattttaaaagtagattggaactcggtcaatgatcttattttatctgctggtgaagactgtaaatataaggtatgggatagttacggccgcccactgtacaattcacaacctcatgagcatcccattacttcagttgcctgggctccagatggagaattatttgctgttggatcgtttcatactttacgcttgtgtgataaaactgggatagtgaagtggaacttgttaaccagtgaaacaactcaaatagtaaagcttcctgatgatatttaccctattgattttcactggtttccaaaaagtttgggtgtaaagaaacaaacccaggcagaaagctttgtcctcacaagttctgatggtaaatttcatctgatttccaagttaggaagagtggaaaaaagtgtagaagctcactgtggagcagtacttgcaggaagatggaattatgaaggaacagcattagttacagcagtgaccatcttgttgcaggaaaacaagttcagggctcccactgattctatgttatggaagcttttgtccagtgatcgaaatccaccaattgatgacttaataaaatctggaatattgcccattttagtccattgtcttgaaagagatgacaatccttctttacagtttgaagctgcatgggctttgacaaacattgcatctggaacttctgaacaaactcaagcagtagttcagtccagtgatgggccccagtgtagagattatgtcataagtcttggagttgtgaaacctttactttccttcataagtccatctattcctataacattcttaagaaatgttacttgggttatggtcaacttatgtcgccacaaagacccaccaccaccaatggaaaccattcaggagatggctgtatgggcgaaaaagatgaccgaaattcaaactcctgaaaatactcctcgtttatttgatttagtaaaagtaaaagatgagaaaattcgccaagctttttattttgctttacgagataccttagtagctgacaacttggatcaagccacaagagtagcatatcaaaaagatagaagatggagagtggtaactttacagggacaaatcatagaacagtcaggtacaatgactggtggtggaagcaaagtaatgaaaggaagaatgggttcctcacttgttattgaaatctctgaagaagaggtaaacaaaatggaatcacagttgcaaaacgactctaaaaaagcaatgcaaatccaagaacagaaagtacaacttgaagaaagagtagttaagttacggcatagtgaacgagaaatgaggaacacactagaaaaatttactgcaagcatccagcgtttaatagagcaagaagaatatttgaatgtccaagttaaggaacttgaagctaatgtacttgctacagcccctgacaaaaaaaagcagaaattgctagaagaaaacgttagtgctttcaaaacagaatatgatgctgtggctgagaaagctggtaaagtagaagctgaggttaaacgcttacacaataccatcgtagaaatcaataatcataaactcaaggcccaacaagacaaacttgataaaataaataagcaattagatgaatgtgcttctgctattactaaagcccaagtagcaatcaagactgctgacagaaaccttcaaaaggcacaagactctgtcttgcgtacagagaaagaaataaaagatactgagaaagaggtggatgacctaacagcagagctgaaaagtcttgaggacaaagcagcagaggtcgtaaagaatacaaatgctgcagaggaatccttaccagagatccagaaagaacatcgcaatctgcttcaagaattaaaagttattcaagaaaatgaacatgctcttcaaaaagatgcacttagtattaagttgaaacttgaacaaatagatggtcacattgctgaacataattctaaaataaaatattggcacaaagagatttcaaaaatatcactgcatcctatagaagataatcctattgaagagatttcggttctaagcccagaggatcttgaagcgatcaagaatccagattctataacaaatcaaattgcacttttggaagcccggtgtcatgaaatgaaaccaaacctcggtgccatcgcagagtataaaaagaaggaagaattgtatttgcaacgggtagcagaattggacaaaattacttatgaaagagacagttttagacaggcatatgaagatcttcggaaacaaaggcttaatgaatttatggcaggtttttatataataacaaataaattaaaggaaaattaccaaatgcttactttgggaggggacgccgaactcgagcttgtagacagcttggatcctttctctgaaggaatcatgttcagtgttcgaccacctaagaaaagttggaaaaagatcttcaacctttcgggaggagagaaaacacttagttcattggctttagtatttgctcttcaccactacaagcccactcccctttacttcatggatgagattgatgcagcccttgattttaaaaatgtgtccattgttgcattttatatatatggggattttggcactcaaaaagaagctgcttgggccataagtaacttaacaattagtggaaggaaagatcaagtggcttaccttatccaacaaaatgttatcccacctttttgcaacttgctgactgtaaaagatgcacaagttgtgcaagtagtactcgatggactaagtaatatattaaaaatggctgaagatgaggcagaaaccataggcaatcttatagaagaatgtggagggctggagaaaattgaacaacttcaaaatcatgaaaatgaagacatctacaaattggcctatgagatcattgatcagttcttctcttcagatgatgtatttaataattttgtagttttcttaattttatatataaacatagatctggataaagtaatatatataggtgaagttgaacaaattgctatgatgaaaccaaaaggccagactgaacacgatgagggtatgcttgaatatttagaagatataattggttgtggacggctaaatgaacctattaaagtcttgtgtcggagagttgaaatattaaatgaacacagaggagagaagttaaacagggtaaagatggtggaaaaggaaaaggatgccttagaaggagagaaaaacatagctatcgaatttcttaccttggaaaatgaaatatttagaaaaaagaatcatgtttgtcaatattatatttatgagttgcagaaacgaattgctgaaatggaaactcaaaaggaaaaaattcatgaagataccaaagaaattaatgagaagagcaatatactatcaaatgaaatgaaagctaagaataaagatgtaaaagatacagaaaagaaactgaataaaattacaaaatttattgaggagaataaagaaaaatttacacagctagatttggaagatgttcaagttagagaaaagttaaaacatgccacgagtaaagccaaaaaactggagaaacaacttcaaaaagataaagaaaaggttgaagaatttaaaagtatacctgccaagagtaacaatatcattaatgaaacaacaaccagaaacaatgccctcgagaaggaaaaagagaaagaagaaaaaaaattaaaggaagttatggatagccttaaacaggaaacacaagggcttcagaaagaaaaagaaagtcgagagaaagaacttatgggtttcagcaaatcggtaaatgaagcacgttcaaagatggatgtagcccagtcagaacttgatatctatctcagtcgtcataatactgcagtgtctcaattaactaaggctaaggaagctctaattgcagcttctgagactctcaaagaaaggaaagctgcaatcagagatatagaaggaaaactccctcaaactgaacaagaattaaaggagaaagaaaaagaacttcaaaaacttacacaagaagaaacaaactttaaaagtttggttcatgatctctttcaaaaagttgaagaagcaaagagctcattagcaatgaatcgaagtagggggaaagtccttgatgcaataattcaagaaaaaaaatctggcaggattccaggaatatatggaagattgggggacttaggagccattgatgaaaaatacgacgtggctatatcatcctgttgtcatgcactggactacattgttgttgattctattgatatagcccaagaatgtgtaaacttccttaaaagacaaaatattggagttgcaacctttataggtttagataaggtgcccgccaccacacccagctaa

SEQ ID NO: 135146 - DNA, 396 bp, Homo sapiens
gtgatgggccccagtgtagagattatgtcataagtcttggagttgtgaaacctttactttccttcataagtccatctattcctataacattcttaagaaatgttacttgggttatggtcaacttatgtcgccacaaagacccaccaccaccaatggaaaccattcaggagatggctgtatgggcgaaaaagatgaccgaaattcaaactcctgaaaatactcctcgtttatttgatttagtaaaagtaaaagatgagaaaattcgccaagctttttattttgctttacgagataccttagtagctgacaacttggatcaagccacaagagtagcatatcaaaaagatagaagatggagagtggtaactttacagggacaaatcatagaacagtcag

SEQ ID NO: 135147 - DNA, 408 bp, Homo sapiens
tcgagtgacggacccggagccgaaacaccggtaggagccccggaggtgggtactacacaaccgtctccaagccttgggtctgagtggactgtcctgcaggtaaagtacttctcttcctggtcaggttgtcacgctcttacttcctgccttgtccgcgagcgcctggaaaatagaggccttgagcccgagcggcgaagtccgggcttgaagctgccgctgggagatttctcttgctgtcacccctcccccctcggccgctccccggcggcccgggctcccgcgcgcaagctcccgggcgccacttttccaagctactcaaatgtctcggggaggccctgaagcctcgcagatcttttctttaaaaaatcctaagtctctatctggaaaagggcgtctccccctacccct

SEQ ID NO: 135148 - DNA, 1218 bp, Homo sapiens
atgactgtaacccagtcttttccagctacacccggagccccgctgccgccagggagacagaaaatgatgctccacgaagcacacagcttcaaaacaggaaagatgggatccagtgatggctacaacttccaaacccttttctcaccaggtccagaggtgaagggatttacctcaagttccaggaaagcggtggcgattgctctcaaatacctggtcttgttaagaaaccagtcctgccttcttgccactcgtgtctttcgatggctcccttcccgaagtcccgctgcctctaagcggagtgttaagcggggctctcggaagccggtggaccgagatttccccggagaggaagggccgccgccgccgtcccctgacggcgccagcagcgacgcggagcctgagccgccgtccggccgcacggagagcccagccaccgccgcagcactcctgacacatcccaaagagaaaattaataaagaagcagtgtggttcctctccaacatcactgcaggaaatcagcagcaggtacaggcagtaattgatgccaatcttgtaccaatgataatacaccttttggataagggggattttggcactcaaaaagaagctgcttgggccataagtaacttaacaattagtggaaggaaagatcaagtggcttaccttatccaacaaaatgttatcccacctttttgcaacttgctgactgtaaaagatgcacaagttgtgcaagtagtactcgatggactaagtaatatattaaaaatggctgaagatgaggcagaaaccataggcaatcttatagaagaatgtggagactctggaacatctgaaatggtgaatccacaggtagtaaatgggaaggagataacagaaaaattgaaggaagtggaagaagcactgggagggcactggaagcttttgtccagtgatcgaaatccaccaattgatgacttaataaaatctggaatattgcccattttagtccattgtcttgaaagagatgacaatccttctttacagtttgaagctgcatgggctttgacaaacattgcatctggaacttctgaacaaactcaagcagtagttcagtccaaccacactctgtgtactaggacccccagaattctggccaaacaccctgagtgcacttctaatgcctgtataaggcctcttatgctggcatccacagcaggcaaaggaatgagtaaaaggtag

SEQ ID NO: 135149 - DNA, 1761 bp, Homo sapiens
atgaccaatgaagctggagctcctcggcttatgataactcatattgtaaaccagaacttcaaatcctatgctggggagaaaattctgggacctttccataagcgcttttcctgtattatcgggccaaatggcagtggcaaatccaatgttattgattctatgctttttgtgtttggctatcgagcacaaaaaataagatctaaaaaactctcagtattaatacataattctgatgaacacaaggacattcagagttgtacagtagaagttcattttcaaaagataattgataaggaaggggatgattatgaagtcattcctaacagtaatttctatgtatccagaacggcctgcagagataatacttctgtctatcacataagtggaaagaaaaagacatttaaggatgttggaaatcttcttcgaagccatggaattgacttggaccataatagatttttaattttacaggaaatgcacaattttgaggaagagttaacttgtcccatatgttatagtatttttgaagatcctcgtgtactgccatgctctcatacattttgtagaaattgtttggaaaacattcttcaggcatctggtaacttttatatatggagacctttacgaattccactcaagtgccctaattgcagaagtattactgaaattgctccaactggcattgaatctttacctgttaattttgcactaagggctattattgaaaagtaccagcaagaagaccatccagatattgtcacctgccctgaacattacaggcaaccattaaatgtttactgtctattagataaaaaattagtttgtggtcattgccttaccataggtcaacatcatggtcatcctatagatgaccttcaaagtgcctatttgaaagaaaaggacactcctcaaaaactgcttgaacagttgactgacacacactggacagatcttacccatcttattgaaaagctgaaagaacaaaaatctcattctgagaaaatgatccaaggcgataaggaagctgttctccagtattttaaggagcttaatgatacattagaacagaaaaaaaaaagtttcctaacggctctctgtgatgttggcaatctaattaatcaagaatatactccacaaattgaaagaatgaaggaaatacgagagcagcagcttgaattaatggcactgacaatatctttacaagaagagtctccacttaaatttcttgaaaaagttgatgatgtacgccagcatgtacagatcttgaaacaaagaccacttcctgaggttcaacccgttgaaatttatcctcgagtaagcaaaattttgaaagaagaatggagcagaacagaaattggacaaattaagaacgttctcattcccaaaatgaaaatttctccaaaaggatgtcatgttcctggcctgatactggtagacacagtctgggccctctcttaccttactgatgctggcaatgaacaaatacagatggtaatagactctggaatagttcctcatttggttcctctgctcagccaccaggaagttaaagttcagagaccagtccaccaacggcaacaacccggagggggacaactcgcaggccggcaaagacaaaacgggccagactcggagccgaccggcgccccacgacaccgaggagcgggcgaacccgcaaccctcgaccccttacaaccctatcgacaagcccgcacaacacgctcccgccaggccgcgccaaaaacgatgagaaccggataa

SEQ ID NO: 135150 - DNA, 1290 bp, Homo sapiens
atggtggaaaaggaaaaggatgccttagaaggagagaaaaacatagctatcgaatttcttaccttggaaaatggaaatattttaggaaaaaagaatcatgtttgtcaatattatatttatgagttgcagaaacgaattgctgaaatggaaactcaaaaggaaaaaattcatgaagataccaaaggaaattaatgagaagagcaatatactatccaaatgaaatgaaagctaagaataaagatgtaaaagatacagaaaagaaactgaataaaattacaaaatttattgaggagaataaagaaaaatttacacagcttagatttggaagatgttcaagttagagaaaagttaaaacatgccacgagtaaagccaaaaaactggagaaacaacttcaaaaagataaagaaaaggttgaagaatttaaaagtatacctgccaagagtaacaatatcattaatgaaacaacaaccagaaacaatgccctcgagaaggaaaaagagaaagaagaaaaaaaattaaaggaagttatggatagccttaaacaggaaacacaagggcttcagaaagaaaaagaaagtcgagagaaagaacttatgggtttcagcaaatcggtaaatgaagcacgttcaaagatggatgtagcccagtcagaacttgatatctatctcagtcgtcataatactgcagtgtctcaattaactaaggctaaggaagctctaattgcagcttctgagactctcaaagaaaggaaagctgcaatcagagatatagaaggaaaactccctcaaactgaacaagaattaaaggagaaagaaaaagaacttcaaaaacttacacaagaagaaacaaactttaaaagtttggttcatgatctctttcaaaaagttgaagaagcaaagagctcattagcaatgaatcgaagtagggggaaagtccttgatgcaataattcaagaaaaaaaatctggcaggattccaggaatatatggaagattgggggacttaggagccattgatgaaaaatacgacgtggctatatcatcctgttgtcatgcactggactacattgttgttgattctattgatatagcccaagaatgtgtaaacttccttaaaagacaaaatattggagttgcaacctttataggtttagataagatactggtagacacagtctgggccctctcttaccttactgatgctggcaatgaacaaatacagatggtaatagactctggaatagttcctcatttggttcctctgctcagccaccaggaagttaaagttcag

SEQ ID NO: 135151 - DNA, 3482 bp, Homo sapiens
atggtggaaaaggaaaaggatgccttagaaggagagaaaaacatagctatcgaatttcttaccttggaaaatgaaatatttagaaaaaagaatcatgtttgtcaatattatatttatgagttgcagaaacgaattgctgaaatggaaactcaaaaggaaaatattcatgaagataccaaagaaattaatgagaagagcactatacttatcaaatgaaatgaaagctaagaataaagatgtaaaagatacagaaaagaaactgaataaaattacaaaatttattgaggagaataaagaaaaatttacacagctagatttggaagatgttcaagtttagagaaaagttaaaacatgccacgagtaaagccaaaaaactggagaaacaacttcaaaaagataaagaaaaggttgaagaatttaaaagtatgacctgccaagagtaacaatatcattaatgaaacaacaaccagaaacaatgccctcgagaaggaaaaagagaaagaagaacaaaaattaaaggaagttatggatagccttaaacaggaaacacaagggcttcagaaagaaaaagaaagtcgagagaaagaacttatgggtttcagcaaatcggtaaatgaagcacgttcaaagatggatgtagcccagtcagaacttgatatctatctcagtcgtcataatactgcagtgtctcaattaactaaggctaaggaagctctaattgcagcttctgagactctcaaagaaaggaaagctgcaatcagagatatagaaggaaaactccctcaaactgaacaagaattaaaggagaaagaaaaagaacttcaaaaacttacacaagaagaaacaaactttaaaagtttggttcatgatctcttttcaaaaagttgaagaagcaaagagctcattagcaatgaatcgaagtagggggaaagtccttgatgcaataattcaagaaaaaaaatctggcaggattccaggaatatatggaagattgggggacttaggagccattgatgaaaaatacgacgtggctatatcatcctgttgtcatgcactggactacattgttggttgatctatttgatatagcccaagaaatgtgtaaacttccttaaaagacaaaaatattggagttgcaacttttataggtttagataagatggctgtatgggcgaaaaagatgaccgaaattcaaactcctgaaaatactcctcgtttatttgatttagtaaaagtaaaagatgagaaaattcgccaagctttttattttgctttacgagataccttagtagctgacaacttggatcaagccacaagagtagcatatcaaaaagatagaagatggagagtggtaactttacagggacaaatcatagaacagtcaggtacaatgactggtggtggaagcaaagtaatgaaaggaagaatgggttcctcacttgttattgaaatctctgaagaagaggtaaacaaaatggaatcacagttgcaaaacgactctaaaaaagcaatgcaaatccaagaacagaaagtacaacttgaagaaagagtagttaagttacggcatagtgaacgagaaatgaggaacacactagaaaaatttactgcaagcatccagcgtttaatagagcaagaagaatatttgaatgtccaagttaaggaacttgaagctaatgtacttgctacagcccctgacaaaaaaaagcagaaattgctagaagaaaacgttagtgctttcaaaacagaatatgatgctgtggctgagaaagctggtaaagtagaagctgaggttaaacgcttacacaataccatcgtagaaatcaataatcataaactcaaggcccaacaagacaaactttgataaaataaataaagcaatttagatgaatgtgcttctgctattactaaagcccaagtagcaatcaagactgcttgacagaaaccttcaaaagggcacaagaactctgtcttgccgtacagagaaagaaataaaagatactggagaaagaggtggatgacctaacagcagagctgaaaagtctttgaggaccaaagcagcagaggtcgtaaagaatacaaatgctgcagaggaatccttaccagagatccagaaagaacatcgcaatctgcttcaagaattaaaagttattcaagaaaatgaacatgctcttcaaaaagatgcacttagtattaagttgaaacttgaacaaatagatggtcacattgctgaacataattctaaaataaaatattggcacaaagagatttcaaaaatatcactgcatcctatagaagataatcctattgaagagatttcggttctaagcccagaggatcttgaagcgatcaagaatccagattctataacaaatcaaattgcacttttggaagcccggtgtcatgaaatgaaaccaaacctcggtgccatcgcagagtataaaaagaaggaagaattgtatttgcaacgggtagcagaattggacaaaattacttatgaaagagacagttttagacaggcatatgaagatcttcggaaacaaaggcttaatgaatttatgggcaggtttttatataataacaaataaattaaaggaaaattaccaaatgcttactttgggagggggacgccgaactcgagcttgtagacagcttggatcctttctctgaagggatcatggttcagtgttcgaccacctaagaaaagttggaaaaagatcttcaacctttcgggaggagagaaaacacttagttcattggctttagtatttgctcttcaccactacaagcccactcccctttacttcatggatgagattgatgcagcccttgattttaaaaatgtgtccattgttgcattttatatatatgaagcagtgtggttcctctccaacatcactgcaggaaatcagcagcaggtacaggcagtaattgatgccaatcttgtaccaatgataatacaccttttggataagggggattttggcactcaaaaagaagctgcttgggccataagtaacttaacaattagtggaaggaaagatcaagtggcttaccttatccaacaaaatgttatcccacctttttgcaacttgctgactgtaaaagatgcacaagttgtgcaagtagtactcgatggactaagtaatatattaaaaatggctgaagatgaggcagaaaccataggcaatcttatagaagaatgtggagggctggagaaaattgaacaacttcaaaatcatgaaaatgaagacatctacaaattggcctatgagatcattgatcagttcttctcttcagatgatgtatttaataattttgtagttttcttaattttatatataaacatagatctggataaagtaatatatataggctcttcactcatgaagcagactcctagtcctggagtgactgtgtacgagagcgtggttgtggtgctgtatgtgaacgcatgcaagcttgattcaccttcagggggctga

SEQ ID NO: 135152 - DNA, 5279 bp, Homo sapiens
  misc_feature (1)...(5279): n = a,t,c or g
ttttttttttttttttttcttgctttctttaaatctttatttaaaagtccatgctaataatgtgtttacatttttacagttacattatgatagaaactgttggattttttaaatatctaaaacaatggcccactgaagaaaggaacaattaactctttaattaattccttaggataaatacccagaaatttaacagctagggcagacttctaatacaataccgaaagtccttccaaaaaccaagtggttgccaacttatgtcccttagcattataacattcttgaggccaatagtgtaaaaatacggctgacaattttatagggcaaacattactcaagggtatcttactttccacttattacttaaaggtaattaacccctaaataggatgctccctcaacagtgggggacttacatcctggggtaaacctatcataaggttggaaactatcaagttgaaatggcatttaggtacccggataaacctatcataaagttggaaatttggtaaattggaaccagtggtaaatccagagggccatcttacttcatactcatggaggcactatagtgggatatttttcaacttacgagatagcctaggcttgttgaaacactgtcctaatttactggctctctggtaattaagtcataaatggtcaaacatcaaattctagaaaagcatatatttaaattctcatcactataattcagaatgactggtttacaaaaatatgttcatagtatttgggtaataactgtggtgattgtctcaactggcaagctaagtggaatgccttaaagaatctaatcaaggattagttggcaggcatttccagtgttggtaaatcaaaggcccacgaaggtatgctgagccttgatagcacaaccttgcttaggactttgcctcaactaacatactttttagtttggcaagttacctgaccctccaggtaactcatttttctccatagtctgctacttacaagattgtcatatttttgtaatctagaagcaattatagagaatattttattagactttacaaatgacaactgcataaaacagaaaccagtttcatgatctagtttagggagtatgtattttatacaactcataatcctttacaaatagaaaaaaaatcagtaatacactgaatcaacttgaagaatcttcagcataaagttcaacaaagtcccttagatgcaatttcttttggatttacagcaacactttttgttatgttgtatgtcttgtaaattccaataagtctatccgaaatctcaaacatattatttcgaagagaaattattatgaactgtgcattttttgtttgttcatatatataaaatgcaacaatggacacatttttaaaaatcaaggggctgcatcaatctcatccatggaagtaaagggggagtggggcttgtagtgggtggaagaggcaaatactaaaagccaatggaactaaggtggttttctcctccctcccgaaaaggttgaagatctttttccaacttttcttaggtggtcgaacactgaacatgattccttcagagaaaggatccaagctgtcttcaagctcgagttcggagtcacctcccaaagtaagcatttggtaattttcctttaatttatttgttattatataaaaaccggccataaattcattaagcctttgtttcggaagattttcatatgcctgtctaaaacggtctctttcataagtaattttgtccaattctgctacgcgttgcaaatacaattcttccttcatttttatactctgcgatggcaccgaggtttggtttcatttcatgacaccgggcttccaaaagtgcaattggatttgttataaaatctggattcttgatcgcttcaagatcctctgggcttagaaccgaaatctcttcaataggattatcttctataggatgcagagatatttttgaaatctctttgtgccaatattttattttagaattatgttcagcaatgtgaccatctatttgttcaagtttcaacttaatactaagtgcatctttttgaagagcatgttcattttcttgaataacttttaattcttgaagcagattgcgatgttctttctggatctctggtaaggattcctctgcagcatttgtattctttacgacctctgctgctttgtcctcaagacttttcagctctgctgttaggtcatccacctctttctcagtatcttttatttctttctctgtacgcaagacagagtcttgtgccttttgaaggtttctgtcagcagtcttgattgctacttgggctttagtaatagcagaagcacattcatctaattgcttatttattttatcaagtttgtcttgttgggccttgagtttatgattattgatttctacgatggtattgtgtaagcgtttaacctcagcttctactttaccagctttctcagccacagcatcatattctgttttgaaagcactaacgttttcttctagcaatttctgcttttttttgtcaggggctgtagcaagtacattagcttcaagttccttaacttggacattcaaatattcttcttgctctattaaacgctggatgcttgcagtaaatttttctagtgtgttcctcatttctcgttcactatgccgtaacttaactactctttcttcaagttgtactttctgttcttggatttgcattgcttttttagagtcgttttgcaactgtgattccattttgtttacctcttcttcagagatttcaataacaagtgaggaacccattcttcctttcattactttgcttccaccaccagtcattgtacctgactgttctatgatttgtccctgtaaagttaccactctccatcttctatctttttgatatgctactcttgtggcttgatccaagttgtcagctactaaggtatctcgtaaagcaaaataaaaagcttggcgaattttctcatcttttacttttactaaatcaaataaacgaggagtattttcaggagtttgaatttcggtcatctttttcgcccatacagccatcttatctaaacctataaaggttgcaactccaatattttgtcttttaaggaagtttacacattcttgggctatatcaatagaatcaacaacaatgtagtccagtgcatgacaacaggatgatatagccacgtcgtatttttcatcaatggctcctaagtcccccaatcttccatatattcctggaatcctgccagattttttttcttgaattattgcatcaaggactttccccctactcgaattcattgctaatgagctctttgcttcttcaactttttgaaagagatcatgaaccaaacttttaaagtttgtttcttcttgtgtaagtttttgaagttctttttctttctcctttaattcttgttcagtttgagggagttttccttctatatctctgattgcagctttcctttctttgagagtctcagaagctgcaattagagcttccttagccttagttaattgagacactgcagtattatgacgactgagatagatatcaagttctgactgggctacatccatctttgaacgtgcttcatttaccgatttgctgaaacccataagttctttctctcgactttctttttctttctgaagcccttgtgtttcctgtttaaggctatccataacttcctttaattttttttcttctttctctttttccttctcgagggcattgtttctggttgttgtttcattaatgatattgttactcttggcaggtatacttttaaattcttcaaccttttctttatctttttgaagttgtttctccagttttttggctttactcgtggcatgttttaacttttctctaacttgaacatcttccaaatctacgtgtgtaaatttttctttattctcctcaataaattttgtaattttattcagtttcttttctgtatcttttacatctttattcttagctttcatttcatttgatagtatattgctcttctcattaatttctttggtatcttcatgaattttttccttttgagtttccatttcagcaattcgtttctgcaactcataaatataatattgacaaacatgattcttttttctaaatatttcattttccaaggtaagaaattcgatagctatgtttttctctccttctaaggcatccttttccttttccaccatctttaccctgtttaacttctctcctctgtgttcatttaatatttcaactctttgacacaagacttttattgngggtcatttagccgtccacaaccaattatatcttctaaatattcaagcataccctcatcgtgttcagtctggccttttggtttcatcatagcaatttgttcaacttcaccctgtaaaataaaaaatctattatggtccaagtcaattccatggcttcgaagaagatttccaacatccttaaatgtctttttctttccacttatcaggatagacagaagtattatctctgcaggccgttctgaaaacatagaaattactgttaggaatgacttcataatcatcccattccttatcaattatcttttgaaaatgaacttctactgtacaactctgaatgtccttgtgttcatcagaattatgtattaatactgagagttttttagaatctatttttttgtgctcgagggccaaacaccaaaaaggctaggaaccaaaactatggggttgggcccgggccttttggcccgaataattccaggaaaagggcgttttgggaagggccccagaattttctccccagcataggatttgaaagttctggttttacaatatgaagttatcataagccgaggagctccagcttcattggtcattgctgaaggccgggggaggaggaatgctgttcaaaatctcttctaaacttctattatcaagttcctcacttgcagtctctgcggcggtggctgggctctccgtgcggccggacggcggctcaggctccgcgtcgctgctggcgccgtcaggggacggcggcggcggcccttcctctttgcgccgggcagtggacgggctgggtgcctttacggggcatggtcgctgcaggacagtccactcagaccaaggctggagacggttgtgtagtacccacctccccgctcctaccggtgtttcggctccgggtccttcactcgaaaatggcgcctaaaatacaaactcgaacggaaattcgttacaaatgcgcgcaataatataagggatccactaatttgaaaaaaagtgcggcg

SEQ ID NO: 135153 - DNA, 495 bp, Homo sapiens
tctgtcactggagaagcctttgcttctacatactggaatgggacgcttctgcacactggatgaatctgtctccctggcaaccatgattgatcgaataaaaagacacctaaaactatctcatattcgcttagcccttggggtggggagaaccttagagtctcaaagtcaaaagtcgtggccctgtgtgctggttctgggagcagcgttctgcagggtgttgaggctgacctttacctcacaggtggtataattgcagaaacatcaggataacacattctacaaatcagctggatgccaacttaaatttgtaacatgagtcagtgggactggtgtgcttccagagagtgtcttcgagggtatcatcatttccggtttgttaatcttattcaccaaatgttctatcgctcgtaaggtaaaactgtaatataactaccatattaaataacaaatgttcattataaactctaggaaagattgaataaaatctgtttactt

SEQ ID NO: 135154 - DNA, 370 bp, Homo sapiens
cccttaatggaaatagtgcccaggccacaatatcgcgagatttacacgtaaagctggaaacaactcccgtcctagagtaagcactgtttactattaagcagcatcagtagggcccctttgcaacctgcaaaccgctccctcgacgttacctcatctatgcctcatttcagtgccacttcaggccttttccaggacagtgaaaaaccacgagacacagccagttaagtctgagtcaggacccctgtcccactagtgcgctgtgctctggtgcggcagggcagttttctgacccaatctcctcttttgctgtcctctgcagcaccaagataacaatcacagccggccccaaccggcacctaccgcgaaggtc

SEQ ID NO: 135155 - DNA, 522 bp, Homo sapiens
gtttacatggctagatttaccaagcagtagaccattctgtgtattatctgaaaatgtatgaatcagtctttcttgtccaagtttttcagagatttaagaatcttttggaaaataattctgaaaataatttgattttgtatgtccatgccaaagccctagattatggggactggtgatgtatatctaagggatgtgtgtatgttatgtaagcatgagaatgaatctttttaaaaagtcatttcttagaaattttgcctataatagtttacttttaaatcttaatctctcaccccccaaaactcccattttcccacaatattttctcctaggagcttgtacctccaggcccatacatccttccaaagctcccaactaccctacagagggaaaccaccgagtaagaattcaacgttaactacacccaagacctggacaaagtccatgtctggcagtgaaaggaattgacggtgtttctggcacttctttttctgctaggactggtaatgaggaacaaacacggtt

SEQ ID NO: 135156 - DNA, 1686 bp, Homo sapiens
  misc_feature (1)...(1686): n = a,t,c or g
ttttttttttttttttagaatgttaagtaaacagattttattcaatctttcctagagtttataatgaacatttgttatttaatatggtagttatattacagttttaccttacgagcgatagaacatttggtgaataagattaacaaaccggaaatgatgaataccctcggaagacactctctgggaagcacaccagtcccactggactcatgttacaaaatttaagttgggcatccagctgatttgtaggaatgtgttatcctggatgtttctgcaattataccacctggaagagggtccctgtcaggtctctggatagggataatatttatcttattctccaaggtgaggattccaggcatatctcggagggtcaggaaaggaaaggcctcgttcagtgtttgctggtgtttcacagaggattgacatttaattccttggggaagcagcatcccaaaatatcatgatgggacatctcacctacctgtgaggtaaagggtcagccctcaacaccctgcagaacgctgctccccagaaccagcacacagggccacgactttgacttgagactctaaggttctccccaccccaagggctaagcgaatatgagatagttttaggtgtctttttattcgatcaatcatggttgccagggagacagattcatccagtgtgcataaccgtcccattccagtatgtagaagcaaaggcttctccagtgacagaatttccgtcttctgataaagttgtttgttccgggaaagaaaatctaccacctgcatcaaagccttctgagtacaattcagattaatccgtgtttgttcctcattaccagtcctagcagaaaaagaagtgacagaaacaccgtcaaattcctttcactgccagacatgactttgtcccaggtcttgggtgtagttaacgttgaattctactcggtggtttccctctgtagggtagttgggagctttggaaggatgtatgggcctggaggtacaagctccaagccctttagccaaccagttgttgacgccctggggcgcagcatcataggctgtatgaggagagtagataccgactctgttctccagagcccggatcaccaggcgctccttcccatgtgttcccggttaatgcgccttccatgggtcgggaagataaggcggatgggtaggagagaatgaggtctgcccttcttttgcagcacctccctcccatcacttccctcagtcaggtcattggtccaggaaagagtgtatttaacanttatgtggtgggccttggttcccaccagtaatcccaaacattgtccccaactctcagcaaaacgaagagggatgcaaaagtcattccaaggaagaaaggagagctcttcaaatccatgaaggaacgggaagaattgcagatcagggaatatacaaaccggactgtcgtggggactcatctatgcctcatttcagtgccacttcaggccttttccaggacagtgaaaaaccacgagacacagccagttaagtctgagtcaggacccctgtcccactagtgcgctgtgctctggtgcggcagggcagttttctgacccaatctcctcttctgctgtcctctgcagcaccaagataacaatcacagccggccccaaaaggcacctaccgcgaaggtcgcaactacactcgcgggtttttaaat

SEQ ID NO: 135157 - DNA, 411 bp, Homo sapiens
agccgggttcctcccgggtttctgccgggtttctccctgcggctcctgggttgttgagactcttgtgaagatggcttgcgctgccgcgcggtccccggccgaccaggacaggtttatttgtatctatcctgcttatttaaataataagaagaccatcgcagagggaaggcgaatccccataagtaagctacagagattcaagatgtatgttcagcagttggacttaacgtatttcttgagaaaaataaaatgtactctagagaatggaatcgtgatgtccaatacagaggcagagtccgggtccagctcaaacaggaagatgggagcctctgccttgtacagttcccatcacgttaagaatgtctgaggggtcaggcggtgctggcaagatggctgcacttgagaagatga

SEQ ID NO: 135158 - DNA, 439 bp, Homo sapiens
  misc_feature (1)...(439): n = a,t,c or g
tttcgtcagagccgggttcctcccgggtttctgccgggtttctccctgctgctcctgggttgttgagactcttgcgaagatggcttgcgctgccgcgcggtccccggccgaccaggacaggtttatttgtatctatcctgcttatttaaataataagaagaccatcgcagagggaaggcgaatccccataagtaaggctgttgaaaatcctacagctacagagattcaagatgtatgttcagcagatggacttaacgtatttcttgaggttaagaatgtctgaggggtcaggcggtgctggcaagatggctgcacttgagaagatgacgtttcccaggaagatgacatttccagagaagccaagccacaaaaagtacagggccgccctgaagaaggagaaacgaaagatacgtcggcaggaacttgctcgactgatagn

SEQ ID NO: 135159 - DNA, 459 bp, Homo sapiens
ccttttcctgggtcgacgatttcgtcgggtttctgccgggtttctccctgcggctcctgggttgttgatactcttgtgaagatggcttgcgctgccgcgcggtcgcccggccgaccaggacaggtttatttgtatctatcctgcttatttaaataataagaagaccatcgcagagggaaggcgaatccccataagtaaggttaagaatgtctgaggggtcaggcggtgctggcaagatggctgcacttgagaagatgacgtttcccaagaagatgacatttccagagaaaccaagccacaaaaagtactgggccgccctgaagaaggagaaacgaaagaaacgtcggcaggaacttgctcgactgagagactcaagactctcacaggaggaggaagaggacacttttattgtagaacaccatctacaagaagagaagctattggaaagagagagggaaa

SEQ ID NO: 135160 - DNA, 429 bp, Homo sapiens
atggctgcacttgagaagatgacgtttcccaagaagatgacatttccagagaaaccaagccacaaaaagtacagggccgccctgaagaaggagaaacgaaagaaacgtcggcaggaacttgctcgactgagagactcaggactctcacaggaggaggaagaggacacttttattgaagaacaacaactagaagaagagaagctattggaaagagagagggaaagattacatgaggagtggttgctgagggagcagaaggcacaagaagaattcagaatagagaagtacaaggggggatctataagtggactgcgcaagctagctcgaacctcccggtgtcatcggactggtggccttgtacctggtgttcggttatggagcctctctcctctgcaacctgataggatttggctacccagcctacatctc

SEQ ID NO: 135161 - DNA, 574 bp, Homo sapiens
gccgggttcctcccgggtttctgcggggtttctccctgcggctcctgggttgttgagactcttgtgaagatggcttgcgctgccgcgcggtccccggccgaccaggacaggtttatttgtatctatcctgcttatttaaataataagaagsaccatbcgvasvgggaaggcgaatccccataagtaaggctgttgaaaatcctacagctacagagattcaagatgtatgttcagcagttggacttaacgtatttcttgagaaaaataaaatgtactctagagaatggaatcgtgatgtccaatacagaggcagagtccggggtccagctcaaaccaggaagatggggagcctctgccttgtacagttcccatcacattatacactaagcctaacttctggttcctaggtaagtcagtaatgttgtatgcagcagaaatgatacctaaactaaaaacaaggacacaaaaaacaggaggtgctgaccaaagtcttcaacaaggagagggaagtaaaaaagggaaaggaaagaaaaagaagtaacctagtatcagcatcaagtatgtggtactactg

SEQ ID NO: 135162 - DNA, 1301 bp, Homo sapiens
gactctcacagaaggaggaagaggaggacacttttattgaagaacaacaactagaagaagagaagctattggaaagagagaggcaaagattacatgaggagtggttgctaagagagcagaaggcacaagaagaattcagaataaagaaggaaaaggaagaggcggctaaaaaacggcaagaagaacaagagagaaagttaaaggaacaatgggaagaacagcagaggaaagagagagaagaggaggagcagaaacgacaggagaagaaagaaaaagagaagacgttcatgtggaaacctagtgttgatctcttcagtcatttagcaagtcttcgaacacctattatatgccaggacaaaggtaatgcgtaccaggagcacttccctgagaagaagaaaaagaggagtagtcagttagctatacccgagggggcatttggatacccacaccatttattggccatccttggcctaagatgttcacgtaaacataatttcccaacatccagtcctacccttcttattaagagcatgtttacgacgtttggaatggagcagtgcaggagggatgactatgaccctgacgcaagcctggagtacagcgaggaagaaacctaccaacagttcctagacttctatgaggatgtgttgcccgagttcaagaacgtggggaaagtgattcagttcaaggtttatttgaaatacaacaatgtccaagaggaaagcactgcaactttcttcatgtgttcagaaatcccaacaatgaattctgggaagctaatagagacatctacttgtctccagatcggactggctcctcctttgggaagaactccgaaaggagggagaggatgggccaccacgacgactactacagcaggctgcggggaaggagaaaccctagtccagaccactcctacaaaagaaatggggaatccgagaggaaaagtagtcgtcacagggggaagaaatctcacaaacgcacatcaaagagtcgggagaggcacaattcacgaagcagaggaagaaatagggaccgcagcagggaccgcagccggggccggggcagccggagccggagccggagccggagccgcaggagccgccgcagccggagccaaagttcctctaggtcccgaagtcgtggcaggaggaggtcgggtaatagagacagaactgttcagagtcccaaatccaaataaactagttttgttcttaaatgattgtatatcttatttattatggttgctacatactcggatagaaggctatgaacgcagatgggttcgcaagtctggctga

SEQ ID NO: 135163 - DNA, 926 bp, Homo sapiens
tttttttttcagtttcaaattttatttcattaacttaaaaggtggacataatgtttattttaaatctaattgaaatttatctgaaacaacttatttcaagtaacttattgtacagtccattgtccatttaaaaatattttcttccaaaaaactgcattgaaagacaaaaaaattcttttatacgggcattatacgcgagatggcaaacttctggatggtaaattttgtttcactgtccaactccggatgataaagatgagagggcacaagggttcacagttcagttaaatgatgcaaacaaaaagcttctgtttccctccgatacaaattagaagtctccattcatgtctcttacagtagtaccacatacttgatgctgatactaggttacttctttctctttcctttccctttttttacttccctctccttgttgaagactttggtcagcacctcctgttttttgtgtccttgtttttagtttaggtaatcatttctgctgcatacaacattactgacttacgtgatgggaactgtacaaggcagaggctcccaatcttcctgtttgagctggacccggactctgcctcttgtattggacatcacggattccattctctagagtacattatatatttatctcaagaaatacgttaagtccaactgctgaacatacatcttgaatctctgtagcttgtaggattttcaacagccttacttatggggattcgccttccctctgccgatggtcttcttattatttaaataagcaggatagatacaaataaaccctgtccctggtcggccggggaccgcgcggcagaaagcccattctttcacaagagtctcaacaacccaggagccgcagggagaaacccggcagaaacccgggaggaacccggctctgagtttccgagacagcccgc

SEQ ID NO: 135164 - DNA, 1844 bp, Homo sapiens
cgctctgcaggaattccgcaatagccgcgcgttccccggccgaccaggacaggtttatttgtatctatcctgcttatttaaataataagaagaccatcgcagagggaaggcgaatccccataagtaaggctgttgaaaatcctacagctacagagattcaagatgtatgttcagcagttggacttaacgtatttcttgagaaaaataaaatgtactctagagaatggaatcgtgatgtccaatacagaggcagagtccgggtccagctcaaacaggaagatgggagcctctgccttgtacagttcccatcacgttaagaatgtctgaggggtcaggcggtgctggcaagatggctgcacttgagaagatgacgtttcccaagaagatgacatttccagagaaaccaagccacaaaaagtacagggccgccctgaagaaggagaaacgaaagatacgtcggcaggaacttgctcgactgagagactcaggactctcacagaaggaggaagaggaggacacttttattgaagaacaacaactagaagaagagaagctattggaaagagagagggaaagattacatgaggagtggttgctgagggagcagaaggcacaagaagaattcagaataaagaaggaaaaggaagaggcggctaaaaaacggcaagaagaacaagagagaaagttaaaggaacaatgggaagaacagcagaggaaagagagagaagaggaggagcagaaacgacaggagaagaaagaaaaagaggaagctttgcagaagatgctggatcaggctgaaaatgagttggaaaatggtaccacatggcaaaacccggaacccccccttggatttcagagtcatggagaaggatggagttaattgtcccttctacagtaaaacaggagcttgcagatttggagatagatgttcacgtaaacattatttccccacatcccagtcctacccttcttattaagagcatgttcacaacgcttggaatggagcagtgcacggagggatgactatgaccctgacgcaagcctggagtacagcgaggaagaaacctaccaacagttcctagacttctatgaggatgtgttgcccgagttcaagaacgtggggaaagtgattcagttcaaggtcagctgcaatttggaacctcacctgaggggcaagtatatatgttcagtaccagtcggaagaagaatgccaagcagctctttctctgtttaacggacgatggtatgtacgcaggacgacagcttcagtgtgaattctgaacaggagatcggtggaaaatggcgatttgtggtttatttgaaatacaacaatgtccaagaggaaagcactgcaactttcttcatgtgttcagaaatcccaacaatgaattctgggaagctaatagagacatctacttgtctccagatcggactggctcctcctttgggaagaactccgaaaggagggagaggatgggccaccacgacgactactacagcaggctgcggggaaggagaaaccctagtccagaccactcctacaaaagaaatggggaatccgaaaggaaaagtagtcgtcacagggggaagaaatctcacaaacgcacatcaaagagtcgggagaggcacaattcacgaagcagaggaagaaatagggaccgcagcagggaccgcagccggggccggggcagccggagccggagccggagccggagccgcaggagccgccgcagccggagccaaagttcctctaggtcccgaagtcgtggcaggaggaggtcgggtaatagagacagaactgttcagagtcccaaatccaaataaactagttttgttcttaaaaa

SEQ ID NO: 135165 - DNA, 495 bp, Homo sapiens
tttgtgtgtaaagggtttttattggagagcctgtgccctagaagtgccaccaaggatttggaaggtcactttcagcagccgccatttctgccaggaccagtggcaagcacctggcagatggagcccgggtgtttctgcgtaaggcagaggaatccagcttttccatgagattcagctgcagttgtcgaaaaccctgtgtgagccagcagttccagttcaaaggttgagggggcgaacagctgcgaggtggccaggctcccgtgagtcaccactcaggcctgtatttgatgtcgaatactgtggagtcctcatcttcatcatcctcttcatttagtggcgccatttccactcgctctgctggagtggtgatgatatcatacttgcgtgtcttctttaacctctttcccgactcttccaagacaaaagcagcacacagtaaatccggcaacagcaaatgccccaagacctgttcctccagctctcgggtgtgtttgc

SEQ ID NO: 135166 - DNA, 1352 bp, Homo sapiens
atggatgaagaaattcgggttcatgacgagaggcttgctcagaagcacaccaacaggggaattgcagggctgacccctgaacctcagtcgctgcactttgagttggtggctctgactgtcacactcaaaactgaactgagtctaaagggtttagtcctgttttattctcttcgtgggtcgggaaagaggttaaagaagacacgcaagtatgatatcatcaccactccagcagagcgagtggaaatggcgccactaaatgaagaggatgatgaagatgaggactccacagtattcgacatcaaatacagagcccgcaggcctgccgtggccagatctgctctggcgcagctatggcgatcaggtccctgccctcagctccgattcttggtctttaaaatcttcactgctcctctccagttcctgtgcccccacccttcatcctcgacattgaccttccagcaagatgcagtggaaggcctgatggtggaatcagacctgggttttcgacaactgcagctgaatctcatggaaaagctggattcctctgccttacgcagaaacacccgggctccatctgccaggtgcttgccactggtcctggcagaaatggcggctgctgaaagtgaccttccaaatccttggtggcacttcagcgccacaggctctccaataaaaaccctttacacacaaaccatgagtaccttgggcttggatgttttctgtggtgccggccagcggggcaccttttgtgaagacagagttggaatcaccatccatggaaaatacttcctggaaacgttttggaatagaaagggaagaagaaatagaaatgaggtgaaggagagcggcggcggcggcgcgggtcggcagcgggagggcgcgcggcggggcggaggcggaggcggagtcggcgccgagaacatggccggaggcaaagctggaaaggacagtgggaaggccaaggctaaggcagtatctcgctcacagagagctgggctacagtttcctgtgggccgcatccacagacacttgaagactcgcaccacaagccatggaagggtgggtgccactgctgccgtgcacagggctgcgattccggggtacctcactgcagaggtgctggagctggcaggtaatgcttctaaggatctcaaagtaaagcgtatcactccgcgtcacttgcagcttgcaatccgtggtgatgaagagttggattctcttatcaaggctaccatagctgggggtggtatgtattactacttaagccttgattcttattggtctttctgactaatatatcgttcatatcaatggtataggatatttgatctggtagacataaagcatataaa

SEQ ID NO: 135167 - DNA, 662 bp, Homo sapiens
tggatgaaaactccagcctttcctgactcacctccatcttcggttcttcagttttctgagaagagttgggatatgcgggaaggggcatgggagctcggcagcctccgcctgccaggaaggcagtttcgcctctgcaggaaagagcagagcccgtgggaagccctgggtgagggtggcgcagccggcccagcacgcatggtattgccagccacggggggcctgcgtgtagtctctgctccctgcatttcaccttctttgttgactttccttctctgttttcccccatctgtttgccagaggggtgggactggcaacaagaacagccgtgtctgctttatctctcctctccacggtgtactcaggcctgagctcgtgactcacgggagcctggccacctcgcagctgttcgccccctcaacctttgaactggaactgctgggttcacacaggggttttcgacaactgcagctgaatctcatggaaaagctggattcctctgccttacgcagaaacacccgggctccatctgccaggtgcttgccactggtcctggcagaaatggcggctgctgaaagtgaccttccaaatccttggtggcacttcagcgccacaggctctccaataaaaaccctttacacacaaaaaaaagtcgacgcggccgc

SEQ ID NO: 135168 - DNA, 991 bp, Homo sapiens
cggcggcgcgggtcggcagcgggagggcgcgcggccgagcggaaggcggaagtcggcgcgatgaacatggctggaggcaaagctggaaaggacagtgggaaggccaaggctaaggcagttatctcgctcacagagaagctgggctacagtttcctgtgggccgcatccacagacacttgaagactcgcacccacaagccatgggaggggtgggtgccactgctgccgtgtaccagtgctgcgattctgtgagtacctcactggcagaggtgctggagctgggcaggttatgcttcctaaggatcttcaaagtaaaagcgtatcactcccgcgtcacttgcagcttgcaattccgtgggtgattgaagagttggattctcttatccaaggcttaccataagctgggggtggtgtgatcccctcacatccccacaaatcccctgattgggaaagaaggggacagcaagaaaactgccttagaggggatgcttttaacccaacccctctccctcccccgtcatttgtactgtaactgggacaaaaaaaataatggggatatgtggaattttttaccaccagttaaatggaaaagcatagacaattactgtagacatgataaaagaaacatttgtatgttcttagactccgaagtttgataaaagtaccttttcatgtggtgacagttgtggtgttgattggctaggtttctccccgtgtgttttatacaaaaatggaattgataaaccattttattacaaaattaatttgtctcaaaactgttctgttcatggtgtattagaaatattttactcagactttaaatattttaaatctcagattggttattcagagtaaccttagaacagaaattgggaatatatctttacaatgattgataccatggtatattgactcttagatgctattgatctgtagcaccattttttacaaacgactaaggaaaaaacctgccaattaaatcatgatatgcc

SEQ ID NO: 135169 - DNA, 1123 bp, Homo sapiens
tctgtatgctgggctgggggcgcaccacgtgctcacagcacacgcacccacgcgtggctcggcaggccggccatggagccaggcagcgtggagaacctgtccatcgtgtaccggagccgcgacttcctggtggtcaacaagcactgggacgttcgcattgacagcaaggcgtggcgggagacggggcggccggagccccacggtggcgtctgtggaggaaagtggctcagactctggactctgtcccactccaggttctgccaccagctggatttctccaccagcggggcgctgtgcgtggccctattggtgttaggtgggctccccggcagcactgggctgccccgtgaactgcgtgcgattctccctctcctgcagctgcgggggcacatccaggagagccgggtaagcatcgtgcgttggggtgggcctgggccccgggtcagtcccactaacctcacacctgccttctgcgccccaggttgtgagaacccaaagccaagcctcacagggtcctggtcagggagataggtgtggatcggccccgctcccagcttgatccggcaccgccctcatcccgcaggccggacacaccagctgcgcgtcgcactgcagtgccctgggccaccccgtggtgggcgacctgacctacggagaagtctcgggccgggaggaccggccgttcagaatgatgctgcacgctttctacctgcgcatccccacggacaccgagtgtgtggaggtctgcacgcctgaccccttcctgccctccctgggatgcctgctggagcccccacacactgctgcagtcgctgggaccagcttcgttgcaggccttaaggggcaaccccccgacccttgaacccgaggataagggggccccaggccaggcagcccctccgcactcctgcctgggcacggccggcctcctccacccacaaccaagccccctgagactgaggcacagcggggcccctgcctgcagtggctgtcggagtggacgctggaaccggacagctgagagccgtggggctggggcagggggtgtcagctgcacagcggagactctagggagatgggcgagcgagcgtctgctcactggctctggggcctcgacccggga

SEQ ID NO: 135170 - DNA, 1824 bp, Homo sapiens
gctgggactacaggcctgtgaactaccaggaggagaggctaagtcggctggtctgtagagactgaagccacccctccttctaggggctcaggcccagggagatccaaattctgtccctgaggctctggctggagttattggagatcctgcaggaaagccctatttttcaatgagagcctcctaatgctgttgcttcttgtcagccatcttggcccttcccccagcccccgtccccgtcccccatccccgtcgtccccagtccccacccccgtaccccggacccccacccccgtcgctgtgagacaattaatgtctgttgtttaagccactcagttcctggtactttgttatggcagccctagcaaatgactacactgatcctcacctgacactaccttctgttaattgttctttggcttcaagcactgaagccaaaggcaggatgccgctaccctatggaaacacagtgagccaagcccagagaactttggtccttcaatttcccccttgctccacccctcttgtgagcaggacctggagcctggaggtcaaggagaggctaggagcagcgacctatggcgctctgggaaggagctcccggcttgcctatgggtgccctggggagagcatcacccagctccgaggactcaaagacagtctccgttcctcactcttcaaagaccacctccttttctagaggtgggctccccgaagaggattatccgtagacttagatgggggttcctccgcccctctctgtcctcctgccaccacagccaggctggacgcagaaccgcacggaagcctccccaactcctgcctctgggagtgctcctgcctgcttcaaggaatctgggcagcgggaccctctggtctctctctccactacccccctctttcttccccactcggctcctctcccccctcgcgcccacagcgtttggtgttgattcgagcgggaagaggggggtgggtgggatcggtgggggagaccatgacctccagctacgggcacgttctggagcggcaaccggcgctgggcggccgcttggacagcccgggcaacctcgacaccctgcaggcgaaaaagaacttctccgtcagtcacctgctagacctggaggaagccggggacatggtggcggcacaggcggatgagaacgtgggcgagttcatcccgcacgcggggcggcggggctgggctgggaaaaggtcttagcggggtgcaaactcagagagccagcgctgtttgggaaagcagcaggttaaagatgctgagtcgggttggaagggcttctctcgggcagcgtatgacggcttgagggagactgcaattgtatccccatgcccccaagtctgtaacagaccggtcaccctgttcatcccaggtgacgaaatcgtggaaccggggggccctccagcattctatgattttcacaaaacgttgcctatttcagactctcaaagaatagacatacaaatcaaactgcacatagaaacaattggaaaaaccagggccaaggccagcggcctcggccagcctagggaacaagccagccgtggtggccctcagatactgcaggggaagagggatgaaaattgtaccggttggaggtggtgatttcggtttattttacatgcagaagtaggggcccgggttacctccttctcttagaattttggggaaattgatagtccagtgactcctacccacttttgggtgaaggacgatttggaatttgaagtgtggggagacaggcctgtgaagtccgaaggactcactgggtctccagatcccccaactctggaatgcagtgaataccc

SEQ ID NO: 135171 - DNA, 1905 bp, Homo sapiens
agcggccgcagtggcgtcctggagccctcctcagtgctgaagctgctgaaagatggcagaagaagtggtggtagtagccaaatttgattatgtggcccaacaagaacaagagttggacatcaagaagaatgagagattatggcttctggatgattctaagtcctggtggcgagttcgaaattccatgaataaaacagggttttgtgccttctacctatgtgggaaggggaaaacagtgctcggaaagcatctattgtgaaaaacctaaaggataccttaggcattggaaaagtgaaaagaaaacctagtgtgccagattctgcatctcctgctgatgatagttttgtttgacccaggggaacgtctctatggacctcaacatgcccgctttatgtgaaatttaacttacatggctgagagagaggatgaattatcatttgataaagggggacaaaggtgatcgtcatggagaaatgcagtggatggttggtggcgtggtacctacaatggacaagttggatggttcccttcaaactatgtaactgaagaaaggggaaagtcctttgggtgaccatgtgggttctctgtcagagaaattagcagcagtcgtcaataacctaaatactgggcaagtgttgcatgtggtacaggctctttacccattcagctcatctaatgatgaagaacttaatttcgagaaaaggagatgtaatggatgttattgaaaaacctgaaaatgacccagagtggtggaaatgcaggaagatcaatggtatggttggtctagtaccacaaaaactatggtaaccgctattgcagagtattcaattaacctcaggtttgggaaccttaaccttccagtgtggattcattaggccttacattcctggaaagtttgttggcaatccttggtattatggcaaagtcaccaggcatcaagcagaaatggcattaaatgaaagaggacatgaaggggatttcctcattcgtgatagtgaatcttcgccaaatgatttctcagtatcactaaaagcacaagggaaaaacaagcattttaaagtccaactaaaagatgactgtctactgcatttggcagcgtaaatcatgcaccatggaatgacttgtagaacattacaaaaacggcaccaaatttttacaacgtgaacaaaggagaaaaattatatcttgtcaagcatttatccatgatactgctgacccagaagtgactgctgtgtagctgtaatttgtcatgtaattgaattgaagactgagaaaatgttgggtccagtcgtgcttgattgggaaattggttgtttctaaatccatatggagaatttgaccattaagtatttttattataactcagcccatacatatatactatgtatgcagtgcatctgcatagaacagttccttatccttggccttctgttttatggtttttttctttgctgttttcccccttggcttctaatattacagttttgtattttgtaaacaaaaaatcaaataatggcatatcagaatctttatatggaagaaatcctttattgccctttcctttgtttccttgtaaaggcaccctgttctgttatggtttttcattatataaaattattatatctatatatgacatatgctaaaatttcttggagagtgttaatcttttctgtgactaaatagcaataataagtggaaaattagaaattatttccaggtattatatttgtcacaggccattgtaaataccaagtatattgtgtctgccataatttttaaaaatacattcattgtcttcagtcatacagcaagacacatgagacatagattagaaaacatgttgtacaattttaatttacaactgttgaaaataacacaccccttaatttttttccaaaaaaaaaa

SEQ ID NO: 135172 - DNA, 428 bp, Homo sapiens; identical to SEQ ID NO: 116745

SEQ ID NO: 135173 - DNA, 1098 bp, Homo sapiens; identical to SEQ ID NO: 116746

SEQ ID NO: 135174 - DNA, 2787 bp, Homo sapiens
gctcagtgccctttgatggcccagatgccagaaaacacagctgccccagcagcgacctgtcctcatcctccccacttcctccaatagaaagcctgtctagggtgcaatggcttagatcagagacacgtgactctgaagagccaatggccaggaatggcttctggcaccttctttatgttgccttcctgaatagcgcggccgcagcccggagcccgcagcccggagcccgcagcctggggcccgcagcccgtagcccgcagcccgcagagccgcgctgtccggggcatcccagtgcacggcgtccgtggaccctgggacctcgaacctgggacgggcggaaaatccactgggaacacttgcatttctgtaggtgcttatttcacattcttgtcttttcttgcttgctcgagctgttcgtgggttactttctgccttagttaaaccaaaagggaaaaggcggaagaggggaagccctcaagaatgatttagtggttgccccgcctccttctccaaggagaggtgttcgctgagaggctctccacgtccccgacactggcccctttaagaagccaagaaaaaggaaatgaaaccagagacagagggaagctgagcgaaaatagaccttcccgagagaggaggaagcccggagagagacgcacggtcccctccccgcccctaggccgccgccccctctctgccctcggcggcgagcagcgcgccgcgacccgggccgaagggagcgcggtgactgtccttgagcgcggaggggcgagctcgccggcggagcgccggagcaagcggaggcgcaggagcggcggcgacggcggcggcggcggcggcgcccgagcacccgagggggtccgagccccggcagccggccagccccgcgccacaaagggagcgcccccgccgcccggcaccccgcctccctccccaatgtcctcggccatcgaaaggaagagcctggacccttcagaccaccacgggccagaaagtttgcacgggagcaggcacgaggagagcctggaggcgcgcaggtgcagtccggagagcgttctgggcttgactctgctcccttcttccctctccttctcggtcctttctctttgtccatttggtcttggaaaggggaacattccaagtggcggcctccggggtccccaacggccgccttcccggtccgcaggtggagccgctgccagccttgcggataacgggcgggccatcaccgtaactcttttactttacattcctcctgttgtccagtatcctactagatgcttcattgtgtacttcctcaaatccagcttgggtcattacaatcagcatctccaaattacagatggagacttgcctagctatatgcaaatgaaacatttggacagaaagccagccagaattcatgaacacagattcccttgctgtgctactggtggcccccactgcctcccctgtggagatattaaagcaggatataaggcatcaggaaaaacctggttttctgtatccctggtcattgctctgccaactcacccctgcccagatcagttggccttatttcctcagtggaaatctactcactatgatgtggtagttggcgtgttgtcagctcgcaataaccatgaacttcgaaacgtgataagaagcacctggatgagacatttgctacagcatcccacattaagtcaacgtgtgcttgtgaagttcataataggtgctcatggctgtgaagtgcctgtggaagacagggaagatccttattcctgtaaactactcaacatcacaaatccagttttgaatcaggaaattgaagcgttcagtctgtccgaagacacttcatcggggctgcctgaggatcgagttgtcagcgtgagtttccgagttctctaccccatcgttattaccagtcttggagtgttctacgatgccaatgatgtgggtttccagaggaacatcactgtcaaactttatcaggcagaacaagaggaggccctcttcattgctcgcttcagtcctccaagctgtggtgtgcaggtgaacaagctgtggtacaagcccgtggaacaattcatcttaccagagcatgccagagttgggcttccggagtctcatgtggtcagtaacgttattactaatccaacttgtgctcaagcaaccttggccccactggaaagcagtctccatcaacttgttctgcattcagagactgttcttgggccttcccatacgcagctcacatttgaaactcctgcccctggtgccttaatgcatctgactggcagccacacagcccctccatgtggctcagtttcagtgggtaggcttgccagtcttcaccccgaaactcacataaaggaactatgccagtccttgctgaccgcgggtggccgcggcttagccggccgaagccccgccccctccgcctggccttcccaccggctccgcccaccttttctcccactcgccccgccctctcctcccgcgtttccacacgcgccagccagccggccgggagctgaagtcccgctctgggcccaggcagggggcgcccgcggtttagaaaccacatttcccatgagcctaagcacgcgcttccgtcactcggcggccgcgggggcgaagcgcgaggccccacacagagcatgcgcatcccccttgacgtttgctgccaccccacggcccaggggaggtagtgccggagacccggtgctcggaggctgcccggagccgcgaagggaaatgcgctttgcctcagatttgaaggaaatccgagtggctcttgtgtga

SEQ ID NO: 135175 - DNA, 927 bp, Homo sapiens
atgtgtggcttggctggctggtccagggcctggaaggagaaagattggaagattagggacaagaaggtctggggtagaggaatgtgcagggagatatgggattgggcacaaagggcgaagatagttgtatcccatgtgaaggcccagtgtagggcatccaccattgaagaggcactaaacaaccaagtagaaaaaatgatttggtcatttgattccagtcagcgtctgccatcagccaccctactgctggcaatcaccttctacgaggacagggccttccagggccgcagctacgaatgcaccactgactgccccaacctacaaccctatttcagccgctgcaactccatcagggtggagagcggctgctggatgatctatgagcgccccaactaccagggccaccagtacttcctgcggcgtggggagtaccctgactaccagcaatggatgggcctcagcgactccatccgctcctgctgcctcatccccccggcacatcggggcacactaatcatgacactgccacacatgtccatagcaaagaacatgaagagagtgatactacaggaatcaaagctggactgtgtcttgcacatatttaatatgctccacaggccctcgtacagtgttggccagtggagtacacagatggccagctcccacaggctcaggatctatgagcgagaggactacaggggccagatggtggagatcactgaggactgctcctctcttcacgaccgcttccacctcagtgagatccactccttcaacgtgctggagggctcctgggtcctctacgagctgcccaactaccaggggcggcagtacctgctgaggccgggggactgcaggtggtgccaggactggggggccacggatgcgagagtgggctccctaaggagagctgtggagctctactga

SEQ ID NO: 135176 - DNA, 438 bp, Homo sapiens
atggggaagatcaccctctacgaggaccggggcttccagggccgccactatgaatgcagcagcgaccaccccaacctgcagccctacttgagccgctgcaactcggcgcgcgtggacagcggctgctggatgctctatgagcagcccaactactcgggcctccagtacttcctgcgccgcggcgactatgccgaccaccagcagtggatgggcctcagcgactcggtccgctcctgccgcctcatcccccacgaccgcttccgcttcaatgaaatccactccctcaacgtgctggagggctcctgggtcctctacgagctgtccaactaccgaggacggcagtacctgctgatgccaggggactataggcgctaccaggactggggggccacgaatgccagagtgggctctctgaggagagtcatagatttctcctga

SEQ ID NO: 135177 - DNA, 590 bp, Homo sapiens
atggggaagatcaccctctacgaggaccggggcttccagggccgccactatgaatgcagcagcgaccaccccaacctgcagccctacttgagccgctgcaactcggcgcgcgtggacagcggctgctggatgctctatgagcagcccaactactcgggcctccagtacttcctgcgccgcggcgactatgccgaccaccagcagtggatgggcctcagcgactcggtccgctcctgccgcctcatcccccactctggctctcacaggatcagactctatgagagggaggactacagaggccagatgatagagttcactgaggactgctcctgtcttcaggaccgcttccgcttcaatgaaatccactccctcaacgtgctggagggctcctgggtcctctacgagctgtccaactaccgaggacggcagtacctgctgatgccaggggactataggcgctaccaggactggggggccacgaatgccagagtgggctctctgaggagagtcatagatttctcctgaaatatgtcctcctttgttgtttcttaatttggaaactaataaaatattttctgtgtgttcctggc

SEQ ID NO: 135178 - DNA, 672 bp, Homo sapiens
atggggaaggggagcccagcccacgcccagggccccggcagcttcctgcatggtggggccggagaccagggcaggggcaggcctatcaccctctacgaggaccggggcttccagggcccgccactacgaatgcagcagcgaccaccccaacctgcaagcctacttgagccgctgcaactcggtgcgcgtggacagcggctgctgggtgctctatgagcagcccaactactcgggcctccagtagttcctgcgccgcggcgactatgccgaccaccagcagtggatgggcctcagcgactcggtccgctcctgccgcctcatccccccacgccagctcccacaggctcaggatctatgagcgagaggactacaggggccagatggtggagatcactgaggactgctcctctcttcacgaccgcttccacctcagtgagatccactccttcaacgtgctggagggctcctgggtcctctacgagctgcccaactaccaggggcggcagtacctgctgaggccgggggactgcaggtggtgccaggactggggggccacggatgcgagagtgggctccctaaggagagctgtggagctctactgaaatgtttgtactctatcccttgcttcatctggaaactaataaaatatttcctgtgtgttctatgcaaaaa

SEQ ID NO: 135179 - DNA, 1239 bp, Homo sapiens
atggaaagggcagagtttgtcttcactggaatagacgcttactccagatacgggtttgcctatcctgcatgcaatgcttctgccaagactacctctgtggactcatggaatgccttatccactgtcatggtattccacacagcattgcctctgaccaaggcactcaccttacggctaaagaaactagtgaccgtgtccttggttgattccacagtggttttatggctctggcagctgcaaacacaactcaaggtggccaaagacagagctttctccccttgtccctccgtcggggaggaaaaccctccctatgagtccctgcagatttcccctgatgtcccattgaggaggacaaggtcacgttgtcaggttcacaactataccaaatgccctgcttggggtcaggttccagcccatgctgaggttcgaggggagtgggcagatgggcagttacctcagcctatccttgaccaaagcacacccatgatcctgacacgcgtgctctggccttacagcaagggaggcaagaaagtgagtctgccattgtcagcccctggggagaaaggagggccctgccggcagggcagcaagtcgggagcagctgtgggtggtgtcctacaggctctgctgtggaggaagagctgctgccctgagtggaggcaaggatggatgtgggtggacaatcagctcattggtaccacgcagcccttcatgctctatgtgactcccctgagcaatgagaatgaggtcatcgagaccggcccagctgtgcaagtcaacgcagtgaagttccccagtaagagtgcactgaccaacatctacaagcatctgatgatcacagctcagagattcacagtgcaaattgaggagaaactgctcctcaagctgctaagtttctttggctacgatcaagcagaatcagaggtggaaaaatatgatgaaaacctccatgaaaagacagctgagcaaggtggaacaccaattcgatactactttgaaaatctcaaaatcagcattcctcagatcaagctaagtgtgttcacctccaacaagctcccattggatcttaaggaactcctcagccaggcagctcgaatcctgggatcagtggattttcttggcaatcctatggggcttttgaatgatgtttctgaaggggttactggactgataaaatatggaaatgtcgggggcctcatcagaaatgttacacacggagtatcaaactctgctgccaag

SEQ ID NO: 135180 - DNA, 408 bp, Homo sapiens
  misc_feature (1)...(408): n = a,t,c or g
caaaaataaaggtccttctcaaaaatccccaggtaggttataatacgcctccctataaggaaaaaactattaccttgccagcccgcgtaaactttggcccccccaaggatcctttaaaacggcccccccnnnnnnnnnnnnnngtagtcagctatttaattaggttcttaagacatttagaacaccaatttgtgaggataaattccattcgtcagagcaaacacagatcgcaggtagccctggagctgaggaatagctttgatttttggtaaaatttgtgagtccacagctttctgatcaatcttgcgctgctccgtaatctcatatttctctttttctgtgtcgaagatctcaccttcctggtgtctgggcttccgcagcttcttcttcttgaagcggacgcgtggg

SEQ ID NO: 135181 - DNA, 422 bp, Homo sapiens
  misc_feature (1)...(422): n = a,t,c or g
cccacgcgtccggatttgtttacaaatgtgcaaattatttagagcatagactttataagcattaaaaaaaactaatggaggtaaaacctaaatgcgatgtgaaataattttagtgttgataccgtatgtgtatttttattctaataaacttttgtgttccagattgnnnnnnnnnnnnnnngggggggccgttttaaagaatccttgggggggccaaagtttacccgggcttgcaaggtaatagttttttccttatagggagccgtattataacctacttgggaatttttgnnnnnnnnnnnnnnnnnnnnnnnnnnnnnnnnnnnnnnnnnnnnnnnnnnnnnnnnnnnnnnnnnnnnnnnnnnnnnnnnnnnnnnnnnnnnnnnnnnnnnnnnnnnnctgcatatgctggctgtttgaaa

SEQ ID NO: 135182 - DNA, 492 bp, Homo sapiens
  misc_feature (1)...(492): n = a,t,c or g
attgatcgcctgcggnaccgattgataaccntcgggacgacccacgcgtccggccccctccaaatagccatacttagcctcagcaggagcctggcctgtaacttataaagtgcacctcgcccccgcaagccccagccccgaggaccgtccatggaccttatttttatatgagattaataaagatgtttgcnnnnnnnnnnnnnnnnnngggggggccgttttaaagaatccttgggggggccaaagtttacgcgggctggcaaggtaatagttttttccttatagggggccgatttaaaacctacttgggaatnnnnnnnnnnnnnnnnnnnnnnnnnnnnnnnnnnnnnnnnnnnnnnnnnnnnnnnnnnnnnnnnnnnnnnnnnnnnnnnnnnnnnnnnnnnnnnnnnaaagggggaaacctaactggattagcttgctggttggaagttttgctttactgggttgattttttgaaattttttcccccgg

SEQ ID NO: 135183 - DNA, 1286 bp, Homo sapiens
gatgtttttcctttgtgtttgtaaggcattcttctaggcactgcagagaatatgaaacattaattactgctgacttcccaccagaagcctcttatttgatgtcactgtgtagctggtcagtgaccactatggtagcattcttggcacaaagcaggccctcaggaagtgctggtgcccaccgtcattctcgtgttaggtctagcacagcactggggcacagcaagcgcttagcagatactgacctggctctcatgaagccagcatggacgccagcttttcagcattgtatgcagcaccccaaccagccttgtgaagaaaagagatatgaacaaatggtcacacaacagtcggatacccacactcagaaagccacgtgcagaggcagcacatgctgggcactagggcagccgcagctcctagttagccacgtgatcatgaagagggaacaaatactctacagtgggccctgctgccagatgacttcgcccagctgtcagctaatattgtcttgtgacaaaacagagttttatgtcctttttatcccagctttgatggatgagacagcttttctggttaaatttgctggaacattatcagatggcttagggaagacgatggacaatcggcatcagtcagagcgggagtacatcaggtaccatgcagccacaagtggtgaacaccttgtagccggcatccatggcctggctcatggtaagtcatgggtgacatcaggctctgctgctgctggtcctcagaggcgcctttgtatcaatctgattgcagctataaaaaaagaaaggttacaacagcccttgtctttttcactaggtatcattggtggactgaccagtgttataacttcgacagtggaaggtgtgaaaacagaagggggtgtcagcggtttcatatctggccttggaaaagggcttgttggcactgtaaccaagccagtggcaggcgccctggattttgcatcagaaacagcccaggcggtgagagacacagccacactcagcggccccagattaaaatacttccaagttcctctccttgttggagtgcgctggcattccaagcgacagccacctaactttcctctgaaatttccaggcaacccaatagttctcaggaaggcagatgaggcactaaaaagccaattgggagctcttggtttgaggctgagggggccttactgtggaatgatcaagtggggacctgctgactctgggctcctgttgagaggagcaaaactgaatggggatgagagaggggacctgaagctctaa
